United States Patent Application Publication US 2011/0183924 A1 - sequence listing, part 104

SEQ ID NO: 316492 - DNA, 1632 bp, Homo sapiens
cgcgccctacatccaccgcccggcggagggggctcagtccgcagccgccgccgccaccgccgcgcctcggcctcggtgcaggcagcggccgccgccgccgagacagctgcgcgggcgagcatccccacgcagcaccttggaagttgttttcaaccatatccagcctttgccgaatacatcctatctgccacacatccagcgtgaggtccctccagctacaaggtgggcaccatggcggagaagtttgatgcctgaaatgctttgacaagttctgtgccaacacctgtgtggaatgccgcaagcccatcggtgcggactccaaggaggtgcactataagaaccgcttctggcatgacacctgcttccgctgtgccaagtgccttcaccccttggccaatgagacctttgtggccaaggacaacaagatcctgtgcaacaagtgcaccactcgggaggactcccccaagtgcaaggggtgcttcaaggccattgtggcaggagatcaaaacgtggagtacaaggggaccgtctggcacaaagactgcttcacctgtagtaactgcaagcaagtcatcgggactggaagcttcttccctaaaggggaggacttctactgcgtgacttgccatgagaccaagtttgccaagcattgcgtgaagtgcaacaaggccatcacatctggaggaatcacttaccaggatcagccctggcatgccgattgctttgtgtgtgttacctgcctcttctgtgagcaggaaaagaaccctactgacatgcatggtttaacttcctcatcagaactctgcccttccttctgttcttttgtgctttcaaataactaacacgaacttccagaaaattaacatttgaacttagctgtaattctaaactgacctttccccgtactaacgtttggtttccccgtgtggcatgttttctgagcgttcctactttaaagcatggaacatgcaggtgatttgggaagtgtagaaagacctgagaaaacgagcctgtttcagaggaacatcgtcacaacgaatacttctggaagcttaacaaaactaaccctgctgtcctttttattgtttttaattaatatttttgttttaattgatagcaaaatagtttatgggtttggaaacttgcatgaaaatattttagccccctcagatgttcctgcagtgctgaaattcatcctacagaagtaaccgcaaaactctagagggggagttgagcaggcgccagggctgtcatcaacatggatatgacatttcacaacagtgactagttgaatcccttgtaacgtagtagttgtctgctctttgtccatgtgttaatgaggactgcaaagtcccttctgttgtgattcctaggacttttcctcaagaggaaatctggatttccacctaccgcttacctgaaatgcaggatcacctacttactgtattctacattattatatgacatagtataatgagacaatatcaaaagtaaacatgtaatgacaatacatactaacattcttgtaggagtggttagagaagctgatgcctcatttctacattctgtcattagctattatcatctaacgtttcagtgtatccttacagaaataaagcagcatatgaataa

SEQ ID NO: 316493 - DNA, 1464 bp, Homo sapiens
  misc_feature (780)..(780): n is a, c, g, or t
cgcgccctacatccaccgcccggcggagggggctcagtccgcagccgccgccgccaccgccgcgcctcggcctcggtgcaggcagcggccgccgccgccgagacagctgcgcgggcgagcatccccacgcagcaccttggaagttgttttcaaccatatccagcctttgccgaatacatcctatctgccacacatccagcgtgaggtccctccagctacaaggtgggcaccatggcggagaagtttgactgccactactgcagggatcccttgcaggggaagaagtatgtgcaaaaggatggccaccactgctgcctgaaatgctttgacaagttctgtgccaacacctgtgtggaatgccgcaagcccatcggtgcggactccaaggaggtgcactataagaaccgcttctggcatgacacctgcttccgctgtgccaagtgccttcaccccttggccaatgagacctttgtggccaaggacaacaagatcctgtgcaacaagtgcaccactcgggaggactcccccaagtgcaaggggtgcttcaaggccattgtggcaggagatcaaaacgtggagtacaaggggaccgtctggcacaaagactgcttcacctgtagtaactgcaagcaagtcatcgggactggaagcttcttccctaaaggggaggacttctactgcgtgacttgccatgagaccaagtttgccaagcattgcgtgaagtgcaacaaggccgccaccgccgcgcctcggcctcggtgcaggcagcggccgccgccngagacagctgcgcgggcgagcatccccacgcagcaccttggaagttgttttcaaccatatccagcctttgccgaatacatcctatctgccacacatccagcgtgaggtccctccagctacaaggtgggcaccatggcggagaagtttgactgccactactgcagggatcccttgcaggggaagaagtatgtgcaaaaggatggccaccactgctgcctgaaatgctttgacaagttctgtgccaacacctgtgtggaatgccgcaaaactctagagggggagttgagcaggcgccagggctgtcatcaacatggatatgacatttcacaacagtgactagttgaatcccttgtaacgtagtagttgtctgctctttgtccatgtgttaatgaggactgcaaagtcccttctgttgtgattcctaggacttttcctcaagaggaaatctggatttccacctaccgcttacctgaaatgcaggatcacctacttactgtattctacattattatatgacatagtataatgagacaatatcaaaagtaaacatgtaatgacaatacatactaacattcttgtaggagtggttagagaagctgatgcctcatttctacattctgtcattagctattatcatctaacgtttcagtgtatccttacagaaataaagcagcatatgaataa

SEQ ID NO: 316494 - DNA, 1370 bp, Homo sapiens
cgcgccctacatccaccgcccggcggagggggctcagtccgcagccgccgccgccaccgccgcgcctcggcctcggtgcaggcagcggccgccgccgccgagacagctgcgcgggcgagcatccccacgcagcaccttggaagttgttttcaaccatatccagcctttgccgaatacatcctatctgccacacatccagcgtgaggtccctccagctacaaggtgggcaccatggcggagaagtttgactgccactactgcagggatcccttgcaggggaagaagtatgtgcaaaaggatggccaccactgctgcctgaaatgctttgacaagttctgtgccaacacctgtgtggaatgccgcaagcccatcggtgcggactccaaggaggtgcactataagaaccgcttctggcatgacacctgcttccgctgtgccaagtgccttcaccccttggccaatgagacctttgtggccaaggacaacaagatcctgtgcaacaagtgcaccactcgggaggactcccccaagtgcaaggggtgcttcaaggccattgtggcaggagatcaaaacgtggagtacaaggggaccgtctggcacaaagactgcttcacctgtagtaactgcaagcaagtcatcgggactggaagcttcttccctaaaggggaggacttctactgcgtgacttgccatgagaccaagtttgccaagcattgcgtgaagtgcaacaaggccatcacatctggaggaatcacttaccaggatcagccctggcatgccgattgctttgtgtgtgttacctgctctaagaagctggctgggcagcgtttcaccgctgtggaggaccagtattactgcgtggattgctacaagaactttgtggccaagaagtgtgctggatgcaagaaccccatcactgggtttggtaaaggctccagtgtggtggcctatgaaggacaatcctggcacgactactgcttccactgcaaaaaatgctccgtgaatctggccaacaagcgctttgttttccaccaggagcaagtgtattgtcccgactgtgccaaaaagctgtaaactgacaggggctcctgtcctgtaaaatggcatttgaatctcgttctttgtgtccttactttctgccctttctggtggccaccagaaagggcatatcttcgtcattatttgacttttaatctatatgtgtcataatatttaaagagtatttatggtaggcagcatgtaattgggttctgcatttttatccaatttagacagtatccggtatttatactgaaggtcttcagacaatgaacactcttaatataattattgatattgcatgagatttaagcctgtcattatgctgtttg

SEQ ID NO: 316495 - DNA, 1969 bp, Homo sapiens
cgcgccctacatccaccgcccggcggagggggctcagtccgcagccgccgccgccaccgccgcgcctcggcctcggtgcaggcagcggccgccgccgccgagacagctgcgcgggcgagcatccccacgcagcaccttggaagttgttttcaaccatatccagcctttgccgaatacatcctatctgccacacatccagcgtgaggtccctccagctacaaggtgggcaccatggcggagaagtttgactgccactactgcagggatcccttgcaggggaagaagtatgtgcaaaaggatggccaccactgctgcctgaaatgctttgacaagttctgtgccaacacctgtgtggaatgccgcaagcccatcggtgcggactccaaggaggtgcactataagaaccgcttctggcatgacacctgcttccgctgtgccaagtgccttcaccccttggccaatgagacctttgtggccaaggacaacaagatcctgtgcaacaagtgcaccactcgggaggactcccccaagtgcaaggggtgcttcaaggccattgtggcaggagatcaaaacgtggagtacaaggggaccgtctggcacaaagactgcttcacctgtagtaactgcaagcaagtcatcgggactggaagcttcttccctaaaggggaggacttctactgcgtgacttgccatgagaccaagtttgccaagcattgcgtgaagtgcaacaaggccatcacatctggaggaatcacttaccaggatcagccctggcatgccgattgctttgtgtgtgttacctgctctaagaagctggctgggcagcgtttcaccgctgtggaggaccagtattactgcgtggattgctacaagaactttgtggccaagaagtgtgctggatgcaagaaccccatcactgggtaggctaaagagtccttgctaagtctgccaggctaggttttgcgcatggtaaccatctctcattttcctgtcgtcggtttcatccacaaaggcccccagagaatgcccttctccccctgctattgtggtcccaaaggccccccaagagtttggattcgtccccaggccaggttagcctttgcaatacagaacacttcctgactgttgactaacaatgctgagagttcacaagcctgagacctgccagccaacaccggcaggcactgccactttgcagggggattctggggggaggggtgggaggagggtagaaagaagggggtgggggagggtggggaaggggtaagggaggccgaagagtgataacccgggattgtaataccccatagctgaaggctagttcagagatgcctgttggcagggtttcttttttttttggtttgctgtttatttgtttttgcgatcagcaaagctaatcacttcattcctcatctcgcggccgcgatccacgtgccctgggccctttcccttgcctccaattttcccatcttcccggggagccttgaaatgtacatttgagaagacttttgccatcctcagggaaaaggactgtgtcaagagtgagccacccagtctctaaagctaggaagcccccagtgtgccacgggaaacgcttgcctctcaccctgtttcccagcgccaacctccggggcaggcatccgggtggagagaggacttgtccctcgtgggtggtggttctttatagaaaaaatcgaagcttagcagctcctcgaggcccggtaagtgcacaccccacgaacagcccaagtttgcctcctggtggccactttgatgtcatggccctgacctaaatcaaagaaactggttatgctgggaggtcggtgcgcgtcacagggcaatagcgtggtggcatgggaacgtggggtctttacatcagggaagcccttggccgggcttcagcatcttctcaggtccttgagagccacagcagggttgcggcggcatgggggacaatggcggcgtgggg

SEQ ID NO: 316496 - DNA, 661 bp, Homo sapiens
cgcgccctacatccaccgcccggcggagggggctcagtccgcagccgccgccgccaccgccgcgcctcggcctcggtgcaggcagcggccgccgccgccgagacagctgcgcgggcgagcatccccacgcagcaccttggaagttgttttcaaccatatccagcctttgccgaatacatcctatctgccacacatccagcgtgaggtccctccagctacaaggtgggcaccatggcggagaagtttgactgccactactgcagggatcccttgcaggggaagaagtatgtgcaaaaggatggccaccactgctgcctgaaatgctttgacaagttctgtgccaacacctgtgtggaatgccgcaagcccatcggtgcggactccaaggaggtgcactataagaaccgcttctggcatgacacctgcttccgctgtgccaagtgccttcaccccttggccaatgagacctttgtggccaaggacaacaagatcctgtgcaacaagtgcaccactcgggaggactcccccaagtgcaaggggtgcttcaaggccattgtggcaggacgatcaaaacttggtctcatagcaagtcacgcagtagaagtcctcccctttacgggaagaagcttccagtcccgatgacttgttccagtactacagt

SEQ ID NO: 316497 - DNA, 780 bp, Homo sapiens
aaagggaacacaagctggcgctcacggatccttaattaaattaatcctccccccccccgggcagtggtgctgggagtgtcgtggacgccgtgccgttactcgtagtcaggcggcggcgcaggcggcggcggcggcatagcgcacagcgcgccttagcagcagcagcagcagcagcagcatcggaggtacccccgccgtcgcagcccccgcgctggtgcagccaccctcgctccctctgctcttcctcccttcgctcgcaccatggctgatcagctgaccgaagaacagattgctgaattcaaggaagccttctccctatttgataaagatggcgatggcaccatcacaacaaaggaacttggaactgtcatgaggtcactgggtcagaacccaacagaagctgaattgcaggatatgatcaatgaagtggatgctgatggtaatggcaccattgacttccccgaatttttgactatgatggctagaaaaatgaaagatacagatagtgaagaagaaatccgtgaggcattccgagtctttgacaaggatggcaatggttatatcagtgcagcagaactacgtcacgtcatgacaaacttaggagaaaaactaacagatgaagaagtagatgaaatgatcagagaagcagatattgatggagacggacaagtcaactatgaagaattcgtacagatgatgactgcaaaatgaagacctactttcaactcctttttcccccctctagaagaatcaaattgaatcttttacttacctcttgca

SEQ ID NO: 316498 - DNA, 1153 bp, Homo sapiens
cgcaaagtttctgctccgggaggaggcggcggcgccgcgggctcgtcgcctgggggagcagaagcgggtgggaggtgcgggtggccttggcctcagccctggtgcgcgggggccgggggtggtgaccctcctggccgaggaggggcggcgtccagacgcccgctcgggggccgccttcccccccacgcctgcccccgggcacgcgccctgcccggtccctcgccccgcgccacttccagtccgcagagagatgccctccacgtttctgctttctctgcagcctctagattgccagatgcgactgtgcgcctcgctgggctgatcagctgaccgaagaacagattgctgaattcaaggaagccttctccctatttgataaagatggcgatggcaccatcacaacaaaggaacttggaactgtcatgaggtcactgggtcagaacccaacagaagctgaattgcaggatatgatcaatgaagtggatgctgatggtaatggcaccattgacttccccgaatttttgactatgatggctagaaaaatgaaagatacagatagtgaagaagaaatccgtgaggcattccgagtctttgacaaggatggcaatggttatatcagtgcagcagaactacgtcacgtcatgacaaacttaggagaaaaactaacagatgaagaagtagatgaaatgatcagagaagcagatattgatggagacggacaagtcaactatgaagaattcgtacagatgatgactgcaaaatgaagacctactttcaactcctttttcccccctctagaagaatcaaattgaatcttttacttacctcttgcaaaaaaaagaaaaaagaaaaaagttcatttattcattctgtttctatatagcaaaactgaatgtcaaaagtaccttctgtccacacacacaaaatctgcatgtattggttggtggtcctgtcccctaaagatcaagctacacatcagttttacaatataaatacttgtactaccttaatgataaggactccttaaagttccatttgctaatgattaatacactgtttgggctggccagtttttcatgcatgcagcttgacgattgagcacagtcaggcctttgtattaaaaatgaaaaatgaaaaaacaaattcaaaacct

SEQ ID NO: 316499 - DNA, 517 bp, Homo sapiens
tgctctagacgtactccccagttctggtccgccccactggtaggatggtcctcttgtacttcgtgtgctccgacccatggtgacgatgacacaccctggtggcatgcccgtgtatgttggtttagcgttgtctgcattgttctagagtgaaacaggtgtcaggctgtcactgttcacacaaatttttaataagaaacatttaccaagggagcatctttggactctctgtttttaaaaccttctgaaccatgacttggagccggcagagtaggctgtggctgtggacttcagcacaaccatcaacattgctgttcaaagaaattacagtttacgtccattccaagttgtaaatgctagtcttttttttttttttttccaataaaattttttttttttttttttttttttttttttttttttttttttttttttttttttttttttttttatatttttttttttgggtggggaaagagaaaaatagaaacaagaaagaaaaaatatagataggataaaa

SEQ ID NO: 316500 - DNA, 601 bp, Homo sapiens
cttccgctttcacttctaaaagctataataatgttatagacagaagacttaaatctaactgcctgagcctctgatctcactttcaaaaatcctccttatggtaaccgtatcaggggagggtaggcataataaataggaattttggaccatgtttcttgactgttactttgaattgttgtgagcttttgcaaatcctgttttctgcattagctgtttgcatgtatttagtaggttagaggtgggaactagagatcagagaattgtttatggcagcagagttagcagtaacttgagagggcatagctaagtcaaagacctacttccccacactacatcattagcaataacaattgctgaatgttcacaggatggcaatggttatatcagtgcagcagaactacgtcacgtcatgacaaacttaggagaaaaactaacagatgaagaagtagatgaaatgatcagagaagcagatattgatggagacggacaagtcaactatgaagaattcgtacagatgatgactgcaaaatgaagacctactttcaactcctttttcccccctctagaagaatcaaattgaatcttttacttacctcttgca

SEQ ID NO: 316501 - DNA, 251 bp, Homo sapiens
gcggccgcctactactactactactgctcgaattcaagcttctaacgatgtacggggtcatgacaaacttaggagaaaaactaacagatgaagaagtagatgaaatgatcagagaagcagatattgatggagacggacaagtcaactatgaagaattcgtacagatgatgactgcaaaatgaagacctactttcaactcctttttcccccctctagaagaatcaaattgaatcttttacttacctcttgca

SEQ ID NO: 316502 - DNA, 640 bp, Homo sapiens
  misc_feature (18)..(18): n is a, c, g, or t
  misc_feature (20)..(20): n is a, c, g, or t
tagtcaggctcggccctntngatcttaaattggtttacctcaggatgacgtgcagaaaaatgggtgaaggataaaccgttgagacgtggccccactggtaggatggtcctcttgtacttcgtgtgctccgacccatggtgacgatgacacaccctggtggcatgcccgtgtatgttggtttagcgttgtctgcattgttctagagtgaaacaggtgtcaggctgtcactgttcacacaaatttttaataaggatcccctaaggggatccttatttaaaatacagtgttagcatagatccccttttcaggaaggacccaaatgtcagtgcatagttagataaaacggtacaatgttttactgaaagcatacttttttggaaaatagattcatgaagcctttagtgctgcttctgtcagtcccaccttacaaactttaacattttctaagtgccccgaccgtgtaccaagacacatctaatggagattgtaccggttgtttttttgtttgaacctcttgaaagagttcaatcttaacgttttctcattttaaaatttaaaatcttgtttaaccaaagcttgtataagatactgttttcatttcattacagacttgtttataaaagttcattttttataagga

SEQ ID NO: 316503 - DNA, 4217 bp, Homo sapiens
cgcagactcgcgctccggtgtggtgctgggagtgtcgtggacgccgtgccgttactcgtagtcaggcggcggcgcaggcggcggcggcggcatagcgcacagcgcgccttagcagcagcagcagcagcagcagcatcggaggtacccccgccgtcgcagcccccgcgctggtgcagccaccctcgctccctctgctcttcctcccttcgctcgcaccatggctgatcagctgaccgaagaacagattgctgaattcaaggaagccttctccctatttgataaagatggcgatggcaccatcacaacaaaggaacttggaactgtcatgaggtcactgggtcagaacccaacagaagctgaattgcaggatatgatcaatgaagtggatgctgatggtaatggcaccattgacttccccgaatttttgactatgatggctagaaaaatgaaagatacagatagtgaagaagaaatccgtgaggcattccgagtctttgacaaggatggcaatggttatatcagtgcagcagaactacgtcacgtcatgacaaacttaggagaaaaactaacagatgaagaagtagatgaaatgatcagagaagcagatattgatggagacggacaagtcaactatgaagaattcgtacagatgatgactgcaaaatgaagacctactttcaactcctttttcccccctctagaagaatcaaattgaatcttttacttacctcttgcaaaaaaaagaaaaaagaaaaaagttcatttattcattctgtttctatatagcaaaactgaatgtcaaaagtaccttctgtccacacacacaaaatctgcatgtattggttggtggtcctgtcccctaaagatcaagctacacatcagttttacaatataaatacttgtactaccttaatgataaggactccttaaagttccatttgctaatgattaatacactgtttgggctggccagtttttcatgcatgcagcttgacgattgagcacagtcaggcctttgtattaaaaatgaaaaatgaaaaaacaaattcaaaacctattcaaatgggttctagttcaatttgtttagtataaattgtcatagctggtttactgaaaacaaacacatttaaaattggtttacctcaggatgacgtgcagaaaaatgggtgaaggataaaccgttgagacgtggccccactggtaggatggtcctcttgtacttcgtgtgctccgacccatggtgacgatgacacaccctggtggcatgcccgtgtatgttggtttagcgttgtctgcattgttctagagtgaaacaggtgtcaggctgtcactgttcacacaaatttttaataagaaacatttaccaagggagcatctttggactctctgtttttaaaaccttctgaaccatgacttggagccggcagagtaggctgtggctgtggacttcagcacaaccatcaacattgctgttcaaagaaattacagtttacgtccattccaagttgtaaatgctagtcttttttttttttttttccaataaaaagaccattaacttaaagtggtgttaaatgctttgtaaagctgagatctaaatggggacaaggcaggtggaggggaggccagtgtacatgtaaatgcccacagcccagcattgggtttccctcccaaggccccagcaccaacctctgagcccaagaccttgcctgaaaacaagcagataccgattgcttcatcctatttatggacatgtaggtctagttgcattttcactggggggaggggggaaggtgaattatggtaacttttaatgatctattcaggcagtagagctcttaaggaaaaaaaaaacccactttctctcaagcatgtatttaggggttgttctcaattgtgctgctgattacctgtcttatgtaactacttgagaccatctgcaagagacatgatttagtgtgtctgtaattcaatcttcgctgtgtgtggtagaagcagtagtcacttttgtaagccagtctcttcatgcctaaaagacactaccagtcacctttgattcgcgacttttaatttatgattatacttagcctcctcctcctttttttttttttcccaagttgacttgactttgcttttttccccccaagtagaactaatgctagcttccagcttgaaagtaaaactccagtgtggagtgaattttgtgtctaattataaacctgtaaccaaaactcagacatctggtactggtctttgcattgagattggtccctgtaaaaccccctttaaaagcatattgcatttagtacagagctcttttttgaaatgaaggctggagatgtgcatttttcacggtgttaactggttgtatcttattagcaaggagattggggttttgagtgtttgcgtgggtggtttcaatttgccagggaacagtggcaggctgctagcaaggcagtgagaagctcttggcagccaaatgggtgcattcagggctgatttatagagacccttggcttctccttctcctactccctgtctttctggcattttgtagcttgttagattttctgccagaggggtgggtcagagcagtggaggggagacatcgcccatgtgcttctgctactggtccttgggctgggtggttggtagaggagatgttgacactatgagctaagggttggcttttgtaattacctgaatctgaaaggaatgcctaaggttaccttggggtttctcttctggtgagatagggttcctggtttgagtaagttaatgtcctggatatttcttgtggcagggggtggtcaaagagcctgattgctgacccagtctcaggcctgtggtcgatgacctctcggtagtttcaaagggggctggagggggatatttgacttgttttttcgaaatgtagccttctaaccctcaagtctttagaagctgggtggactcttagtggtcctgcagcgtatcctaaaagactacctttgaaacaggattcttgtatggccaggatcctgtctgggaaccagaaaccctacaccctccccctccaggaatgctgagttccagttttgagcagaggtgaggcagaatccactgtagccttccgccctggtatttggggggatgaccagcccaggcgttgggtgttagtctgcatgagtttgtgagaggaaatagctgggtgtcctggcagtgcccttgaagttggttaggaccttcctgtaaactcttgcccctacttctaactactctataaatatatacatatatttatatataaagtgattagttgaactggcatcctgctttagcctgagacttgccataagaaactgctgagtacttggcaaaccctttcatagttttgttctccatctgtttggggtaggtgttgagcgaggcaaatggatctcgatatttcagatgggcttttgatgcactgttgccaaggaaggctttttctgattttttgacaaatgaatttttgcacactttcattggtgtctttcggcaacttacacacattgaaaatgagctattgtacatatttttatattctctttataaatgcatgtctgattgtacttgtaacaatattgtaatgaacggctgtgcagtaggcccagcgctgctgtgtctcgtcagaggaatagcttaccacgaacccctcagcatactgggaatctcttcctgaacaacgaatgtaaatttggtcaagtctactcttccgttcattcaattattttaagcatttgaattatttattgtatatcctaaatatatttctcctttggcagtgactagatttccactaatgtgtcttaatctatccctccagctggcagttactgtttttttaatcccctgaagttgtcctgtaggagacagaaattctttgctgtctgtatcccttggagtaagaaggtagtggcatgggtggagtgtgtgttctttctccaaatctattatgatgtttattaaacacttctgtagcaaagatggtggtagttcttttgttactgaagttgcccttcaccatggctatttgaaaaggagatgtacttggacgtttctgtaaatcttgagataaactgtttggagatttaaccacctctctgatgggggaccaactctatggaaattgtaaatacgttttatttataaacctggcactgtattcaataaacatttctgcagcctttcatctctaa

SEQ ID NO: 316504 - DNA, 4207 bp, Homo sapiens
aaagggaacacaagctggcgctcacggatccttaattaaattaatcctccccccccccgggcagtggtgctgggagtgtcgtggacgccgtgccgttactcgtagtcaggcggcggcgcaggcggcggcggcggcatagcgcacagcgcgccttagcagcagcagcagcagcagcagcatcggaggtacccccgccgtcgcagcccccgcgctggtgcagccaccctcgctccctctgctcttcctcccttcgctcgcaccatggctgatcagctgaccgaagaacagattgctgaattcaaggaagccttctccctatttgataaagatggcgatggcaccatcacaacaaaggaacttggaactgtcatgaggtcactgggtcagaacccaacagaagctgaattgcaggatatgatcaatgaagtggatgctgatggtaatggcaccattgacttccccgaatttttgactatgatggctagaaaaatgaaagatacagatagtgaagaagaaatccgtgaggcattccgagtctttgacaaggatggcaatggttatatcagtgcagcagaactacgtcacgtcatgacaaacttaggagaaaaactaacagatgaagaagtagatgaaatgatcagagaagcagatattgatggagacggacaagtcaactatgaagaattcgtacagatgatgactgcaaaatgaagacctactttcaactcctttttcccccctctagaagaatcaaattgaatcttttacttacctcttgcaaaaaaaagaaaaaagaaaaaagttcatttattcattctgtttctatatagcaaaactgaatgtcaaaagtaccttctgtccacacacacaaaatctgcatgtattggttggtggtcctgtcccctaaagatcaagctacacatcagttttacaatataaatacttgtactaccttaatgataaggactccttaaagttccatttgctaatgattaatacactgtttgggctggccagtttttcatgcatgcagcttgacgattgagcacagtcaggcctttgtattaaaaatgaaaaatgaaaaaacaaattcaaaacctattcaaatgggttctagttcaatttgtttagtataaattgtcatagctggtttactgaaaacaaacacatttaaaattggtttacctcaggatgacgtgcagaaaaatgggtgaaggataaaccgttgagacgtggccccactggtaggatggtcctcttgtacttcgtgtgctccgacccatggtgacgatgacacaccctggtggcatgcccgtgtatgttggtttagcgttgtctgcattgttctagagtgaaacaggtgtcaggctgtcactgttcacacaaatttttaataagaaacatttaccaagggagcatctttggactctctgtttttaaaaccttctgaaccatgacttggagccggcagagtaggctgtggctgtggacttcagcacaaccatcaacattgctgttcaaagaaattacagtttacgtccattccaagttgtaaatgctagtcttttttttttttttttccaataaaaagaccattaacttaaagtggtgttaaatgctttgtaaagctgagatctaaatggggacaaggcaggtggaggggaggccagtgtacatgtaaatgcccacagcccagcattgggtttccctcccaaggccccagcaccaacctctgagcccaagaccttgcctgaaaacaagcagataccgattgcttcatcctatttatggacatgtaggtctagttgcattttcactggggggaggggggaaggtgaattatggtaacttttaatgatctattcaggcagtagagctcttaaggaaaaaaaaaacccactttctctcaagcatgtatttaggggttgttctcaattgtgctgctgattacctgtcttatgtaactacttgagaccatctgcaagagacatgatttagtgtgtctgtaattcaatcttcgctgtgtgtggtagaagcagtagtcacttttgtaagccagtctcttcatgcctaaaagacactaccagtcacctttgattcgcgacttttaatttatgattatacttagcctcctcctcctttttttttttttcccaagttgacttgactttgcttttttccccccaagtagaactaatgctagcttccagcttgaaagtaaaactccagtgtggagtgaattttgtgtctaattataaacctgtaaccaaaactcagacatctggtactggtctttgcattgagattggtccctgtaaaacccccttttgcatttttcacggtgttaactggttgtatcttattagcaaggagattggggttttgagtgtttgcgtgggtggtttcaatttgccagggaacagtggcaggctgctagcaaggcagtgagaagctcttggcagccaaatgggtgcattcagggctgatttatagagacccttggcttctccttctcctactccctgtctttctggcattttgtagcttgttagattttctgccagaggggtgggtcagagcagtggaggggagacatcgcccatgtgcttctgctactggtccttgggctgggtggttggtagaggagatgttgacactatgagctaagggttggcttttgtaattacctgaatctgaaaggaatgcctaaggttaccttggggtttctcttctggtgagatagggttcctggtttgagtaagttaatgtcctggatatttcttgtggcagggggtggtcaaagagcctgattgctgacccagtctcaggcctgtggtcgatgacctctcggtagtttcaaagggggctggagggggatatttgacttgttttttcgaaatgtagccttctaaccctcaagtctttagaagctgggtggactcttagtggtcctgcagcgtatcctaaaagactacctttgaaacaggattcttgtatggccaggatcctgtctgggaaccagaaaccctacaccctccccctccaggaatgctgagttccagttttgagcagaggtgaggcagaatccactgtagccttccgccctggtatttggggggatgaccagcccaggcgttgggtgttagtctgcatgagtttgtgagaggaaatagctgggtgtcctggcagtgcccttgaagttggttaggaccttcctgtaaactcttgcccctacttctaactactctataaatatatacatatatttatatataaagtgattagttgaactggcatcctgctttagcctgagacttgccataagaaactgctgagtacttggcaaaccctttcatagttttgttctccatctgtttggggtaggtgttgagcgaggcaaatggatctcgatatttcagatgggcttttgatgcactgttgccaaggaaggctttttctgattttttgacaaatgaatttttgcacactttcattggtgtctttcggcaacttacacacattgaaaatgagctattgtacatatttttatattctctttataaatgcatgtctgattgtacttgtaacaatattgtaatgaacggctgtgcagtaggcccagcgctgctgtgtctcgtcagaggaatagcttaccacgaacccctcagcatactgggaatctcttcctgaacaacgaatgtaaatttggtcaagtctactcttccgttcattcaattattttaagcatttgaattatttattgtatatcctaaatatatttctcctttggcagtgactagatttccactaatgtgtcttaatctatccctccagctggcagttactgtttttttaatcccctgaagttgtcctgtaggagacagaaattctttgctgtctgtatcccttggagtaagaaggtagtggcatgggtggagtgtgtgttctttctccaaatctattatgatgtttattaaacacttctgtagcaaagatggtggtagttcttttgttactgaagttgcccttcaccatggctatttgaaaaggagatgtacttggacgtttctgtaaatcttgagataaactgtttggagatttaaccacctctctgatgggggaccaactctatggaaattgtaaatacgttttatttataaacctggcactgtattcaataaacatttctgcagcctttcatctctaa

SEQ ID NO: 316505 - DNA, 4207 bp, Homo sapiens
aaagggaacacaagctggcgctcacggatccttaattaaattaatcctccccccccccgggcagtggtgctgggagtgtcgtggacgccgtgccgttactcgtagtcaggcggcggcgcaggcggcggcggcggcatagcgcacagcgcgccttagcagcagcagcagcagcagcagcatcggaggtacccccgccgtcgcagcccccgcgctggtgcagccaccctcgctccctctgctcttcctcccttcgctcgcaccatggctgatcagctgaccgaagaacagattgctgaattcaaggaagccttctccctatttgataaagatggcgatggcaccatcacaacaaaggaacttggaactgtcatgaggtcactgggtcagaacccaacagaagctgaattgcaggatatgatcaatgaagtggatgctgatggtaatggcaccattgacttccccgaatttttgactatgatggctagaaaaatgaaagatacagatagtgaagaagaaatccgtgaggcattccgagtctttgacaaggatggcaatggttatatcagtgcagcagaactacgtcacgtcatgacaaacttaggagaaaaactaacagatgaagaagtagatgaaatgatcagagaagcagatattgatggagacggacaagtcaactatgaagaattcgtacagatgatgactgcaaaatgaagacctactttcaactcctttttcccccctctagaagaatcaaattgaatcttttacttacctcttgcaaaaaaaagaaaaaagaaaaaagttcatttattcattctgtttctatatagcaaaactgaatgtcaaaagtaccttctgtccacacacacaaaatctgcatgtattggttggtggtcctgtcccctaaagatcaagctacacatcagttttacaatataaatacttgtactaccttaatgataaggactccttaaagttccatttgctaatgattaatacactgtttgggctggccagtttttcatgcatgcagcttgacgattgagcacagtcaggcctttgtattaaaaatgaaaaatgaaaaaacaaattcaaaacctattcaaatgggttctagttcaatttgtttagtataaattgtcatagctggtttactgaaaacaaacacatttaaaattggtttacctcaggatgacgtgcagaaaaatgggtgaaggataaaccgttgagacgtggccccactggtaggatggtcctcttgtacttcgtgtgctccgacccatggtgacgatgacacaccctggtggcatgcccgtgtatgttggtttagcgttgtctgcattgttctagagtgaaacaggtgtcaggctgtcactgttcacacaaatttttaataagaaacatttaccaagggagcatctttggactctctgtttttaaaaccttctgaaccatgacttggagccggcagagtaggctgtggctgtggacttcagcacaaccatcaacattgctgttcaaagaaattacagtttacgtccattccaagttgtaaatgctagtcttttttttttttttttccaataaaaagaccattaacttaaagtggtgttaaatgctttgtaaagctgagatctaaatggggacaaggcaggtggaggggaggccagtgtacatgtaaatgcccacagcccagcattgggtttccctcccaaggccccagcaccaacctctgagcccaagaccttgcctgaaaacaagcagataccgattgcttcatcctatttatggacatgtaggtctagttgcattttcactggggggaggggggaaggtgaattatggtaacttttaatgatctattcaggcagtagagctcttaaggaaaaaaaaaacccactttctctcaagcatgtatttaggggttgttctcaattgtgctgctgattacctgtcttatgtaactacttgagaccatctgcaagagacatgatttagtgtgtctgtaattcaatcttcgctgtgtgtggtagaagcagtagtcacttttgtaagccagtctcttcatgcctaaaagacactaccagtcacctttgattcgcgacttttaatttatgattatacttagcctcctcctcctttttttttttttcccaagttgacttgactttgcttttttccccccaagtagaactaatgctagcttccagcttgaaagtaaaactccagtgtggagtgaattttgtgtctaattataaacctgtaaccaaaactcagacatctggtactggtctttgcattgagattggtccctgtaaaaccccctttaaaagcatattgcatttagtacagagctcttttttgaaatgaaggctggagatgtgcatttttcacggtgttaactggttgtatcttattagcaaggagattggggttttgagtgtttgcgtgggtggtttcaatttgccagggaacagtggcaggctgctagcaaggcagtgagaagctcttggcagccaaatgggtgcattcagggctgatttatagagacccttggcttctccttctcctactccctgtctttctggcattttgtagcttgttagattttctgccagaggggtgggtcagagcagtggaggggagacatcgcccatgtgcttctgctactggtccttgggctgggtggttggtagaggagatgttgacactatgagctaagggttggcttttgtaattacctgaatctgaaaggaatgcctaaggttaccttggggtttctcttctggtgagatagggttcctggtttgagtaagttaatgtcctggatatttcttgtggcagggggtggtcaaagagcctgattgctgacccagtctcaggcctgtggtcgatgacctctcggtagtttcaaagggggctggagggggatatttgacttgttttttcgaaatgtagccttctaaccctcaagtctttagaagctgggtggactcttagtggtcctgcagcgtatcctaaaagactacctttgaaacaggattcttgtatggccaggatcctgtctgggaaccagaaaccctacaccctccccctccaggaatgctgagttccagttttgagcagaggtgaggcagaatccactgtagccttccgccctggtatttggggggatgaccagcccaggcgttgggtgttagtctgcatgagtttgtgagaggaaatagctgggtgtcctggcagtgcccttgaagttggttaggaccttcctgtaaactcttgcccctacttctaactactctataaatatatacatatatttatatataaagtgattagttgaactggcatcctgctttagcctgagacttgccataagaaactgctgagtacttggcaaaccctttcatagttttgttctccatctgtttggggtaggtgttgagcgaggcaaatggatctcgatatttcagatgggcttttgatgcactgttgccaaggaaggctttttctgattttttgacaaatgaatttttgcacactttcattggtgtctttcggcaacttacacacattggtacttgtaacaatattgtaatgaacggctgtgcagtaggcccagcgctgctgtgtctcgtcagaggaatagcttaccacgaacccctcagcatactgggaatctcttcctgaacaacgaatgtaaatttggtcaagtctactcttccgttcattcaattattttaagcatttgaattatttattgtatatcctaaatatatttctcctttggcagtgactagatttccactaatgtgtcttaatctatccctccagctggcagttactgtttttttaatcccctgaagttgtcctgtaggagacagaaattctttgctgtctgtatcccttggagtaagaaggtagtggcatgggtggagtgtgtgttctttctccaaatctattatgatgtttattaaacacttctgtagcaaagatggtggtagttcttttgttactgaagttgcccttcaccatggctatttgaaaaggagatgtacttggacgtttctgtaaatcttgagataaactgtttggagatttaaccacctctctgatgggggaccaactctatggaaattgtaaatacgttttatttataaacctggcactgtattcaataaacatttctgcagcctttcatctctaa

SEQ ID NO: 316506 - DNA, 4314 bp, Homo sapiens
aaagggaacacaagctggcgctcacggatccttaattaaattaatcctccccccccccgggcagtggtgctgggagtgtcgtggacgccgtgccgttactcgtagtcaggcggcggcgcaggcggcggcggcggcatagcgcacagcgcgccttagcagcagcagcagcagcagcagcatcggaggtacccccgccgtcgcagcccccgcgctggtgcagccaccctcgctccctctgctcttcctcccttcgctcgcaccatggctgatcagctgaccgaagaacagattgctgaattcaaggaagccttctccctatttgataaagatggcgatggcaccatcacaacaaaggaacttggaactgtcatgaggtcactgggtcagaacccaacagaagctgaattgcaggatatgatcaatgaagtggatgctgatggtaatggcaccattgacttccccgaatttttgactatgatggctagaaaaatgaaagatacagatagtgaagaagaaatccgtgaggcattccgagtctttgacaaggatggcaatggttatatcagtgcagcagaactacgtcacgtcatgacaaacttaggagaaaaactaacagatgaagaagtagatgaaatgatcagagaagcagatattgatggagacggacaagtcaactatgaagaattcgtacagatgatgactgcaaaatgaagacctactttcaactcctttttcccccctctagaagaatcaaattgaatcttttacttacctcttgcaaaaaaaagaaaaaagaaaaaagttcatttattcattctgtttctatatagcaaaactgaatgtcaaaagtaccttctgtccacacacacaaaatctgcatgtattggttggtggtcctgtcccctaaagatcaagctacacatcagttttacaatataaatacttgtactaccttaatgataaggactccttaaagttccatttgctaatgattaatacactgtttgggctggccagtttttcatgcatgcagcttgacgattgagcacagtcaggcctttgtattaaaaatgaaaaatgaaaaaacaaattcaaaacctattcaaatgggttctagttcaatttgtttagtataaattgtcatagctggtttactgaaaacaaacacatttaaaattggtttacctcaggatgacgtgcagaaaaatgggtgaaggataaaccgttgagacgtggccccactggtaggatggtcctcttgtacttcgtgtgctccgacccatggtgacgatgacacaccctggtggcatgcccgtgtatgttggtttagcgttgtctgcattgttctagagtgaaacaggtgtcaggctgtcactgttcacacaaatttttaataagaaacatttaccaagggagcatctttggactctctgtttttaaaaccttctgaaccatgacttggagccggcagagtaggctgtggctgtggacttcagcacaaccatcaacattgctgttcaaagaaattacagtttacgtccattccaagttgtaaatgctagtcttttttttttttttttccaataaaaagaccattaacttaaagtggtgttaaatgctttgtaaagctgagatctaaatggggacaaggcaggtggaggggaggccagtgtacatgtaaatgcccacagcccagcattgggtttccctcccaaggccccagcaccaacctctgagcccaagaccttgcctgaaaacaagcagataccgattgcttcatcctatttatggacatgtaggtctagttgcattttcactggggggaggggggaaggtgaattatggtaacttttaatgatctattcaggcagtagagctcttaaggaaaaaaaaaacccactttctctcaagcatgtatttaggggttgttctcaattgtgctgctgattacctgtcttatgtaactacttgagaccatctgcaagagacatgatttagtgtgtctgtaattcaatcttcgctgtgtgtggtagaagcagtagtcacttttgtaagccagtctcttcatgcctaaaagacactaccagtcacctttgattcgcgacttttaatttatgattatacttagcctcctcctcctttttttttttttcccaagttgacttgactttgcttttttccccccaagtagaactaatgctagcttccagcttgaaagtaaaactccagtgtggagtgaattttgtgtctaattataaacctgtaaccaaaactcagacatctggtactggtctttgcattgagattggtccctgtaaaaccccctttaaaagcatattgcatttagtacagagctcttttttgaaatgaaggctggagatgtgcatttttcacggtgttaactggttgtatcttattagcaaggagattggggttttgagtgtttgcgtgggtggtttcaatttgccagggaacagtggcaggctgctagcaaggcagtgagaagctcttggcagccaaatgggtgcattcagggctgatttatagagacccttggcttctccttctcctactccctgtctttctggcattttgtagcttgttagattttctgccagaggggtgggtcagagcagtggaggggagacatcgcccatgtgcttctgctactggtccttgggctgggtggttggtagaggagatgttgacactatgagctaagggttggcttttgtaattacctgaatctgaaaggaatgcctaaggttaccttggggtttctcttctggtgagatagggttcctggtttgagtaagttaatgtcctggatatttcttgtggcagggggtggtcaaagagcctgattgctgacccagtctcaggcctgtggtcgatgacctctcggtagtttcaaagggggctggagggggatatttgacttgttttttcgaaatgtagccttctaaccctcaagtctttagaagctgggtggactcttagtggtcctgcagcgtatcctaaaagactacctttgaaacaggattcttgtatggccaggatcctgtctgggaaccagaaaccctacaccctccccctccaggaatgctgagttccagttttgagcagaggtgaggcagaatccactgtagccttccgccctggtatttggggggatgaccagcccaggcgttgggtgttagtctgcatgagtttgtgagaggaaatagctgggtgtcctggcagtgcccttgaagttggttaggaccttcctgtaaactcttgcccctacttctaactactctataaatatatacatatatttatatataaagtgattagttgaactggcatcctgctttagcctgagacttgccataagaaactgctgagtacttggcaaaccctttcatagttttgttctccatctgtttggggtaggtgttgagcgaggcaaatggatctcgatatttcagatgggcttttgatgcactgttgccaaggaaggctttttctgattttttgacaaatgaatttttgcacactttcattggtgtctttcggcaacttacacacattgaaaatgagctattgtacatatttttatattctctttataaatgcatgtctgattgtacttgtaacaatattgtaatgaacggctgtgcagtaggcccagcgctgctgtgtctcgtcagaggaatagcttaccacgaacccctcagcatactgggaatctcttcctgaacaacgaatgtaaatttggtcaagtctactcttccgttcattcaattattttaagcatttgaattatttattgtatatcctaaatatatttctcctttggcagtgactagatttccactaatgtgtcttaatctatccctccagctggcagttactgtttttttaatcccctgaagttgtcctgtaggagacagaaattctttgctgtctgtatcccttggagtaagaaggtagtggcatgggtggagtgtgtgttctttctccaaatctattatgatgtttattaaacacttctgtagcaaagatggtggtagttcttttgttactgaagttgcccttcaccatggctatttgaaaaggagatgtacttggacgtttctgtaaatcttgagataaactgtttggagatttaaccacctctctgatgggggaccaactctatggaaattgtaaatacgttttatttataaacctggcactgtattcaataaacatttctgcagcctttcatctctaaatttaggtacctaaatggctgtaactagcgacaacagtcagggatcctctaga

SEQ ID NO: 316507 - DNA, 2867 bp, Homo sapiens
aaagggaacacaagctggcgctcacggatccttaattaaattaatcctccccccccccgggcagtggtgctgggagtgtcgtggacgccgtgccgttactcgtagtcaggcggcggcgcaggcggcggcggcggcatagcgcacagcgcgccttagcagcagcagcagcagcagcagcatcggaggtacccccgccgtcgcagcccccgcgctggtgcagccaccctcgctccctctgctcttcctcccttcgctcgcaccatggctgatcagctgaccgaagaacagattgctgaattcaaggaagccttctccctatttgataaagatggcgatggcaccatcacaacaaaggaacttggaactgtcatgaggtcactgggtcagaacccaacagaagctgaattgcaggatatgatcaatgaagtggatgctgatggtaatggcaccattgacttccccgaatttttgactatgatggctagaaaaatgaaagatacagatagtgaagaagaaatccgtgaggcattccgagtctttgacaaggatggcaatggttatatcagtgcagcagaactacgtcacgtcatgacaaacttaggagaaaaactaacagatgaagaagtagatgaaatgatcagagaagcagatattgatggagacggacaagtcaactatgaagaattcgtacagatgatgactgcaaaatgaagacctactttcaactcctttttcccccctctagaagaatcaaattgaatcttttacttacctcttgcaaaaaaaagaaaaaagaaaaaagttcatttattcattctgtttctatatagcaaaactgaatgtcaaaagtaccttctgtccacacacacaaaatctgcatgtattggttggtggtcctgtcccctaaagatcaagctacacatcagttttacaatataaatacttgtactaccttaatgataaggactccttaaagttccatttgctaatgattaatacactgtttgggctggccagtttttcatgcatgcagcttgacgattgagcacagtcaggcctttgtattaaaaatgaaaaatgaaaaaacaaattcaaaacctattcaaatgggttctagttcaatttgtttagtataaattgtcatagctggtttactgaaaacaaacacatttaaaattggtttacctcaggatgacgtgcagaaaaatgggtgaaggataaaccgttgagacgtggccccactggtaggatggtcctcttgtacttcgtgtgctccgacccatggtgacgatgacacaccctggtggcatgcccgtgtatgttggtttagcgttgtctgcattgttctagagtgaaacaggtgtcaggctgtcactgttcacacaaatttttaataagaaacatttaccaagggagcatctttggactctctgtttttaaaaccttctgaaccatgacttggagccggcagagtaggctgtggctgtggacttcagcacaaccatcaacattgctgttcaaagaaattacagtttacgtccattccaagttgtaaatgctagtcttttttttttttttttccaataaaaagaccattaacttaaagtggtgttaaatgctttgtaaagctgagatctaaatggggacaaggcaggtggaggggaggccagtgtacatgtaaatgcccacagcccagcattgggtttccctcccaaggccccagcaccaacctctgagcccaagaccttgcctgaaaacaagcagatattgatggagacggacaagtcaactatgaagaattcgtacagatgatgactgcaaaatgaagacctactttcaactcctttttcccccctctagaagaatcaaattgaatcttttacttacctcttgcaaaaaaaagaaaaaagaaaaaagttcatttattcattctgtttctatatagcaaaactggcatcctgctttagcctgagacttgccataagaaactgctgagtacttggcaaaccctttcatagttttgttctccatctgtttggggtaggtgttgagcgaggcaaatggatctcgatatttcagatgggcttttgatgcactgttgccaaggaaggctttttctgattttttgacaaatgaatttttgcacactttcattggtgtctttcggcaacttacacacattgaaaatgagctattgtacatatttttatattctctttataaatgcatgtctgattgtacttgtaacaatattgtaatgaacggctgtgcagtaggcccagcgctgctgtgtctcgtcagaggaatagcttaccacgaacccctcagcatactgggaatctcttcctgaacaacgaatgtaaatttggtcaagtctactcttccgttcattcaattattttaagcatttgaattatttattgtatatcctaaatatatttctcctttggcagtgactagatttccactaatgtgtcttaatctatccctccagctggcagttactgtttttttaatcccctgaagttgtcctgtaggagacagaaattctttgctgtctgtatcccttggagtaagaaggtagtggcatgggtggagtgtgtgttctttctccaaatctattatgatgtttattaaacacttctgtagcaaagatggtggtagttcttttgttactgaagttgcccttcaccatggctatttgaaaaggagatgtacttggacgtttctgtaaatcttgagataaactgtttggagatttaaccacctctctgatgggggaccaactctatggaaattgtaaatacgttttatttataaacctggcactgtattcaataaacatttctgcagcctttcatctctaa

SEQ ID NO: 316508 - DNA, 4203 bp, Homo sapiens
aaagggaacacaagctggcgctcacggatccttaattaaattaatcctccccccccccgggcagtggtgctgggagtgtcgtggacgccgtgccgttactcgtagtcaggcggcggcgcaggcggcggcggcggcatagcgcacagcgcgccttagcagcagcagcagcagcagcagcatcggaggtacccccgccgtcgcagcccccgcgctggtgcagccaccctcgctccctctgctcttcctcccttcgctcgcaccatggctgatcagctgaccgaagaacagattgctgaattcaaggaagccttctccctatttgataaagatggcgatggcaccatcacaacaaaggaacttggaactgtcatgaggtcactgggtcagaacccaacagaagctgaattgcaggatatgatcaatgaagtggatgctgatggtaatggcaccattgacttccccgaatttttgactatgatggctagaaaaatgaaagatacagatagtgaagaagaaatccgtgaggcattccgagtctttgacaaggatggcaatggttatatcagtgcagcagaactacgtcacgtcatgacaaacttaggagaaaaactaacagatgaagaagtagatgaaatgatcagagaagcagatattgatggagacggacaagtcaactatgaagaattcgtacagatgatgactgcaaaatgaagacctactttcaactcctttttcccccctctagaagaatcaaattgaatcttttacttacctcttgcaaaaaaaagaaaaaagaaaaaagttcatttattcattctgtttctatatagcaaaactgaatgtcaaaagtaccttctgtccacacacacaaaatctgcatgtattggttggtggtcctgtcccctaaagatcaagctacacatcagttttacaatataaatacttgtactaccttaatgataaggactccttaaagttccatttgctaatgattaatacactgtttgggctggccagtttttcatgcatgcagcttgacgattgagcacagtcaggcctttgtattaaaaatgaaaaatgaaaaaacaaattcaaaacctattcaaatgggttctagttcaatttgtttagtataaattgtcatagctggtttactgaaaacaaacacatttaaaattggtttacctcaggatgacgtgcagaaaaatgggtgaaggataaaccgttgagacgtggccccactggtaggatggtcctcttgtacttcgtgtgctccgacccatggtgacgatgacacaccctggtggcatgcccgtgtatgttggtttagcgttgtctgcattgttctagagtgaaacaggtgtcaggctgtcactgttcacacaaatttttaataagaaacatttaccaagggagcatctttggactctctgtttttaaaacccatcaacattgctgttcaaagaaattacagtttacgtccattccaagttgtaaatgctagtcttttttttttttttttccaataaaaagaccattaacttaaagtggtgttaaatgctttgtaaagctgagatctaaatggggacaaggcaggtggaggggaggccagtgtacatgtaaatgcccacagcccagcattgggtttccctcccaaggccccagcaccaacctctgagcccaagaccttgcctgaaaacaagcagataccgattgcttcatcctatttatggacatgtaggtctagttgcattttcactggggggaggggggaaggtgaattatggtaacttttaatgatctattcaggcagtagagctcttaaggaaaaaaaaaacccactttctctcaagcatgtatttaggggttgttctcaattgtgctgctgattacctgtcttatgtaactacttgagaccatctgcaagagacatgatttagtgtgtctgtaattcaatcttcgctgtgtgtggtagaagcagtagtcacttttgtaagccagtctcttcatgcctaaaagacactaccagtcacctttgattcgcgacttttaatttatgattatacttagcctcctcctcctttttttttttttcccaagttgacttgactttgcttttttccccccaagtagaactaatgctagcttccagcttgaaagtaaaactccagtgtggagtgaattttgtgtctaattataaacctgtaaccaaaactcagacatctggtactggtctttgcattgagattggtccctgtaaaaccccctttaaaagcatattgcatttagtacagagctcttttttgaaatgaaggctggagatgtgcatttttcacggtgttaactggttgtatcttattagcaaggagattggggttttgagtgtttgcgtgggtggtttcaatttgccagggaacagtggcaggctgctagcaaggcagtgagaagctcttggcagccaaatgggtgcattcagggctgatttatagagacccttggcttctccttctcctactccctgtctttctggcattttgtagcttgttagattttctgccagaggggtgggtcagagcagtggaggggagacatcgcccatgtgcttctgctactggtccttgggctgggtggttggtagaggagatgttgacactatgagctaagggttggcttttgtaattacctgaatctgaaaggaatgcctaaggttaccttggggtttctcttctggtgagatagggttcctggtttgagtaagttaatgtcctggatatttcttgtggcagggggtggtcaaagagcctgattgctgacccagtctcaggcctgtggtcgatgacctctcggtagtttcaaagggggctggagggggatatttgacttgttttttcgaaatgtagccttctaaccctcaagtctttagaagctgggtggactcttagtggtcctgcagcgtatcctaaaagactacctttgaaacaggattcttgtatggccaggatcctgtctgggaaccagaaaccctacaccctccccctccaggaatgctgagttccagttttgagcagaggtgaggcagaatccactgtagccttccgccctggtatttggggggatgaccagcccaggcgttgggtgttagtctgcatgagtttgtgagaggaaatagctgggtgtcctggcagtgcccttgaagttggttaggaccttcctgtaaactcttgcccctacttctaactactctataaatatatacatatatttatatataaagtgattagttgaactggcatcctgctttagcctgagacttgccataagaaactgctgagtacttggcaaaccctttcatagttttgttctccatctgtttggggtaggtgttgagcgaggcaaatggatctcgatatttcagatgggcttttgatgcactgttgccaaggaaggctttttctgattttttgacaaatgaatttttgcacactttcattggtgtctttcggcaacttacacacattgaaaatgagctattgtacatatttttatattctctttataaatgcatgtctgattgtacttgtaacaatattgtaatgaacggctgtgcagtaggcccagcgctgctgtgtctcgtcagaggaatagcttaccacgaacccctcagcatactgggaatctcttcctgaacaacgaatgtaaatttggtcaagtctactcttccgttcattcaattattttaagcatttgaattatttattgtatatcctaaatatatttctcctttggcagtgactagatttccactaatgtgtcttaatctatccctccagctggcagttactgtttttttaatcccctgaagttgtcctgtaggagacagaaattctttgctgtctgtatcccttggagtaagaaggtagtggcatgggtggagtgtgtgttctttctccaaatctattatgatgtttattaaacacttctgtagcaaagatggtggtagttcttttgttactgaagttgcccttcaccatggctatttgaaaaggagatgtacttggacgtttctgtaaatcttgagataaactgtttggagatttaaccacctctctgatgggggaccaactctatggaaattgtaaatacgttttatttataaacctggcactgtattcaataaacatttctgcagcctttcatctctaa

SEQ ID NO: 316509 - DNA, 3566 bp, Homo sapiens
aaagggaacacaagctggcgctcacggatccttaattaaattaatcctccccccccccgggcagtggtgctgggagtgtcgtggacgccgtgccgttactcgtagtcaggcggcggcgcaggcggcggcggcggcatagcgcacagcgcgccttagcagcagcagcagcagcagcagcatcggaggtacccccgccgtcgcagcccccgcgctggtgcagccaccctcgctccctctgctcttcctcccttcgctcgcaccatggctgatcagctgaccgaagaacagattgctgaattcaaggaagccttctccctatttgataaagatggcgatggcaccatcacaacaaaggaacttggaactgtcatgaggtcactgggtcagaacccaacagaagctgaattgcaggatatgatcaatgaagtggatgctgatggtaatggcaccattgacttccccgaatttttgactatgatggctagaaaaatgaaagatacagatagtgaagaagaaatccgtgaggcattccgagtctttgacaaggatggcaatggttatatcagtgcagcagaactacgtcacgtcatgacaaacttaggagaaaaactaacagatgaagaagtagatgaaatgatcagagaagcagatattgatggagacggacaagtcaactatgaagaattcgtacagatgatgactgcaaaatgaagacctactttcaactcctttttcccccctctagaagaatcaaattgaatcttttacttacctcttgcaaaaaaaagaaaaaagaaaaaagttcatttattcattctgtttctatatagcaaaactgaatgtcaaaagtaccttctgtccacacacacaaaatctgcatgtattggttggtggtcctgtcccctaaagatcaagctacacatcagttttacaatataaatacttgtactaccttaatgataaggactccttaaagttccatttgctaatgattaatacactgtttgggctggccagtttttcatgcatgcagcttgacgattgagcacagtcaggcctttgtattaaaaatgaaaaatgaaaaaacaaattcaaaacctattcaaatgggttctagttcaatttgtttagtataaattgtcatagctggtttactgaaaacaaacacatttaaaattggtttacctcaggatgacgtgcagaaaaatgggtgaaggataaaccgttgagacgtggccccactggtaggatggtcctcttgtacttcgtgtgctccgacccatggtgacgatgacacaccctggtggcatgcccgtgtatgttggtttagcgttgtctgcattgttctagagtgaaacaggtgtcaggctgtcactgttcacacaaatttttaataagaaacatttaccaagggagcatctttggactctctgtttttaaaaccttctgaaccatgacttggagccggcagagtaggctgtggctgtggacttcagcacaaccatcaacattgctgttcaaagaaattacagtttacgtccattccaagttgtaaatgctagtcttttttttttttttttccaataaaaagaccattaacttaaagtggtgttaaatgctttgtaaagctgagatctaaatggggacaaggcaggtggaggggaggccagtgtacatgtaaatgcccacagcccagcattgggtttccctcccaaggccccagcaccaacctctgagcccaagaccttgcctgaaaacaagcagataccgattgcttcatcctatttatggacatgtaggtctagttgcattttcactggggggaggggggaaggtgaattatggtaacttttaatgatctattcaggcagtagagctcttaaggaaaaaaaaaacccactttctctcaagcatgtatttaggggttgttctcaattgtgctgctgattacctgtcttatgtaactacttgagaccatctgcaagagacatgatttagtgtgtctgtaattcaatcttcgctgtgtgtggtagaagcagtagtcacttttgtaagccagtctcttcatgcctaaaagacactaccagtcacctttgattcgcgacttttaatttatgattatacttagcctcctcctcctttttttttttttcccaagttgacttgactttgcttttttccccccaagtagaactaatgctagcttccagcttgaaagtaaaactccagtgtggagtgaattttgtgtctaattataaacctgtaaccaaaactcagacatctggtactggtctttgcattgagattggtccctgtaaaaccccctttaaaagcatattgcatttagtacagagctcttttttgaaatgaaggctggagatgtgcatttttcacggtgttaactggttgtatcttattagcaaggagattggggttttgagtgtttgcgtgggtggtttcaatttgccagggaacagtggcaggctgctagcaaggcagtgagaagctcttggcagccaaatgggtgcattcagggctgatttatagagacccttggcttctccttctcctactccctgtctttctggcattttgtagcttgttagattttctgccagaggggtgggtcagagcagtggaggggagacatcgcccatgtgcttctgctactggtccttgggctgggtggttggtagaggagatgttgacactatgagctaagggttggcttttgtaattacctgaatctgaaaggaatgcctaaggttaccttggggtttctcttctggtgagatagggttcctggtttgagtaagttaatgtcctggatatttcttgtggcagggggtggtcaaagagcctgattgctgacccagtctcaggcctgtggtcgatgacctctcggtagtttcaaagggggctggagggggatatttgacttgttttttcgaaatgtagccttctaaccctcaagtctttagaagctgggtggactcttagtggtcctgcagcgtatcctaaaagactacctttgaaacaggattcttgtatggccaggatcctgtctgggaaccagaaaccctacaccctccccctccaggaatgctgagttccagttttgagcagaggtgaggcagaatccactgtagccttccgccctggtatttggggggatgaccagcccaggcgttgggtgttagtctgcatgagtttgtgagaggaaatagctgggtgtcctggcagtgcccttgaagttggttaggaccttcctgtaaactcttgcccctacttctaactactctataaatatatacatatatttatatataaagtgattagttgaactggcatcctgctttagcctgagacttgccataagaaactgctgagtacttggcaaaccctttcatagttttgttctccatctgtttggtgttcaatttctacacagagactgtctcaaaagaaaaaaaaaattgtgcttcaggccctgtgtagaaaaatgggaaattatggaaaagcagaggaaacaactgggtattaagcagtatagtgtagaaattgaa

SEQ ID NO: 316510 - DNA, 4236 bp, Homo sapiens
cagaaaagaaaacttgaagtgagcagatgttgtcacttccttgtaatcctttgttaaaatagcataaggagttttctttattctatttactttcattaaatgaccgtgctacaggtttcaaaggattttaagattgatttttgaaagatcacaatattaaaagtataactggaaaacctatgttgaaatcaaccaaacatgtcgtggactgaatgataaccttttctttcttcatataggctgatcagctgaccgaagaacagattgctgaattcaaggaagccttctccctatttgataaagatggcgatggcaccatcacaacaaaggaacttggaactgtcatgaggtcactgggtcagaacccaacagaagctgaattgcaggatatgatcaatgaagtggatgctgatggtaatggcaccattgacttccccgaatttttgactatgatggctagaaaaatgaaagatacagatagtgaagaagaaatccgtgaggcattccgagtctttgacaaggatggcaatggttatatcagtgcagcagaactacgtcacgtcatgacaaacttaggagaaaaactaacagatgaagaagtagatgaaatgatcagagaagcagatattgatggagacggacaagtcaactatgaagaattcgtacagatgatgactgcaaaatgaagacctactttcaactcctttttcccccctctagaagaatcaaattgaatcttttacttacctcttgcaaaaaaaagaaaaaagaaaaaagttcatttattcattctgtttctatatagcaaaactgaatgtcaaaagtaccttctgtccacacacacaaaatctgcatgtattggttggtggtcctgtcccctaaagatcaagctacacatcagttttacaatataaatacttgtactaccttaatgataaggactccttaaagttccatttgctaatgattaatacactgtttgggctggccagtttttcatgcatgcagcttgacgattgagcacagtcaggcctttgtattaaaaatgaaaaatgaaaaaacaaattcaaaacctattcaaatgggttctagttcaatttgtttagtataaattgtcatagctggtttactgaaaacaaacacatttaaaattggtttacctcaggatgacgtgcagaaaaatgggtgaaggataaaccgttgagacgtggccccactggtaggatggtcctcttgtacttcgtgtgctccgacccatggtgacgatgacacaccctggtggcatgcccgtgtatgttggtttagcgttgtctgcattgttctagagtgaaacaggtgtcaggctgtcactgttcacacaaatttttaataagaaacatttaccaagggagcatctttggactctctgtttttaaaaccttctgaaccatgacttggagccggcagagtaggctgtggctgtggacttcagcacaaccatcaacattgctgttcaaagaaattacagtttacgtccattccaagttgtaaatgctagtcttttttttttttttttccaataaaaagaccattaacttaaagtggtgttaaatgctttgtaaagctgagatctaaatggggacaaggcaggtggaggggaggccagtgtacatgtaaatgcccacagcccagcattgggtttccctcccaaggccccagcaccaacctctgagcccaagaccttgcctgaaaacaagcagataccgattgcttcatcctatttatggacatgtaggtctagttgcattttcactggggggaggggggaaggtgaattatggtaacttttaatgatctattcaggcagtagagctcttaaggaaaaaaaaaacccactttctctcaagcatgtatttaggggttgttctcaattgtgctgctgattacctgtcttatgtaactacttgagaccatctgcaagagacatgatttagtgtgtctgtaattcaatcttcgctgtgtgtggtagaagcagtagtcacttttgtaagccagtctcttcatgcctaaaagacactaccagtcacctttgattcgcgacttttaatttatgattatacttagcctcctcctcctttttttttttttcccaagttgacttgactttgcttttttccccccaagtagaactaatgctagcttccagcttgaaagtaaaactccagtgtggagtgaattttgtgtctaattataaacctgtaaccaaaactcagacatctggtactggtctttgcattgagattggtccctgtaaaaccccctttaaaagcatattgcatttagtacagagctcttttttgaaatgaaggctggagatgtgcatttttcacggtgttaactggttgtatcttattagcaaggagattggggttttgagtgtttgcgtgggtggtttcaatttgccagggaacagtggcaggctgctagcaaggcagtgagaagctcttggcagccaaatgggtgcattcagggctgatttatagagacccttggcttctccttctcctactccctgtctttctggcattttgtagcttgttagattttctgccagaggggtgggtcagagcagtggaggggagacatcgcccatgtgcttctgctactggtccttgggctgggtggttggtagaggagatgttgacactatgagctaagggttggcttttgtaattacctgaatctgaaaggaatgcctaaggttaccttggggtttctcttctggtgagatagggttcctggtttgagtaagttaatgtcctggatatttcttgtggcagggggtggtcaaagagcctgattgctgacccagtctcaggcctgtggtcgatgacctctcggtagtttcaaagggggctggagggggatatttgacttgttttttcgaaatgtagccttctaaccctcaagtctttagaagctgggtggactcttagtggtcctgcagcgtatcctaaaagactacctttgaaacaggattcttgtatggccaggatcctgtctgggaaccagaaaccctacaccctccccctccaggaatgctgagttccagttttgagcagaggtgaggcagaatccactgtagccttccgccctggtatttggggggatgaccagcccaggcgttgggtgttagtctgcatgagtttgtgagaggaaatagctgggtgtcctggcagtgcccttgaagttggttaggaccttcctgtaaactcttgcccctacttctaactactctataaatatatacatatatttatatataaagtgattagttgaactggcatcctgctttagcctgagacttgccataagaaactgctgagtacttggcaaaccctttcatagttttgttctccatctgtttggggtaggtgttgagcgaggcaaatggatctcgatatttcagatgggcttttgatgcactgttgccaaggaaggctttttctgattttttgacaaatgaatttttgcacactttcattggtgtctttcggcaacttacacacattgaaaatgagctattgtacatatttttatattctctttataaatgcatgtctgattgtacttgtaacaatattgtaatgaacggctgtgcagtaggcccagcgctgctgtgtctcgtcagaggaatagcttaccacgaacccctcagcatactgggaatctcttcctgaacaacgaatgtaaatttggtcaagtctactcttccgttcattcaattattttaagcatttgaattatttattgtatatcctaaatatatttctcctttggcagtgactagatttccactaatgtgtcttaatctatccctccagctggcagttactgtttttttaatcccctgaagttgtcctgtaggagacagaaattctttgctgtctgtatcccttggagtaagaaggtagtggcatgggtggagtgtgtgttctttctccaaatctattatgatgtttattaaacacttctgtagcaaagatggtggtagttcttttgttactgaagttgcccttcaccatggctatttgaaaaggagatgtacttggacgtttctgtaaatcttgagataaactgtttggagatttaaccacctctctgatgggggaccaactctatggaaattgtaaatacgttttatttataaacctggcactgtattcaataaacatttctgcagcctttcatctctaa

SEQ ID NO: 316511 - DNA, 4144 bp, Homo sapiens
tggccatcactgtcagtgtatgttggtttagcgttgtctgcattgttctagagtgaaacaggtgtcaggctgtcactgttcacacaaatttttaataagaaacatttaccaagggagcatctttggactcccttcgctcgcaccatggctgatcagctgaccgaagaacagattgctgaattcaaggaagccttctccctatttgataaagatggcgatggcaccatcacaacaaaggaacttggaactgtcatgaggtcactgggtcagaacccaacagaagctgaattgcaggatatgatcaatgaagtggatgctgatggtaatggcaccattgacttccccgaatttttgactatgatggctagaaaaatgaaagatacagatagtgaagaagaaatccgtgaggcattccgagtctttgacaaggatggcaatggttatatcagtgcagcagaactacgtcacgtcatgacaaacttaggagaaaaactaacagatgaagaagtagatgaaatgatcagagaagcagatattgatggagacggacaagtcaactatgaagaattcgtacagatgatgactgcaaaatgaagacctactttcaactcctttttcccccctctagaagaatcaaattgaatcttttacttacctcttgcaaaaaaaagaaaaaagaaaaaagttcatttattcattctgtttctatatagcaaaactgaatgtcaaaagtaccttctgtccacacacacaaaatctgcatgtattggttggtggtcctgtcccctaaagatcaagctacacatcagttttacaatataaatacttgtactaccttaatgataaggactccttaaagttccatttgctaatgattaatacactgtttgggctggccagtttttcatgcatgcagcttgacgattgagcacagtcaggcctttgtattaaaaatgaaaaatgaaaaaacaaattcaaaacctattcaaatgggttctagttcaatttgtttagtataaattgtcatagctggtttactgaaaacaaacacatttaaaattggtttacctcaggatgacgtgcagaaaaatgggtgaaggataaaccgttgagacgtggccccactggtaggatggtcctcttgtacttcgtgtgctccgacccatggtgacgatgacacaccctggtggcatgcccgtgtatgttggtttagcgttgtctgcattgttctagagtgaaacaggtgtcaggctgtcactgttcacacaaatttttaataagaaacatttaccaagggagcatctttggactctctgtttttaaaaccttctgaaccatgacttggagccggcagagtaggctgtggctgtggacttcagcacaaccatcaacattgctgttcaaagaaattacagtttacgtccattccaagttgtaaatgctagtcttttttttttttttttccaataaaaagaccattaacttaaagtggtgttaaatgctttgtaaagctgagatctaaatggggacaaggcaggtggaggggaggccagtgtacatgtaaatgcccacagcccagcattgggtttccctcccaaggccccagcaccaacctctgagcccaagaccttgcctgaaaacaagcagataccgattgcttcatcctatttatggacatgtaggtctagttgcattttcactggggggaggggggaaggtgaattatggtaacttttaatgatctattcaggcagtagagctcttaaggaaaaaaaaaacccactttctctcaagcatgtatttaggggttgttctcaattgtgctgctgattacctgtcttatgtaactacttgagaccatctgcaagagacatgatttagtgtgtctgtaattcaatcttcgctgtgtgtggtagaagcagtagtcacttttgtaagccagtctcttcatgcctaaaagacactaccagtcacctttgattcgcgacttttaatttatgattatacttagcctcctcctcctttttttttttttcccaagttgacttgactttgcttttttccccccaagtagaactaatgctagcttccagcttgaaagtaaaactccagtgtggagtgaattttgtgtctaattataaacctgtaaccaaaactcagacatctggtactggtctttgcattgagattggtccctgtaaaaccccctttaaaagcatattgcatttagtacagagctcttttttgaaatgaaggctggagatgtgcatttttcacggtgttaactggttgtatcttattagcaaggagattggggttttgagtgtttgcgtgggtggtttcaatttgccagggaacagtggcaggctgctagcaaggcagtgagaagctcttggcagccaaatgggtgcattcagggctgatttatagagacccttggcttctccttctcctactccctgtctttctggcattttgtagcttgttagattttctgccagaggggtgggtcagagcagtggaggggagacatcgcccatgtgcttctgctactggtccttgggctgggtggttggtagaggagatgttgacactatgagctaagggttggcttttgtaattacctgaatctgaaaggaatgcctaaggttaccttggggtttctcttctggtgagatagggttcctggtttgagtaagttaatgtcctggatatttcttgtggcagggggtggtcaaagagcctgattgctgacccagtctcaggcctgtggtcgatgacctctcggtagtttcaaagggggctggagggggatatttgacttgttttttcgaaatgtagccttctaaccctcaagtctttagaagctgggtggactcttagtggtcctgcagcgtatcctaaaagactacctttgaaacaggattcttgtatggccaggatcctgtctgggaaccagaaaccctacaccctccccctccaggaatgctgagttccagttttgagcagaggtgaggcagaatccactgtagccttccgccctggtatttggggggatgaccagcccaggcgttgggtgttagtctgcatgagtttgtgagaggaaatagctgggtgtcctggcagtgcccttgaagttggttaggaccttcctgtaaactcttgcccctacttctaactactctataaatatatacatatatttatatataaagtgattagttgaactggcatcctgctttagcctgagacttgccataagaaactgctgagtacttggcaaaccctttcatagttttgttctccatctgtttggggtaggtgttgagcgaggcaaatggatctcgatatttcagatgggcttttgatgcactgttgccaaggaaggctttttctgattttttgacaaatgaatttttgcacactttcattggtgtctttcggcaacttacacacattgaaaatgagctattgtacatatttttatattctctttataaatgcatgtctgattgtacttgtaacaatattgtaatgaacggctgtgcagtaggcccagcgctgctgtgtctcgtcagaggaatagcttaccacgaacccctcagcatactgggaatctcttcctgaacaacgaatgtaaatttggtcaagtctactcttccgttcattcaattattttaagcatttgaattatttattgtatatcctaaatatatttctcctttggcagtgactagatttccactaatgtgtcttaatctatccctccagctggcagttactgtttttttaatcccctgaagttgtcctgtaggagacagaaattctttgctgtctgtatcccttggagtaagaaggtagtggcatgggtggagtgtgtgttctttctccaaatctattatgatgtttattaaacacttctgtagcaaagatggtggtagttcttttgttactgaagttgcccttcaccatggctatttgaaaaggagatgtacttggacgtttctgtaaatcttgagataaactgtttggagatttaaccacctctctgatgggggaccaactctatggaaattgtaaatacgttttatttataaacctggcactgtattcaataaacatttctgcagcctttcatctctaa

SEQ ID NO: 316512 - DNA, 2977 bp, Homo sapiens
aaagggaacacaagctggcgctcacggatccttaattaaattaatcctccccccccccgggcagtggtgctgggagtgtcgtggacgccgtgccgttactcgtagtcaggcggcggcgcaggcggcggcggcggcatagcgcacagcgcgccttagcagcagcagcagcagcagcagcatcggaggtacccccgccgtcgcagcccccgcgctggtgcagccaccctcgctccctctgctcttcctcccttcgctcgcaccatggctgatcagctgaccgaagaacagattgctgaattcaaggaagccttctccctatttgataaagatggcgatggcaccatcacaacaaaggaacttggaactgtcatgaggtcactgggtcagaacccaacagaagctgaattgcaggatatgatcaatgaagtggatgctgatggtaatggcaccattgacttccccgaatttttgactatgatggctagaaaaatgaaagatacagatagtgaagaagaaatccgtgaggcattccgagtctttgacaaggatggcaatggttatatcagtgcagcagaactacgtcacgtcatgacaaacttaggagaaaaactaacagatgaagaagtagatgaaatgatcagagaagcagatattgatggagacggacaagtcaactatgaagaattcgtacagatgatgactgcaaaatgaagacctactttcaactcctttttcccccctctagaagaatcaaattgaatcttttacttacctcttgcaaaaaaaagaaaaaagaaaaaagttcatttattcattctgtttctatatagcaaaactgaatgtcaaaagtaccttctgtccacacacacaaaatctgcatgtattggttggtggtcctgtcccctaaagatcaagctacacatcagttttacaatataaatacttgtactaccttaatgataaggactccttaaagttccatttgctaatgattaatacactgtttgggctggccagtttttcatgcatgcagcttgacgattgagcacagtcaggcctttgtattaaaaatgaaaaatgaaaaaacaaattcaaaacctattcaaatgggttctagttcaatttgtttagtataaattgtcatagctggtttactgaaaacaaacacatttaaaattggtttacctcaggatgacgtgcagaaaaatgggtgaaggataaaccgttgagacgtggccccactggtaggatggtcctcttgtacttcgtgtgctccgacccatggtgacgatgacacaccctggtggcatgcccgtgtatgttggtttagcgttgtctgcattgttctagagtgaaacaggtgtcaggctgtcactgttcacacaaatttttaataagaaacatttaccaagggagcatctttggactctctgtttttaaaaccttctgaaccatgacttggagccggcagagtaggctgtggctgtggacttcagcacaaccatcaacattgctgttcaaagaaattacagtttacgtccattccaagttgtaaatgctagtcttttttttttttttttccaataaaaagaccattaacttaaagtggtgttaaatgctttgtaaagctgagatctaaatggggacaaggcaggtggaggggaggccagtgtacatgtaaatgcccacagcccagcattgggtttccctcccaaggccccagcaccaacctctgagcccaagaccttgcctgaaaacaagcagataccgattgcttcatcctatttatggacatgtaggtctagttgcattttcactggggggaggggggaaggtgaattatggtaacttttaatgatctattcaggcagtagagctcttaaggaaaaaaaaaacccactttctctcaagcatgtatttaggggttgttctcaattgtgctgctgattacctgtcttatgtaactacttgagaccatctgcaagagacatgatttagtgtgtctgtaattcaatcttcgctgtgtgtggtagaagcagtagtcacttttgtaagccagtctcttcatgcctaaaagacactaccagtcacctttgattcgcgacttttaatttatgattatacttagcctcctcctcctttttttttttttcccaagttgacttgactttgcttttttccccccaagtagaactaatgctagcttccagcttgaaagtaaaactccagtgtggagtgaattttgtgtctaattataaacctgtaaccaaaactcagacatctggtactggtctttgcattgagattggtccctgtaaaaccccctttaaaagcatattgcatttagtacagagctcttttttgaaatgaaggctggagatgtgcatttttcacggtgttaactggttgtatcttattagcaaggagattggggttttgagtgtttgcgtgggtggtttcaatttgccagggaacagtggcaggctgctagcaaggcagtgagaagctcttggcagccaaatgggtgcattcagggctgatttatagagacccttggcttctccttctcctactccctgtctttctggcattttgtagcttgttagattttctgccagaggggtgggtcagagcagtggaggggagacatcgcccatgtgcttctgctactggtccttgggctgggtggttggtagaggagatgttgacactatgagctaagggttggcttttgtaattacctgaatctgaaaggaatgcctaaggttaccttggggtttctcttctggtgagatagggttcctggtttgagtaagttaatgtcctggatatttcttgtggcagggggtggtcaaagagcctgattgctgacccagtctcaggcctgtggtcgatgacctctcggtagtttcacagcaaggctgtgttgccaagatacgaaccttgtatattcagcgacctcgccctcgcacccaag

SEQ ID NO: 316513 - DNA, 3884 bp, Homo sapiens
ataggtgaaatggtatgactataaaaggatagtacttttgtctcctggagtgacatgatgcctttctagagaaagacatcatagtcactccggagtgacgatggctagaaaaatgaaagatacagatagtgaagaagaaatccgtgaggcattccgagtctttgacaaggatggcaatggttatatcagtgcagcagaactacgtcacgtcatgacaaacttaggagaaaaactaacagatgaagaagtagatgaaatgatcagagaagcagatattgatggagacggacaagtcaactatgaagaattcgtacagatgatgactgcaaaatgaagacctactttcaactcctttttcccccctctagaagaatcaaattgaatcttttacttacctcttgcaaaaaaaagaaaaaagaaaaaagttcatttattcattctgtttctatatagcaaaactgaatgtcaaaagtaccttctgtccacacacacaaaatctgcatgtattggttggtggtcctgtcccctaaagatcaagctacacatcagttttacaatataaatacttgtactaccttaatgataaggactccttaaagttccatttgctaatgattaatacactgtttgggctggccagtttttcatgcatgcagcttgacgattgagcacagtcaggcctttgtattaaaaatgaaaaatgaaaaaacaaattcaaaacctattcaaatgggttctagttcaatttgtttagtataaattgtcatagctggtttactgaaaacaaacacatttaaaattggtttacctcaggatgacgtgcagaaaaatgggtgaaggataaaccgttgagacgtggccccactggtaggatggtcctcttgtacttcgtgtgctccgacccatggtgacgatgacacaccctggtggcatgcccgtgtatgttggtttagcgttgtctgcattgttctagagtgaaacaggtgtcaggctgtcactgttcacacaaatttttaataagaaacatttaccaagggagcatctttggactctctgtttttaaaaccttctgaaccatgacttggagccggcagagtaggctgtggctgtggacttcagcacaaccatcaacattgctgttcaaagaaattacagtttacgtccattccaagttgtaaatgctagtcttttttttttttttttccaataaaaagaccattaacttaaagtggtgttaaatgctttgtaaagctgagatctaaatggggacaaggcaggtggaggggaggccagtgtacatgtaaatgcccacagcccagcattgggtttccctcccaaggccccagcaccaacctctgagcccaagaccttgcctgaaaacaagcagataccgattgcttcatcctatttatggacatgtaggtctagttgcattttcactggggggaggggggaaggtgaattatggtaacttttaatgatctattcaggcagtagagctcttaaggaaaaaaaaaacccactttctctcaagcatgtatttaggggttgttctcaattgtgctgctgattacctgtcttatgtaactacttgagaccatctgcaagagacatgatttagtgtgtctgtaattcaatcttcgctgtgtgtggtagaagcagtagtcacttttgtaagccagtctcttcatgcctaaaagacactaccagtcacctttgattcgcgacttttaatttatgattatacttagcctcctcctcctttttttttttttcccaagttgacttgactttgcttttttccccccaagtagaactaatgctagcttccagcttgaaagtaaaactccagtgtggagtgaattttgtgtctaattataaacctgtaaccaaaactcagacatctggtactggtctttgcattgagattggtccctgtaaaaccccctttaaaagcatattgcatttagtacagagctcttttttgaaatgaaggctggagatgtgcatttttcacggtgttaactggttgtatcttattagcaaggagattggggttttgagtgtttgcgtgggtggtttcaatttgccagggaacagtggcaggctgctagcaaggcagtgagaagctcttggcagccaaatgggtgcattcagggctgatttatagagacccttggcttctccttctcctactccctgtctttctggcattttgtagcttgttagattttctgccagaggggtgggtcagagcagtggaggggagacatcgcccatgtgcttctgctactggtccttgggctgggtggttggtagaggagatgttgacactatgagctaagggttggcttttgtaattacctgaatctgaaaggaatgcctaaggttaccttggggtttctcttctggtgagatagggttcctggtttgagtaagttaatgtcctggatatttcttgtggcagggggtggtcaaagagcctgattgctgacccagtctcaggcctgtggtcgatgacctctcggtagtttcaaagggggctggagggggatatttgacttgttttttcgaaatgtagccttctaaccctcaagtctttagaagctgggtggactcttagtggtcctgcagcgtatcctaaaagactacctttgaaacaggattcttgtatggccaggatcctgtctgggaaccagaaaccctacaccctccccctccaggaatgctgagttccagttttgagcagaggtgaggcagaatccactgtagccttccgccctggtatttggggggatgaccagcccaggcgttgggtgttagtctgcatgagtttgtgagaggaaatagctgggtgtcctggcagtgcccttgaagttggttaggaccttcctgtaaactcttgcccctacttctaactactctataaatatatacatatatttatatataaagtgattagttgaactggcatcctgctttagcctgagacttgccataagaaactgctgagtacttggcaaaccctttcatagttttgttctccatctgtttggggtaggtgttgagcgaggcaaatggatctcgatatttcagatgggcttttgatgcactgttgccaaggaaggctttttctgattttttgacaaatgaatttttgcacactttcattggtgtctttcggcaacttacacacattgaaaatgagctattgtacatatttttatattctctttataaatgcatgtctgattgtacttgtaacaatattgtaatgaacggctgtgcagtaggcccagcgctgctgtgtctcgtcagaggaatagcttaccacgaacccctcagcatactgggaatctcttcctgaacaacgaatgtaaatttggtcaagtctactcttccgttcattcaattattttaagcatttgaattatttattgtatatcctaaatatatttctcctttggcagtgactagatttccactaatgtgtcttaatctatccctccagctggcagttactgtttttttaatcccctgaagttgtcctgtaggagacagaaattctttgctgtctgtatcccttggagtaagaaggtagtggcatgggtggagtgtgtgttctttctccaaatctattatgatgtttattaaacacttctgtagcaaagatggtggtagttcttttgttactgaagttgcccttcaccatggctatttgaaaaggagatgtacttggacgtttctgtaaatcttgagataaactgtttggagatttaaccacctctctgatgggggaccaactctatggaaattgtaaatacgttttatttataaacctggcactgtattcaataaacatttctgcagcctttcatctctaa

SEQ ID NO: 316514 - DNA, 4082 bp, Homo sapiens
cttccgctttcacttctaaaagctataataatgttatagacagaagacttaaatctaactgcctgagcctctgatctcactttcaaaaatcctccttatggtaaccgtatcaggggagggtaggcataataaataggaattttggaccatgtttcttgactgttactttgaattgttgtgagcttttgcaaatcctgttttctgcattagctgtttgcatgtatttagtaggttagaggtgggaactagagatcagagaattgtttatggcagcagagttagcagtaacttgagagggcatagctaagtcaaagacctacttccccacactacatcattagcaataacaattgctgaatgttcacaggatggcaatggttatatcagtgcagcagaactacgtcacgtcatgacaaacttaggagaaaaactaacagatgaagaagtagatgaaatgatcagagaagcagatattgatggagacggacaagtcaactatgaagaattcgtacagatgatgactgcaaaatgaagacctactttcaactcctttttcccccctctagaagaatcaaattgaatcttttacttacctcttgcaaaaaaaagaaaaaagaaaaaagttcatttattcattctgtttctatatagcaaaactgaatgtcaaaagtaccttctgtccacacacacaaaatctgcatgtattggttggtggtcctgtcccctaaagatcaagctacacatcagttttacaatataaatacttgtactaccttaatgataaggactccttaaagttccatttgctaatgattaatacactgtttgggctggccagtttttcatgcatgcagcttgacgattgagcacagtcaggcctttgtattaaaaatgaaaaatgaaaaaacaaattcaaaacctattcaaatgggttctagttcaatttgtttagtataaattgtcatagctggtttactgaaaacaaacacatttaaaattggtttacctcaggatgacgtgcagaaaaatgggtgaaggataaaccgttgagacgtggccccactggtaggatggtcctcttgtacttcgtgtgctccgacccatggtgacgatgacacaccctggtggcatgcccgtgtatgttggtttagcgttgtctgcattgttctagagtgaaacaggtgtcaggctgtcactgttcacacaaatttttaataagaaacatttaccaagggagcatctttggactctctgtttttaaaaccttctgaaccatgacttggagccggcagagtaggctgtggctgtggacttcagcacaaccatcaacattgctgttcaaagaaattacagtttacgtccattccaagttgtaaatgctagtcttttttttttttttttccaataaaaagaccattaacttaaagtggtgttaaatgctttgtaaagctgagatctaaatggggacaaggcaggtggaggggaggccagtgtacatgtaaatgcccacagcccagcattgggtttccctcccaaggccccagcaccaacctctgagcccaagaccttgcctgaaaacaagcagataccgattgcttcatcctatttatggacatgtaggtctagttgcattttcactggggggaggggggaaggtgaattatggtaacttttaatgatctattcaggcagtagagctcttaaggaaaaaaaaaacccactttctctcaagcatgtatttaggggttgttctcaattgtgctgctgattacctgtcttatgtaactacttgagaccatctgcaagagacatgatttagtgtgtctgtaattcaatcttcgctgtgtgtggtagaagcagtagtcacttttgtaagccagtctcttcatgcctaaaagacactaccagtcacctttgattcgcgacttttaatttatgattatacttagcctcctcctcctttttttttttttcccaagttgacttgactttgcttttttccccccaagtagaactaatgctagcttccagcttgaaagtaaaactccagtgtggagtgaattttgtgtctaattataaacctgtaaccaaaactcagacatctggtactggtctttgcattgagattggtccctgtaaaaccccctttaaaagcatattgcatttagtacagagctcttttttgaaatgaaggctggagatgtgcatttttcacggtgttaactggttgtatcttattagcaaggagattggggttttgagtgtttgcgtgggtggtttcaatttgccagggaacagtggcaggctgctagcaaggcagtgagaagctcttggcagccaaatgggtgcattcagggctgatttatagagacccttggcttctccttctcctactccctgtctttctggcattttgtagcttgttagattttctgccagaggggtgggtcagagcagtggaggggagacatcgcccatgtgcttctgctactggtccttgggctgggtggttggtagaggagatgttgacactatgagctaagggttggcttttgtaattacctgaatctgaaaggaatgcctaaggttaccttggggtttctcttctggtgagatagggttcctggtttgagtaagttaatgtcctggatatttcttgtggcagggggtggtcaaagagcctgattgctgacccagtctcaggcctgtggtcgatgacctctcggtagtttcaaagggggctggagggggatatttgacttgttttttcgaaatgtagccttctaaccctcaagtctttagaagctgggtggactcttagtggtcctgcagcgtatcctaaaagactacctttgaaacaggattcttgtatggccaggatcctgtctgggaaccagaaaccctacaccctccccctccaggaatgctgagttccagttttgagcagaggtgaggcagaatccactgtagccttccgccctggtatttggggggatgaccagcccaggcgttgggtgttagtctgcatgagtttgtgagaggaaatagctgggtgtcctggcagtgcccttgaagttggttaggaccttcctgtaaactcttgcccctacttctaactactctataaatatatacatatatttatatataaagtgattagttgaactggcatcctgctttagcctgagacttgccataagaaactgctgagtacttggcaaaccctttcatagttttgttctccatctgtttggggtaggtgttgagcgaggcaaatggatctcgatatttcagatgggcttttgatgcactgttgccaaggaaggctttttctgattttttgacaaatgaatttttgcacactttcattggtgtctttcggcaacttacacacattgaaaatgagctattgtacatatttttatattctctttataaatgcatgtctgattgtacttgtaacaatattgtaatgaacggctgtgcagtaggcccagcgctgctgtgtctcgtcagaggaatagcttaccacgaacccctcagcatactgggaatctcttcctgaacaacgaatgtaaatttggtcaagtctactcttccgttcattcaattattttaagcatttgaattatttattgtatatcctaaatatatttctcctttggcagtgactagatttccactaatgtgtcttaatctatccctccagctggcagttactgtttttttaatcccctgaagttgtcctgtaggagacagaaattctttgctgtctgtatcccttggagtaagaaggtagtggcatgggtggagtgtgtgttctttctccaaatctattatgatgtttattaaacacttctgtagcaaagatggtggtagttcttttgttactgaagttgcccttcaccatggctatttgaaaaggagatgtacttggacgtttctgtaaatcttgagataaactgtttggagatttaaccacctctctgatgggggaccaactctatggaaattgtaaatacgttttatttataaacctggcactgtattcaataaacatttctgcagcctttcatctctaa

SEQ ID NO: 316515 - DNA, 3315 bp, Homo sapiens
cgatctagaggatgcccgccaatatgtatattttatttaatatatatataaaagattgccatatggtatgcaaacagtcccatgtctctggtattttaataaggctaggggatccttattaaaaatgaaaaatgaaaaaacaaattcaaaacctattcaaatgggttctagttcaatttgtttagtataaattgtcatagctggtttactgaaaacaaacacatttaaaattggtttacctcaggatgacgtgcagaaaaatgggtgaaggataaaccgttgagacgtggccccactggtaggatggtcctcttgtacttcgtgtgctccgacccatggtgacgatgacacaccctggtggcatgcccgtgtatgttggtttagcgttgtctgcattgttctagagtgaaacaggtgtcaggctgtcactgttcacacaaatttttaataagaaacatttaccaagggagcatctttggactctctgtttttaaaaccttctgaaccatgacttggagccggcagagtaggctgtggctgtggacttcagcacaaccatcaacattgctgttcaaagaaattacagtttacgtccattccaagttgtaaatgctagtcttttttttttttttttccaataaaaagaccattaacttaaagtggtgttaaatgctttgtaaagctgagatctaaatggggacaaggcaggtggaggggaggccagtgtacatgtaaatgcccacagcccagcattgggtttccctcccaaggccccagcaccaacctctgagcccaagaccttgcctgaaaacaagcagataccgattgcttcatcctatttatggacatgtaggtctagttgcattttcactggggggaggggggaaggtgaattatggtaacttttaatgatctattcaggcagtagagctcttaaggaaaaaaaaaacccactttctctcaagcatgtatttaggggttgttctcaattgtgctgctgattacctgtcttatgtaactacttgagaccatctgcaagagacatgatttagtgtgtctgtaattcaatcttcgctgtgtgtggtagaagcagtagtcacttttgtaagccagtctcttcatgcctaaaagacactaccagtcacctttgattcgcgacttttaatttatgattatacttagcctcctcctcctttttttttttttcccaagttgacttgactttgcttttttccccccaagtagaactaatgctagcttccagcttgaaagtaaaactccagtgtggagtgaattttgtgtctaattataaacctgtaaccaaaactcagacatctggtactggtctttgcattgagattggtccctgtaaaaccccctttaaaagcatattgcatttagtacagagctcttttttgaaatgaaggctggagatgtgcatttttcacggtgttaactggttgtatcttattagcaaggagattggggttttgagtgtttgcgtgggtggtttcaatttgccagggaacagtggcaggctgctagcaaggcagtgagaagctcttggcagccaaatgggtgcattcagggctgatttatagagacccttggcttctccttctcctactccctgtctttctggcattttgtagcttgttagattttctgccagaggggtgggtcagagcagtggaggggagacatcgcccatgtgcttctgctactggtccttgggctgggtggttggtagaggagatgttgacactatgagctaagggttggcttttgtaattacctgaatctgaaaggaatgcctaaggttaccttggggtttctcttctggtgagatagggttcctggtttgagtaagttaatgtcctggatatttcttgtggcagggggtggtcaaagagcctgattgctgacccagtctcaggcctgtggtcgatgacctctcggtagtttcaaagggggctggagggggatatttgacttgttttttcgaaatgtagccttctaaccctcaagtctttagaagctgggtggactcttagtggtcctgcagcgtatcctaaaagactacctttgaaacaggattcttgtatggccaggatcctgtctgggaaccagaaaccctacaccctccccctccaggaatgctgagttccagttttgagcagaggtgaggcagaatccactgtagccttccgccctggtatttggggggatgaccagcccaggcgttgggtgttagtctgcatgagtttgtgagaggaaatagctgggtgtcctggcagtgcccttgaagttggttaggaccttcctgtaaactcttgcccctacttctaactactctataaatatatacatatatttatatataaagtgattagttgaactggcatcctgctttagcctgagacttgccataagaaactgctgagtacttggcaaaccctttcatagttttgttctccatctgtttggggtaggtgttgagcgaggcaaatggatctcgatatttcagatgggcttttgatgcactgttgccaaggaaggctttttctgattttttgacaaatgaatttttgcacactttcattggtgtctttcggcaacttacacacattgaaaatgagctattgtacatatttttatattctctttataaatgcatgtctgattgtacttgtaacaatattgtaatgaacggctgtgcagtaggcccagcgctgctgtgtctcgtcagaggaatagcttaccacgaacccctcagcatactgggaatctcttcctgaacaacgaatgtaaatttggtcaagtctactcttccgttcattcaattattttaagcatttgaattatttattgtatatcctaaatatatttctcctttggcagtgactagatttccactaatgtgtcttaatctatccctccagctggcagttactgtttttttaatcccctgaagttgtcctgtaggagacagaaattctttgctgtctgtatcccttggagtaagaaggtagtggcatgggtggagtgtgtgttctttctccaaatctattatgatgtttattaaacacttctgtagcaaagatggtggtagttcttttgttactgaagttgcccttcaccatggctatttgaaaaggagatgtacttggacgtttctgtaaatcttgagataaactgtttggagatttaaccacctctctgatgggggaccaactctatggaaattgtaaatacgttttatttataaacctggcactgtattcaataaacatttctgcagcctttcatctctaa

SEQ ID NO: 316516 - DNA, 1722 bp, Homo sapiens
aaagggaacacaagctggcgctcacggatccttaattaaattaatcctccccccccccgggcagtggtgctgggagtgtcgtggacgccgtgccgttactcgtagtcaggcggcggcgcaggcggcggcggcggcatagcgcacagcgcgccttagcagcagcagcagcagcagcagcatcggaggtacccccgccgtcgcagcccccgcgctggtgcagccaccctcgctccctctgctcttcctcccttcgctcgcaccatggctgatcagctgaccgaagaacagattgctgaattcaaggaagccttctccctatttgataaagatggcgatggcaccatcacaacaaaggaacttggaactgtcatgaggtcactgggtcagaacccaacagaagctgaattgcaggatatgatcaatgaagtggatgctgatggtaatggcaccattgacttccccgaatttttgactatgatggctagaaaaatgaaagatacagatagtgaagaagaaatccgtgaggcattccgagtctttgacaaggatggcaatggttatatcagtgcagcagaactacgtcacgtcatgacaaacttaggagaaaaactaacagatgaagaagtagatgaaatgatcagagaagcagatattgatggagacggacaagtcaactatgaagaattcgtacagatgatgactgcaaaatgaagacctactttcaactcctttttcccccctctagaagaatcaaattgaatcttttacttacctcttgcaaaaaaaagaaaaaagaaaaaagttcatttattcattctgtttctatatagcaaaactgaatgtcaaaagtaccttctgtccacacacacaaaatctgcatgtattggttggtggtcctgtcccctaaagatcaagctacacatcagttttacaatataaatacttgtactaccttaatgataaggactccttaaagttccatttgctaatgattaatacactgtttgggctggccagtttttcatgcatgcagcttgacgattgagcacagtcaggcctttgtattaaaaatgaaaaatgaaaaaacaaattcaaaacctattcaaatgggttctagttcaatttgtttagtataaattgtcatagctggtttactgaaaacaaacacatttaaaattggtttacctcaggatgacgtgcagaaaaatgggtgaaggataaaccgttgagacgtggccccactggtaggatggtcctcttgtacttcgtgtgctccgacccatggtgacgatgacacaccctggtggcatgcccgtgtatgttggtttagcgttgtctgcattgttctagagtgaaacaggtgtcaggctgtcactgttcacacaaatttttaataagaaacatttaccaagggagcatctttggactctctgtttttaaaaccttctgaaccatgacttggagccggcagagtaggctgtggctgtggacttcagcacaaccatcaacattgctgttcaaagaaattacagtttacgtccattccaagttgtaaatgctagtcttttttttttttttttccaataaaattttttttttttttttttttttttttttttttttttttttttttttttttttttttttttttttatatttttttttttgggtggggaaagagaaaaatagaaacaagaaagaaaaaatatagataggataaaa

SEQ ID NO: 316517 - DNA, 2007 bp, Homo sapiens
aaagggaacacaagctggcgctcacggatccttaattaaattaatcctccccccccccgggcagtggtgctgggagtgtcgtggacgccgtgccgttactcgtagtcaggcggcggcgcaggcggcggcggcggcatagcgcacagcgcgccttagcagcagcagcagcagcagcagcatcggaggtacccccgccgtcgcagcccccgcgctggtgcagccaccctcgctccctctgctcttcctcccttcgctcgcaccatggctgatcagctgaccgaagaacagattgctgaattcaaggaagccttctccctatttgataaagatggcgatggcaccatcacaacaaaggaacttggaactgtcatgaggtcactgggtcagaacccaacagaagctgaattgcaggatatgatcaatgaagtggatgctgatggtaatggcaccattgacttccccgaatttttgactatgatggctagaaaaatgaaagatacagatagtgaagaagaaatccgtgaggcattccgagtctttgacaaggatggcaatggttatatcagtgcagcagaactacgtcacgtcatgacaaacttaggagaaaaactaacagatgaagaagtagatgaaatgatcagagaagcagatattgatggagacggacaagtcaactatgaagaattcgtacagatgatgactgcaaaatgaagacctactttcaactcctttttcccccctctagaagaatcaaattgaatcttttacttacctcttgcaaaaaaaagaaaaaagaaaaaagttcatttattcattctgtttctatatagcaaaactgaatgtcaaaagtaccttctgtccacacacacaaaatctgcatgtattggttggtggtcctgtcccctaaagatcaagctacacatcagttttacaatataaatacttgtactaccttaatgataaggactccttaaagttccatttgctaatgattaatacactgtttgggctggccagtttttcatgcatgcagcttgacgattgagcacagtcaggcctttgtattaaaaatgaaaaatgaaaaaacaaattcaaaacctattcaaatgggttctagttcaatttgtttagtataaattgtcatagctggtttactgaaaacaaacacatttaaaattggtttacctcaggatgacgtgcagaaaaatgggtgaaggataaaccgttgagacgtggccccactggtaggatggtcctcttgtacttcgtgtgctccgacccatggtgacgatgacacaccctggtggcatgcccgtgtatgttggtttagcgttgtctgcattgttctagagtgaaacaggtgtcaggctgtcactgttcacacaaatttttaataagaaacatttaccaagggagcatctttggactctctgtttttaaaaccttctgaaccatgacttggagccggcagagtaggctgtggctgtggacttcagcacaaccatcaacattgctgttcaaagaaattacagtttacgtccattccaagttgtaaatgctagtcttttttttttttttttccaataaaataagtttaaaacaaaaaaagaaaacaaaaaaaaaaaaaaaaaaaaaaaaaaaaaaaaaaaagggggggggggtaaaaaattctcccggggggggcccaagttagcgggtaaccgagtttttgtggacaaggggggccccaatatagaggaggaggcgaatattatataagacctgaagccaggggcgccagctctattaaacaacgccgggacggcgggaacacacgtgtctagtggggactccttgtggagaaggaccccactaccctgggggcggcgaacattttgtggggacaactctcctaaggagaatttaaagggctggaggaactatcacagttaacgtgatgtgggtgtttaaaccagaggtattatcgtgagatgagaattgctacgggcagtgattcaaaattttcgg

SEQ ID NO: 316518 - DNA, 1982 bp, Homo sapiens
aaagggaacacaagctggcgctcacggatccttaattaaattaatcctccccccccccgggcagtggtgctgggagtgtcgtggacgccgtgccgttactcgtagtcaggcggcggcgcaggcggcggcggcggcatagcgcacagcgcgccttagcagcagcagcagcagcagcagcatcggaggtacccccgccgtcgcagcccccgcgctggtgcagccaccctcgctccctctgctcttcctcccttcgctcgcaccatggctgatcagctgaccgaagaacagattgctgaattcaaggaagccttctccctatttgataaagatggcgatggcaccatcacaacaaaggaacttggaactgtcatgaggtcactgggtcagaacccaacagaagctgaattgcaggatatgatcaatgaagtggatgctgatggtaatggcaccattgacttccccgaatttttgactatgatggctagaaaaatgaaagatacagatagtgaagaagaaatccgtgaggcattccgagtctttgacaaggatggcaatggttatatcagtgcagcagaactacgtcacgtcatgacaaacttaggagaaaaactaacagatgaagaagtagatgaaatgatcagagaagcagatattgatggagacggacaagtcaactatgaagaattcgtacagatgatgactgcaaaatgaagacctactttcaactcctttttcccccctctagaagaatcaaattgaatcttttacttacctcttgcaaaaaaaagaaaaaagaaaaaagttcatttattcattctgtttctatatagcaaaactgaatgtcaaaagtaccttctgtccacacacacaaaatctgcatgtattggttggtggtcctgtcccctaaagatcaagctacacatcagttttacaatataaatacttgtactaccttaatgataaggactccttaaagttccatttgctaatgattaatacactgtttgggctggccagtttttcatgcatgcagcttgacgattgagcacagtcaggcctttgtattaaaaatgaaaaatgaaaaaacaaattcaaaacctattcaaatgggttctagttcaatttgtttagtataaattgtcatagctggtttactgaaaacaaacacatttaaaattggtttacctcaggatgacgtgcagaaaaatgggtgaaggataaaccgttgagacgtggccccactggtaggatggtcctcttgtacttcgtgtgctccgacccatggtgacgatgacacaccctggtggcatgcccgtgtatgttggtttagcgttgtctgcattgttctagagtgaaacaggtgtcaggctgtcactgttcacacaaatttttaataagaaacatttaccaagggagcatctttggactctctgtttttaaaaccttctgaaccatgacttggagccggcagagtaggctgtggctgtggacttcagcacaaccatcaacattgctgttcaaagaaattacagtttacgtccattccaagttgtaaatgctagtcttttttttttttttttccaataaaaaaaaaaaaaaaaaaaaaaaaaaaaaaaaaaaaaaaagggggggggggtaaaaaattctcccggggggggcccaagttagcgggtaaccgagtttttgtggacaaggggggccccaatatagaggaggaggcgaatattatataagacctgaagccaggggcgccagctctattaaacaacgccgggacggcgggaacacacgtgtctagtggggactccttgtggagaaggaccccactaccctgggggcggcgaacattttgtggggacaactctcctaaggagaatttaaagggctggaggaactatcacagttaacgtgatgtgggtgtttaaaccagaggtattatcgtgagatgagaattgctacgggcagtgattcaaaattttcgg

SEQ ID NO: 316519 - DNA, 4197 bp, Homo sapiens
tggagacggagtctcgccctgtcgcccaggctggagtggcactggcgcgatctcggctcactgcaacctctgcctcttgggttccagcgattctcctgcgtcagccttctgagtagctggaattacaggcgtgtgtcgccacgcccagttagtgttttgtatctttagtagagatggggtttcaccatgttggccaggctggtctcaaactcctgacctcgtgatccgccctccccggcctcccaaagtgctgggattacaggcgtgaaccactgctcctggccgagctcaaagcttttatcaactggcccatgagtctgcactgagtcttgaggggggaggtgaaattaaatagccatagaaagtgctttttaacaaacttactgtgtttaaagaggaggaggaacccccagatgaagtaggtgacgagcactcttagaagttaccataaaagtgagtacagtgtgagctgtagatgtgtttgctgcagaggagcatgtgaggtttggaggcggatgtgtggtgactccaggggatagatttgcagaacctaacggaaagggaagctgtaaggtgcagggccagagggaaccagcagtaaccctgatagcggtctgtcatctgttcctctcgactctacagcagcggacaacagaactttgattgctgatttccatcagtaagcaggctttgaagcacacttccccacccctaaaaaaaaaccacgtattttggtaaatcctatatatattctaatgtactgtatgacagtatagaacatgatttttaaaagatgagttgggaggagaaaaggataaaagaaaaaaataaaagaagcattaagaataaacaattcggatctagattttactttctagatgattgactcgagggtggtgtagtaaaatcgcttgtctggtcacaaacatttggcagcagagcttttgattaggttctttgacaaagccttcagcacgttagagtggttttcactaatagtgttttggaaagaaaaggttgtccatagttctctagtttgctaagatgatcagctacccaggaacgtggagtaacttcctcttgtttgtgggagccccgggaatctgtgcaaattggtttacctcaggatgacgtgcagaaaaatgggtgaaggataaaccgttgagacgtggccccactggtaggatggtcctcttgtacttcgtgtgctccgacccatggtgacgatgacacaccctggtggcatgcccgtgtatgttggtttagcgttgtctgcattgttctagagtgaaacaggtgtcaggctgtcactgttcacacaaatttttaataagaaacatttaccaagggagcatctttggactctctgtttttaaaaccttctgaaccatgacttggagccggcagagtaggctgtggctgtggacttcagcacaaccatcaacattgctgttcaaagaaattacagtttacgtccattccaagttgtaaatgctagtcttttttttttttttttccaataaaaagaccattaacttaaagtggtgttaaatgctttgtaaagctgagatctaaatggggacaaggcaggtggaggggaggccagtgtacatgtaaatgcccacagcccagcattgggtttccctcccaaggccccagcaccaacctctgagcccaagaccttgcctgaaaacaagcagataccgattgcttcatcctatttatggacatgtaggtctagttgcattttcactggggggaggggggaaggtgaattatggtaacttttaatgatctattcaggcagtagagctcttaaggaaaaaaaaaacccactttctctcaagcatgtatttaggggttgttctcaattgtgctgctgattacctgtcttatgtaactacttgagaccatctgcaagagacatgatttagtgtgtctgtaattcaatcttcgctgtgtgtggtagaagcagtagtcacttttgtaagccagtctcttcatgcctaaaagacactaccagtcacctttgattcgcgacttttaatttatgattatacttagcctcctcctcctttttttttttttcccaagttgacttgactttgcttttttccccccaagtagaactaatgctagcttccagcttgaaagtaaaactccagtgtggagtgaattttgtgtctaattataaacctgtaaccaaaactcagacatctggtactggtctttgcattgagattggtccctgtaaaaccccctttaaaagcatattgcatttagtacagagctcttttttgaaatgaaggctggagatgtgcatttttcacggtgttaactggttgtatcttattagcaaggagattggggttttgagtgtttgcgtgggtggtttcaatttgccagggaacagtggcaggctgctagcaaggcagtgagaagctcttggcagccaaatgggtgcattcagggctgatttatagagacccttggcttctccttctcctactccctgtctttctggcattttgtagcttgttagattttctgccagaggggtgggtcagagcagtggaggggagacatcgcccatgtgcttctgctactggtccttgggctgggtggttggtagaggagatgttgacactatgagctaagggttggcttttgtaattacctgaatctgaaaggaatgcctaaggttaccttggggtttctcttctggtgagatagggttcctggtttgagtaagttaatgtcctggatatttcttgtggcagggggtggtcaaagagcctgattgctgacccagtctcaggcctgtggtcgatgacctctcggtagtttcaaagggggctggagggggatatttgacttgttttttcgaaatgtagccttctaaccctcaagtctttagaagctgggtggactcttagtggtcctgcagcgtatcctaaaagactacctttgaaacaggattcttgtatggccaggatcctgtctgggaaccagaaaccctacaccctccccctccaggaatgctgagttccagttttgagcagaggtgaggcagaatccactgtagccttccgccctggtatttggggggatgaccagcccaggcgttgggtgttagtctgcatgagtttgtgagaggaaatagctgggtgtcctggcagtgcccttgaagttggttaggaccttcctgtaaactcttgcccctacttctaactactctataaatatatacatatatttatatataaagtgattagttgaactggcatcctgctttagcctgagacttgccataagaaactgctgagtacttggcaaaccctttcatagttttgttctccatctgtttggggtaggtgttgagcgaggcaaatggatctcgatatttcagatgggcttttgatgcactgttgccaaggaaggctttttctgattttttgacaaatgaatttttgcacactttcattggtgtctttcggcaacttacacacattgaaaatgagctattgtacatatttttatattctctttataaatgcatgtctgattgtacttgtaacaatattgtaatgaacggctgtgcagtaggcccagcgctgctgtgtctcgtcagaggaatagcttaccacgaacccctcagcatactgggaatctcttcctgaacaacgaatgtaaatttggtcaagtctactcttccgttcattcaattattttaagcatttgaattatttattgtatatcctaaatatatttctcctttggcagtgactagatttccactaatgtgtcttaatctatccctccagctggcagttactgtttttttaatcccctgaagttgtcctgtaggagacagaaattctttgctgtctgtatcccttggagtaagaaggtagtggcatgggtggagtgtgtgttctttctccaaatctattatgatgtttattaaacacttctgtagcaaagatggtggtagttcttttgttactgaagttgcccttcaccatggctatttgaaaaggagatgtacttggacgtttctgtaaatcttgagataaactgtttggagatttaaccacctctctgatgggggaccaactctatggaaattgtaaatacgttttatttataaacctggcactgtattcaataaacatttctgcagcctttcatctctaa

SEQ ID NO: 316520 - DNA, 3355 bp, Homo sapiens
cttgtaatgggcacagaaatttcccatgtatttcccccacacaggcacagcctccctcatcatcagcatcccccaccagagtggtatgtttgttacagttgatgagccgacattgacacatcatcacctaaagtccatagtttacactagggttctctcttggtgttgtacatgctgtgggtttggacaaatgtataatgacatgtattcactattatggtgtcatacagaataatttctgtgcccatttcaacctaggggatccttaaattggtttacctcaggatgacgtgcagaaaaatgggtgaaggataaaccgttgagacgtggccccactggtaggatggtcctcttgtacttcgtgtgctccgacccatggtgacgatgacacaccctggtggcatgcccgtgtatgttggtttagcgttgtctgcattgttctagagtgaaacaggtgtcaggctgtcactgttcacacaaatttttaataagaaacatttaccaagggagcatctttggactctctgtttttaaaaccttctgaaccatgacttggagccggcagagtaggctgtggctgtggacttcagcacaaccatcaacattgctgttcaaagaaattacagtttacgtccattccaagttgtaaatgctagtcttttttttttttttttccaataaaaagaccattaacttaaagtggtgttaaatgctttgtaaagctgagatctaaatggggacaaggcaggtggaggggaggccagtgtacatgtaaatgcccacagcccagcattgggtttccctcccaaggccccagcaccaacctctgagcccaagaccttgcctgaaaacaagcagataccgattgcttcatcctatttatggacatgtaggtctagttgcattttcactggggggaggggggaaggtgaattatggtaacttttaatgatctattcaggcagtagagctcttaaggaaaaaaaaaacccactttctctcaagcatgtatttaggggttgttctcaattgtgctgctgattacctgtcttatgtaactacttgagaccatctgcaagagacatgatttagtgtgtctgtaattcaatcttcgctgtgtgtggtagaagcagtagtcacttttgtaagccagtctcttcatgcctaaaagacactaccagtcacctttgattcgcgacttttaatttatgattatacttagcctcctcctcctttttttttttttcccaagttgacttgactttgcttttttccccccaagtagaactaatgctagcttccagcttgaaagtaaaactccagtgtggagtgaattttgtgtctaattataaacctgtaaccaaaactcagacatctggtactggtctttgcattgagattggtccctgtaaaaccccctttaaaagcatattgcatttagtacagagctcttttttgaaatgaaggctggagatgtgcatttttcacggtgttaactggttgtatcttattagcaaggagattggggttttgagtgtttgcgtgggtggtttcaatttgccagggaacagtggcaggctgctagcaaggcagtgagaagctcttggcagccaaatgggtgcattcagggctgatttatagagacccttggcttctccttctcctactccctgtctttctggcattttgtagcttgttagattttctgccagaggggtgggtcagagcagtggaggggagacatcgcccatgtgcttctgctactggtccttgggctgggtggttggtagaggagatgttgacactatgagctaagggttggcttttgtaattacctgaatctgaaaggaatgcctaaggttaccttggggtttctcttctggtgagatagggttcctggtttgagtaagttaatgtcctggatatttcttgtggcagggggtggtcaaagagcctgattgctgacccagtctcaggcctgtggtcgatgacctctcggtagtttcaaagggggctggagggggatatttgacttgttttttcgaaatgtagccttctaaccctcaagtctttagaagctgggtggactcttagtggtcctgcagcgtatcctaaaagactacctttgaaacaggattcttgtatggccaggatcctgtctgggaaccagaaaccctacaccctccccctccaggaatgctgagttccagttttgagcagaggtgaggcagaatccactgtagccttccgccctggtatttggggggatgaccagcccaggcgttgggtgttagtctgcatgagtttgtgagaggaaatagctgggtgtcctggcagtgcccttgaagttggttaggaccttcctgtaaactcttgcccctacttctaactactctataaatatatacatatatttatatataaagtgattagttgaactggcatcctgctttagcctgagacttgccataagaaactgctgagtacttggcaaaccctttcatagttttgttctccatctgtttggggtaggtgttgagcgaggcaaatggatctcgatatttcagatgggcttttgatgcactgttgccaaggaaggctttttctgattttttgacaaatgaatttttgcacactttcattggtgtctttcggcaacttacacacattgaaaatgagctattgtacatatttttatattctctttataaatgcatgtctgattgtacttgtaacaatattgtaatgaacggctgtgcagtaggcccagcgctgctgtgtctcgtcagaggaatagcttaccacgaacccctcagcatactgggaatctcttcctgaacaacgaatgtaaatttggtcaagtctactcttccgttcattcaattattttaagcatttgaattatttattgtatatcctaaatatatttctcctttggcagtgactagatttccactaatgtgtcttaatctatccctccagctggcagttactgtttttttaatcccctgaagttgtcctgtaggagacagaaattctttgctgtctgtatcccttggagtaagaaggtagtggcatgggtggagtgtgtgttctttctccaaatctattatgatgtttattaaacacttctgtagcaaagatggtggtagttcttttgttactgaagttgcccttcaccatggctatttgaaaaggagatgtacttggacgtttctgtaaatcttgagataaactgtttggagatttaaccacctctctgatgggggaccaactctatggaaattgtaaatacgttttatttataaacctggcactgtattcaataaacatttctgcagcctttcatctctaa

SEQ ID NO: 316521 - DNA, 1531 bp, Homo sapiens
  misc_feature (1509)..(1509): n is a, c, g, or t
  misc_feature (1513)..(1513): n is a, c, g, or t
  misc_feature (1529)..(1529): n is a, c, g, or t
aaagggaacacaagctggcgctcacggatccttaattaaattaatcctccccccccccgggcagtggtgctgggagtgtcgtggacgccgtgccgttactcgtagtcaggcggcggcgcaggcggcggcggcggcatagcgcacagcgcgccttagcagcagcagcagcagcagcagcatcggaggtacccccgccgtcgcagcccccgcgctggtgcagccaccctcgctccctctgctcttcctcccttcgctcgcaccatggctgatcagctgaccgaagaacagattgctgaattcaaggaagccttctccctatttgataaagatggcgatggcaccatcacaacaaaggaacttggaactgtcatgaggtcactgggtcagaacccaacagaagctgaattgcaggatatgatcaatgaagtggatgctgatggtaatggcaccattgacttccccgaatttttgactatgatggctagaaaaatgaaagatacagatagtgaagaagaaatccgtgaggcattccgagtctttgacaaggatggcaatggttatatcagtgcagcagaactacgtcacgtcatgacaaacttaggagaaaaactaacagatgaagaagtagatgaaatgatcagagaagcagatattgatggagacggacaagtcaactatgaagaattcgtacagatgatgactgcaaaatgaagacctactttcaactcctttttcccccctctagaagaatcaaattgaatcttttacttacctcttgcaaaaaaaagaaaaaagaaaaaagttcatttattcattctgtttctatatagcaaaactgaatgtcaaaagtaccttctgtccacacacacaaaatctgcatgtattggttggtggtcctgtcccctaaagatcaagctacacatcagttttacaatataaatacttgtactaccttaatgataaggactccttaaagttccatttgctaatgattaatacactgtttgggctggccagtttttcatgcatgcagcttgacgattgagcacagtcaggcctttgtattaaaaatgaaaaatgaaaaaacaaattcaaaacctattcaaatgggttctagttcaatttgtttagtataaattgtcatagctggtttactgaaaacaaacacatttaaaattggtttacctcaggatgacgtgcagaaaaatgggtgaaggataaaccgttgagacgtggccccactggtaggatggtcctcttgtacttcgtgtgctccgacccatggtgacgatgacacaccctggtggcatgcccgtgtatgttggtttagcgttgtctgcattgttctagagtgaaacaggtgtcaggctgtcactgttcacacaaatttttaataagaaacatttaccaagggagcatctttggactctctgtttttaaaaccttctgaaccatgacttggagccggcagagtaggctgtggctgtggacttcagcacaaagagtggncggngatactctaaagtcgncc

SEQ ID NO: 316522 - DNA, 1640 bp, Homo sapiens
aaagggaacacaagctggcgctcacggatccttaattaaattaatcctccccccccccgggcagtggtgctgggagtgtcgtggacgccgtgccgttactcgtagtcaggcggcggcgcaggcggcggcggcggcatagcgcacagcgcgccttagcagcagcagcagcagcagcagcatcggaggtacccccgccgtcgcagcccccgcgctggtgcagccaccctcgctccctctgctcttcctcccttcgctcgcaccatggctgatcagctgaccgaagaacagattgctgaattcaaggaagccttctccctatttgataaagatggcgatggcaccatcacaacaaaggaacttggaactgtcatgaggtcactgggtcagaacccaacagaagctgaattgcaggatatgatcaatgaagtggatgctgatggtaatggcaccattgacttccccgaatttttgactatgatggctagaaaaatgaaagatacagatagtgaagaagaaatccgtgaggcattccgagtctttgacaaggatggcaatggttatatcagtgcagcagaactacgtcacgtcatgacaaacttaggagaaaaactaacagatgaagaagtagatgaaatgatcagagaagcagatattgatggagacggacaagtcaactatgaagaattcgtacagatgatgactgcaaaatgaagacctactttcaactcctttttcccccctctagaagaatcaaattgaatcttttacttacctcttgcaaaaaaaagaaaaaagaaaaaagttcatttattcattctgtttctatatagcaaaactgaatgtcaaaagtaccttctgtccacacacacaaaatctgcatgtattggttggtggtcctgtcccctaaagatcaagctacacatcagttttacaatataaatacttgtactaccttaatgataaggactccttaaagttccatttgctaatgattaatacactgtttgggctggccagtttttcatgcatgcagcttgacgattgagcacagtcaggcctttgtattaaaaatgaaaaatgaaaaaacaaattcaaaacctattcaaatgggttctagttcaatttgtttagtataaattgtcatagctggtttactgaaaacaaacacatttaaaattggtttacctcaggatgacgtgcagaaaaatgggtgaaggataaaccgttgagacgtggccccactggtaggatggtcctcttgtacttcgtgtgctccgacccatggtgacgatgacacaccctggtggcatgcccgtgtatgttggtttagcgttgtctgcattgttctagagtgaaacaggtgtcaggctgtcactgttcacacaaatttttaataagaaacatttaccaagggagcatctttggactctctgtttttaaaaccttctgaaccatgacttggagccggcagagtaggctgtggctgtggacttcagcacaatgccctgctttccaaaagcacacactttaccacgctcttaacagatccccaattccaagttgtaaatgctagtcttattccatactctatgtttctcaccattaaacacaggaaccaccagtctaaaactctttacaac

SEQ ID NO: 316523 - DNA, 3572 bp, Homo sapiens
cccgggctgcaggaattccggcacgaggagagagacggacaagtcaactatgaagaattcgtacagatgatgactgcaaaatgaagacctactttcaactcctttttcccccctctagaagaatcaaattgaatcttttacttacctcttgcaaaaaaaagaaaaaagaaaaaagttcatttattcattctgtttctatatagcaaaactgaatgtcaaaagtaccttctgtccacacacacaaaatctgcatgtattggttggtggtcctgtcccctaaagatcaagctacacatcagttttacaatataaatacttgtactaccttaatgataaggactccttaaagttccatttgctaatgattaatacactgtttgggctggccagtttttcatgcatgcagcttgacgattgagcacagtcaggcctttgtattaaaaatgaaaaatgaaaaaacaaattcaaaacctattcaaatgggttctagttcaatttgtttagtataaattgtcatagctggtttactgaaaacaaacacatttagccccactggtaggatggtcctcttgtacttcgtgtgctccgacccatggtgacgatgacacaccctggtggcatgcccgtgtatgttggtttagcgttgtctgcattgttctagagtgaaacaggtgtcaggctgtcactgttcacacaaatttttaataagaaacatttaccaagggagcatctttggactctctgtttttaaaaccttctgaaccatgacttggagccggcagagtaggctgtggctgtggacttcagcacaaccatcaacattgctgttcaaagaaattacagtttacgtccattccaagttgtaaatgctagtcttttttttttttttttccaataaaaagaccattaacttaaagtggtgttaaatgctttgtaaagctgagatctaaatggggacaaggcaggtggaggggaggccagtgtacatgtaaatgcccacagcccagcattgggtttccctcccaaggccccagcaccaacctctgagcccaagaccttgcctgaaaacaagcagataccgattgcttcatcctatttatggacatgtaggtctagttgcattttcactggggggaggggggaaggtgaattatggtaacttttaatgatctattcaggcagtagagctcttaaggaaaaaaaaaacccactttctctcaagcatgtatttaggggttgttctcaattgtgctgctgattacctgtcttatgtaactacttgagaccatctgcaagagacatgatttagtgtgtctgtaattcaatcttcgctgtgtgtggtagaagcagtagtcacttttgtaagccagtctcttcatgcctaaaagacactaccagtcacctttgattcgcgacttttaatttatgattatacttagcctcctcctcctttttttttttttcccaagttgacttgactttgcttttttccccccaagtagaactaatgctagcttccagcttgaaagtaaaactccagtgtggagtgaattttgtgtctaattataaacctgtaaccaaaactcagacatctggtactggtctttgcattgagattggtccctgtaaaaccccctttaaaagcatattgcatttagtacagagctcttttttgaaatgaaggctggagatgtgcatttttcacggtgttaactggttgtatcttattagcaaggagattggggttttgagtgtttgcgtgggtggtttcaatttgccagggaacagtggcaggctgctagcaaggcagtgagaagctcttggcagccaaatgggtgcattcagggctgatttatagagacccttggcttctccttctcctactccctgtctttctggcattttgtagcttgttagattttctgccagaggggtgggtcagagcagtggaggggagacatcgcccatgtgcttctgctactggtccttgggctgggtggttggtagaggagatgttgacactatgagctaagggttggcttttgtaattacctgaatctgaaaggaatgcctaaggttaccttggggtttctcttctggtgagatagggttcctggtttgagtaagttaatgtcctggatatttcttgtggcagggggtggtcaaagagcctgattgctgacccagtctcaggcctgtggtcgatgacctctcggtagtttcaaagggggctggagggggatatttgacttgttttttcgaaatgtagccttctaaccctcaagtctttagaagctgggtggactcttagtggtcctgcagcgtatcctaaaagactacctttgaaacaggattcttgtatggccaggatcctgtctgggaaccagaaaccctacaccctccccctccaggaatgctgagttccagttttgagcagaggtgaggcagaatccactgtagccttccgccctggtatttggggggatgaccagcccaggcgttgggtgttagtctgcatgagtttgtgagaggaaatagctgggtgtcctggcagtgcccttgaagttggttaggaccttcctgtaaactcttgcccctacttctaactactctataaatatatacatatatttatatataaagtgattagttgaactggcatcctgctttagcctgagacttgccataagaaactgctgagtacttggcaaaccctttcatagttttgttctccatctgtttggggtaggtgttgagcgaggcaaatggatctcgatatttcagatgggcttttgatgcactgttgccaaggaaggctttttctgattttttgacaaatgaatttttgcacactttcattggtgtctttcggcaacttacacacattgaaaatgagctattgtacatatttttatattctctttataaatgcatgtctgattgtacttgtaacaatattgtaatgaacggctgtgcagtaggcccagcgctgctgtgtctcgtcagaggaatagcttaccacgaacccctcagcatactgggaatctcttcctgaacaacgaatgtaaatttggtcaagtctactcttccgttcattcaattattttaagcatttgaattatttattgtatatcctaaatatatttctcctttggcagtgactagatttccactaatgtgtcttaatctatccctccagctggcagttactgtttttttaatcccctgaagttgtcctgtaggagacagaaattctttgctgtctgtatcccttggagtaagaaggtagtggcatgggtggagtgtgtgttctttctccaaatctattatgatgtttattaaacacttctgtagcaaagatggtggtagttcttttgttactgaagttgcccttcaccatggctatttgaaaaggagatgtacttggacgtttctgtaaatcttgagataaactgtttggagatttaaccacctctctgatgggggaccaactctatggaaattgtaaatacgttttatttataaacctggcactgtattcaataaacatttctgcagcctttcatctctaa

SEQ ID NO: 316524 - DNA, 1787 bp, Homo sapiens
aaagggaacacaagctggcgctcacggatccttaattaaattaatcctccccccccccgggcagtggtgctgggagtgtcgtggacgccgtgccgttactcgtagtcaggcggcggcgcaggcggcggcggcggcatagcgcacagcgcgccttagcagcagcagcagcagcagcagcatcggaggtacccccgccgtcgcagcccccgcgctggtgcagccaccctcgctccctctgctcttcctcccttcgctcgcaccatggctgatcagctgaccgaagaacagattgctgaattcaaggaagccttctccctatttgataaagatggcgatggcaccatcacaacaaaggaacttggaactgtcatgaggtcactgggtcagaacccaacagaagctgaattgcaggatatgatcaatgaagtggatgctgatggtaatggcaccattgacttccccgaatttttgactatgatggctagaaaaatgaaagatacagatagtgaagaagaaatccgtgaggcattccgagtctttgacaaggatggcaatggttatatcagtgcagcagaactacgtcacgtcatgacaaacttaggagaaaaactaacagatgaagaagtagatgaaatgatcagagaagcagatattgatggagacggacaagtcaactatgaagaattcgtacagatgatgactgcaaaatgaagacctactttcaactcctttttcccccctctagaagaatcaaattgaatcttttacttacctcttgcaaaaaaaagaaaaaagaaaaaagttcatttattcattctgtttctatatagcaaaactgaatgtcaaaagtaccttctgtccacacacacaaaatctgcatgtattggttggtggtcctgtcccctaaagatcaagctacacatcagttttacaatataaatacttgtactaccttaatgataaggactccttaaagttccatttgctaatgattaatacactgtttgggctggccagtttttcatgcatgcagcttgacgattgagcacagtcaggcctttgtattaaaaatgaaaaatgaaaaaacaaattcaaaacctattcaaatgggttctagttcaatttgtttagtataaattgtcatagctggtttactgaaaacaaacacatttaaaattggtttacctcaggatgacgtgcagaaaaatgggtgaaggataaaccgttgagacgtggccccactggtaggatggtcctcttgtacttcgtgtgctccgacccatggtgacgatgacacaccctggtggcatgcccgtgtatgttggtttagcgttgtctgcattgttctagagtgaaacaggtgtcaggctgtcactgttcacacaaatttttaataaggatcccctaaggggatccttatttaaaatacagtgttagcatagatccccttttcaggaaggacccaaatgtcagtgcatagttagataaaacggtacaatgttttactgaaagcatacttttttggaaaatagattcatgaagcctttagtgctgcttctgtcagtcccaccttacaaactttaacattttctaagtgccccgaccgtgtaccaagacacatctaatggagattgtaccggttgtttttttgtttgaacctcttgaaagagttcaatcttaacgttttctcattttaaaatttaaaatcttgtttaaccaaagcttgtataagatactgttttcatttcattacagacttgtttataaaagttcattttttataagga

SEQ ID NO: 316525 - DNA, 3056 bp, Homo sapiens
tgctctagacgtactccccagttctggtccgccccactggtaggatggtcctcttgtacttcgtgtgctccgacccatggtgacgatgacacaccctggtggcatgcccgtgtatgttggtttagcgttgtctgcattgttctagagtgaaacaggtgtcaggctgtcactgttcacacaaatttttaataagaaacatttaccaagggagcatctttggactctctgtttttaaaaccttctgaaccatgacttggagccggcagagtaggctgtggctgtggacttcagcacaaccatcaacattgctgttcaaagaaattacagtttacgtccattccaagttgtaaatgctagtcttttttttttttttttccaataaaaagaccattaacttaaagtggtgttaaatgctttgtaaagctgagatctaaatggggacaaggcaggtggaggggaggccagtgtacatgtaaatgcccacagcccagcattgggtttccctcccaaggccccagcaccaacctctgagcccaagaccttgcctgaaaacaagcagataccgattgcttcatcctatttatggacatgtaggtctagttgcattttcactggggggaggggggaaggtgaattatggtaacttttaatgatctattcaggcagtagagctcttaaggaaaaaaaaaacccactttctctcaagcatgtatttaggggttgttctcaattgtgctgctgattacctgtcttatgtaactacttgagaccatctgcaagagacatgatttagtgtgtctgtaattcaatcttcgctgtgtgtggtagaagcagtagtcacttttgtaagccagtctcttcatgcctaaaagacactaccagtcacctttgattcgcgacttttaatttatgattatacttagcctcctcctcctttttttttttttcccaagttgacttgactttgcttttttccccccaagtagaactaatgctagcttccagcttgaaagtaaaactccagtgtggagtgaattttgtgtctaattataaacctgtaaccaaaactcagacatctggtactggtctttgcattgagattggtccctgtaaaaccccctttaaaagcatattgcatttagtacagagctcttttttgaaatgaaggctggagatgtgcatttttcacggtgttaactggttgtatcttattagcaaggagattggggttttgagtgtttgcgtgggtggtttcaatttgccagggaacagtggcaggctgctagcaaggcagtgagaagctcttggcagccaaatgggtgcattcagggctgatttatagagacccttggcttctccttctcctactccctgtctttctggcattttgtagcttgttagattttctgccagaggggtgggtcagagcagtggaggggagacatcgcccatgtgcttctgctactggtccttgggctgggtggttggtagaggagatgttgacactatgagctaagggttggcttttgtaattacctgaatctgaaaggaatgcctaaggttaccttggggtttctcttctggtgagatagggttcctggtttgagtaagttaatgtcctggatatttcttgtggcagggggtggtcaaagagcctgattgctgacccagtctcaggcctgtggtcgatgacctctcggtagtttcaaagggggctggagggggatatttgacttgttttttcgaaatgtagccttctaaccctcaagtctttagaagctgggtggactcttagtggtcctgcagcgtatcctaaaagactacctttgaaacaggattcttgtatggccaggatcctgtctgggaaccagaaaccctacaccctccccctccaggaatgctgagttccagttttgagcagaggtgaggcagaatccactgtagccttccgccctggtatttggggggatgaccagcccaggcgttgggtgttagtctgcatgagtttgtgagaggaaatagctgggtgtcctggcagtgcccttgaagttggttaggaccttcctgtaaactcttgcccctacttctaactactctataaatatatacatatatttatatataaagtgattagttgaactggcatcctgctttagcctgagacttgccataagaaactgctgagtacttggcaaaccctttcatagttttgttctccatctgtttggggtaggtgttgagcgaggcaaatggatctcgatatttcagatgggcttttgatgcactgttgccaaggaaggctttttctgattttttgacaaatgaatttttgcacactttcattggtgtctttcggcaacttacacacattgaaaatgagctattgtacatatttttatattctctttataaatgcatgtctgattgtacttgtaacaatattgtaatgaacggctgtgcagtaggcccagcgctgctgtgtctcgtcagaggaatagcttaccacgaacccctcagcatactgggaatctcttcctgaacaacgaatgtaaatttggtcaagtctactcttccgttcattcaattattttaagcatttgaattatttattgtatatcctaaatatatttctcctttggcagtgactagatttccactaatgtgtcttaatctatccctccagctggcagttactgtttttttaatcccctgaagttgtcctgtaggagacagaaattctttgctgtctgtatcccttggagtaagaaggtagtggcatgggtggagtgtgtgttctttctccaaatctattatgatgtttattaaacacttctgtagcaaagatggtggtagttcttttgttactgaagttgcccttcaccatggctatttgaaaaggagatgtacttggacgtttctgtaaatcttgagataaactgtttggagatttaaccacctctctgatgggggaccaactctatggaaattgtaaatacgttttatttataaacctggcactgtattcaataaacatttctgcagcctttcatctctaa

SEQ ID NO: 316526 - DNA, 1399 bp, Homo sapiens
aaagggaacacaagctggcgctcacggatccttaattaaattaatcctccccccccccgggcagtggtgctgggagtgtcgtggacgccgtgccgttactcgtagtcaggcggcggcgcaggcggcggcggcggcatagcgcacagcgcgccttagcagcagcagcagcagcagcagcatcggaggtacccccgccgtcgcagcccccgcgctggtgcagccaccctcgctccctctgctcttcctcccttcgctcgcaccatggctgatcagctgaccgaagaacagattgctgaattcaaggaagccttctccctatttgataaagatggcgatggcaccatcacaacaaaggaacttggaactgtcatgaggtcactgggtcagaacccaacagaagctgaattgcaggatatgatcaatgaagtggatgctgatggtaatggcaccattgacttccccgaatttttgactatgatggctagaaaaatgaaagatacagatagtgaagaagaaatccgtgaggcattccgagtctttgacaaggatggcaatggttatatcagtgcagcagaactacgtcacgtcatgacaaacttaggagaaaaactaacagatgaagaagtagatgaaatgatcagagaagcagatattgatggagacggacaagtcaactatgaagaattcgtacagatgatgactgcaaaatgaagacctactttcaactcctttttcccccctctagaagaatcaaattgaatcttttacttacctcttgcaaaaaaaagaaaaaagaaaaaagttcatttattcattctgtttctatatagcaaaactgaatgtcaaaagtaccttctgtccacacacacaaaatctgcatgtattggttggtggtcctgtcccctaaagatcaagctacacatcagttttacaatataaatacttgtactaccttaatgataaggactccttaaagttccatttgctaatgattaatacactgtttgggctggccagtttttcatgcatgcagcttgacgattgagcacagtcaggcctttgtattaaaaatgaaaaatgaaaaaacaaattcaaaacctattcaaatgggttctagttcaatttgtttagtataaattgtcatagctggtttactgaaaacaaacacatttaaaattggtttacctcaggatgacgtgcagaaaaatgggtgaaggataaaccgttgagacgtgagaaggacgggccaggcgtggccagaaggagcgtggccagaaaggagcgtggccagaaggagcgtggccagaaggagcgtggccagaaggagcgtggcccgaaggagcgtggccagaaggagcgtggccagaaggagcgtggcagaaggagcgtggccaaagaa

SEQ ID NO: 316527 - DNA, 1292 bp, Homo sapiens
aaagggaacacaagctggcgctcacggatccttaattaaattaatcctccccccccccgggcagtggtgctgggagtgtcgtggacgccgtgccgttactcgtagtcaggcggcggcgcaggcggcggcggcggcatagcgcacagcgcgccttagcagcagcagcagcagcagcagcatcggaggtacccccgccgtcgcagcccccgcgctggtgcagccaccctcgctccctctgctcttcctcccttcgctcgcaccatggctgatcagctgaccgaagaacagattgctgaattcaaggaagccttctccctatttgataaagatggcgatggcaccatcacaacaaaggaacttggaactgtcatgaggtcactgggtcagaacccaacagaagctgaattgcaggatatgatcaatgaagtggatgctgatggtaatggcaccattgacttccccgaatttttgactatgatggctagaaaaatgaaagatacagatagtgaagaagaaatccgtgaggcattccgagtctttgacaaggatggcaatggttatatcagtgcagcagaactacgtcacgtcatgacaaacttaggagaaaaactaacagatgaagaagtagatgaaatgatcagagaagcagatattgatggagacggacaagtcaactatgaagaattcgtacagatgatgactgcaaaatgaagacctactttcaactcctttttcccccctctagaagaatcaaattgaatcttttacttacctcttgcaaaaaaaagaaaaaagaaaaaagttcatttattcattctgtttctatatagcaaaactgaatgtcaaaagtaccttctgtccacacacacaaaatctgcatgtattggttggtggtcctgtcccctaaagatcaagctacacatcagttttacaatataaatacttgtactaccttaatgataaggactccttaaagttccatttgctaatgattaatacactgtttgggctggccagtttttcatgcatgcagcttgacgattgagcacagtcaggcctttgtattaaaaatgaaaaatgaaaaaacaaattcaaaacctattcaaatgggttctagttcaatttgtttagtataaattgtcatagctggtttactgaaaacaaacacatttaaaattggtttacctcaggatgacgtgcagaaaaatgggtgaaggataaaccgttgagacgtgatgacaggtgtaccgccccagtcaaactccccacctggcatctatgcgacagcagaa

SEQ ID NO: 316528 - DNA, 1100 bp, Homo sapiens
aaagggaacacaagctggcgctcacggatccttaattaaattaatcctccccccccccgggcagtggtgctgggagtgtcgtggacgccgtgccgttactcgtagtcaggcggcggcgcaggcggcggcggcggcatagcgcacagcgcgccttagcagcagcagcagcagcagcagcatcggaggtacccccgccgtcgcagcccccgcgctggtgcagccaccctcgctccctctgctcttcctcccttcgctcgcaccatggctgatcagctgaccgaagaacagattgctgaattcaaggaagccttctccctatttgataaagatggcgatggcaccatcacaacaaaggaacttggaactgtcatgaggtcactgggtcagaacccaacagaagctgaattgcaggatatgatcaatgaagtggatgctgatggtaatggcaccattgacttccccgaatttttgactatgatggctagaaaaatgaaagatacagatagtgaagaagaaatccgtgaggcattccgagtctttgacaaggatggcaatggttatatcagtgcagcagaactacgtcacgtcatgacaaacttaggagaaaaactaacagatgaagaagtagatgaaatgatcagagaagcagatattgatggagacggacaagtcaactatgaagaattcgtacagatgatgactgcaaaatgaagacctactttcaactcctttttcccccctctagaagaatcaaattgaatcttttacttacctcttgcaaaaaaaagaaaaaagaaaaaagttcatttattcattctgtttctatatagcaaaactgaatgtcaaaagtaccttctgtccacacacacaaaatctgcatgtattggttggtggtcctgtcccctaaagatcaagctacacatcagttttacaatataaatacttgtactaccttaatgataaggactccttaaagttccatttgctaatgattaatacactgtttgggctggccagtttttcatgcatgcagcttgacgattgagcacagtcaggcctttgtattaaaaatgaaaaatgaaaaaacaaattcaaaacct

SEQ ID NO: 316529 - DNA, 1754 bp, Homo sapiens
  misc_feature (1)..(1): n is a, c, g, or t
  misc_feature (9)..(9): n is a, c, g, or t
  misc_feature (37)..(37): n is a, c, g, or t
ncaccaggngggctcggtcaagaactcccggatcccncgggctgcatgaattcggcacgttcctactccctgtctttctggcattttgtagcttgttagattttctgccagaggggtgggtcagagcagtggaggggagacatcgcccatgtgcttctgctactggtccttgggctgggtggttggtagaggagatgttgacactatgagctaagggttggcttttgtaattacctgaatctgaaaggaatgcctaaggttaccttggggtttctcttctggtgagatagggttcctggtttgagtaagttaatgtcctggatatttcttgtggcagggggtggtcaaagagcctgattgctgacccagtctcaggcctgtggtcgatgacctctcggtagtttcaaagggggctggagggggatatttgacttgttttttcgaaatgtagccttctaaccctcaagtctttagaagctgggtggactcttagtggtcctgcagcgtatcctaaaagactacctttgaaacaggattcttgtatggccaggatcctgtctgggaaccagaaaccctacaccctccccctccaggaatgctgagttccagttttgagcagaggtgaggcagaatccactgtagccttccgccctggtatttggggggatgaccagcccaggcgttgggtgttagtctgcatgagtttgtgagaggaaatagctgggtgtcctggcagtgcccttgaagttggttaggaccttcctgtaaactcttgcccctacttctaactactctataaatatatacatatatttatatataaagtgattagttgaactggcatcctgctttagcctgagacttgccataagaaactgctgagtacttggcaaaccctttcatagttttgttctccatctgtttggggtaggtgttgagcgaggcaaatggatctcgatatttcagatgggcttttgatgcactgttgccaaggaaggctttttctgattttttgacaaatgaatttttgcacactttcattggtgtctttcggcaacttacacacattgaaaatgagctattgtacatatttttatattctctttataaatgcatgtctgattgtacttgtaacaatattgtaatgaacggctgtgcagtaggcccagcgctgctgtgtctcgtcagaggaatagcttaccacgaacccctcagcatactgggaatctcttcctgaacaacgaatgtaaatttggtcaagtctactcttccgttcattcaattattttaagcatttgaattatttattgtatatcctaaatatatttctcctttggcagtgactagatttccactaatgtgtcttaatctatccctccagctggcagttactgtttttttaatcccctgaagttgtcctgtaggagacagaaattctttgctgtctgtatcccttggagtaagaaggtagtggcatgggtggagtgtgtgttctttctccaaatctattatgatgtttattaaacacttctgtagcaaagatggtggtagttcttttgttactgaagttgcccttcaccatggctatttgaaaaggagatgtacttggacgtttctgtaaatcttgagataaactgtttggagatttaaccacctctctgatgggggaccaactctatggaaattgtaaatacgttttatttataaacctggcactgtattcaataaacatttctgcagcctttcatctctaa

SEQ ID NO: 316530 - DNA, 988 bp, Homo sapiens
aaagggaacacaagctggcgctcacggatccttaattaaattaatcctccccccccccgggcagtggtgctgggagtgtcgtggacgccgtgccgttactcgtagtcaggcggcggcgcaggcggcggcggcggcatagcgcacagcgcgccttagcagcagcagcagcagcagcagcatcggaggtacccccgccgtcgcagcccccgcgctggtgcagccaccctcgctccctctgctcttcctcccttcgctcgcaccatggctgatcagctgaccgaagaacagattgctgaattcaaggaagccttctccctatttgataaagatggcgatggcaccatcacaacaaaggaacttggaactgtcatgaggtcactgggtcagaacccaacagaagctgaattgcaggatatgatcaatgaagtggatgctgatggtaatggcaccattgacttccccgaatttttgactatgatggctagaaaaatgaaagatacagatagtgaagaagaaatccgtgaggcattccgagtctttgacaaggatggcaatggttatatcagtgcagcagaactacgtcacgtcatgacaaacttaggagaaaaactaacagatgaagaagtagatgaaatgatcagagaagcagatattgatggagacggacaagtcaactatgaagaattcgtacagatgatgactgcaaaatgaagacctactttcaactcctttttcccccctctagaagaatcaaattgaatcttttacttacctcttgcaaaaaaaagaaaaaagaaaaaagttcatttattcattctgtttctatatagcaaaactgaatgtcaaaagtaccttctgtccacacacacaaaatctgcatgtattggttaggaggaccgtccctaagaataagcacacatagataaatataatacgtacacctaaataagaccctaagtccatgaaagataacacgtgggacagccca

SEQ ID NO: 316531 - DNA, 1376 bp, Homo sapiens
aaagggaacacaagctggcgctcacggatccttaattaaattaatcctccccccccccgggcagtggtgctgggagtgtcgtggacgccgtgccgttactcgtagtcaggcggcggcgcaggcggcggcggcggcatagcgcacagcgcgccttagcagcagcagcagcagcagcagcatcggaggtacccccgccgtcgcagcccccgcgctggtgcagccaccctcgctccctctgctcttcctcccttcgctcgcaccatggctgatcagctgaccgaagaacagattgctgaattcaaggaagccttctccctatttgataaagatggcgatggcaccatcacaacaaaggaacttggaactgtcatgaggtcactgggtcagaacccaacagaagctgaattgcaggatatgatcaatgaagtggatgctgatggtaatggcaccattgacttccccgaatttttgactatgatggctagaaaaatgaaagatacagatagtgaagaagaaatccgtgaggcattccgagtctttgacaaggatggcaatggttatatcagtgcagcagaactacgtcacgtcatgacaaacttaggagaaaaactaacagatgaagaagtagatgaaatgatcagagaagcagatattgatggagacggacaagtcaactatgaagaattcgtacagatgatgactgcaaaatgaagacctactttcaactcctttttcccccctctagaagaatcaaattgaatcttttacttacctcttgcatgaatgtcaaaagtaccttctgtccacacacacaaaatctgcatgtattggttggtggtcctgtcccctaaagatcaagctacacatcagttttacaatataaatacttgtactaccttaatgataaggactccttaaagttccatttgctaatgattaatacactgtttgggctggccagtttttcatgcatgcagcttgacgattgagcacagtcaggcctttgtattaaaaatgaaaaatgaaaaaacaaattcaaaacctattcaaatgggttctagttcaatttgtttagtataaattgtcatagctggtttactgaaaacaaacacatttaaaattggtttacctcaggatgacgtgcagaaaaatgggtgaaggataaaccgttgagacgtggccccactggtaggatggtcctcttgtacttcgtgtgctccgacccatggtgacgatgacacaccctggtggcatgcccgtgacgggcaattgggtaaacgtgccggctggtccaaatgaaccagtgcaggagcctggtaccaaattttataaacttccaggacatctggtcctattctctacattgtcctctgttt

SEQ ID NO: 316532 - DNA, 404 bp, Homo sapiens
aacaaatgaagcaatggggttggttgaacagctttggggggttcgattccttccttttttgtctagattttatgtatacgggttcttcgaatgtgtggtagggtggggggcatccatatagtcactccaggtttatgtgtgttctttctccaaatctattatgatgtttattaaacacttctgtagcaaagatggtggtagttcttttgttactgaagttgcccttcaccatggctatttgaaaaggagatgtacttggacgtttctgtaaatcttgagataaactgtttggagatttaaccacctctctgatgggggaccaactctatggaaattgtaaatacgttttatttataaacctggcactgtattcaataaacatttctgcagcctttcatctctaa

SEQ ID NO: 316533 - DNA, 834 bp, Homo sapiens
cgcagactcgcgctccggtgtggtgctgggagtgtcgtggacgccgtgccgttactcgtagtcaggcggcggcgcaggcggcggcggcggcatagcgcacagcgcgccttagcagcagcagcagcagcagcagcatcggaggtacccccgccgtcgcagcccccgcgctggtgcagccaccctcgctccctctgctcttcctcccttcgctcgcaccatggctgatcagctgaccgaagaacagattgctgaattcaaggaagccttctccctatttgataaagatggcgatggcaccatcacaacaaaggaacttggaactgtcatgaggtcactgggtcagaacccaacagaagctgaattgcaggatatgatcaatgaagtggatgctgatggtaatggcaccattgacttcccgggttaatgccattctcctgcctcagcctcccaaggtgttgggattacaggcgtgagccactgggccctgcctgtattttttatcagccacaaatccagcaacaagctgaggattcagctcataaaacaggcttggtgtcttggtgatctcacataaccaagatgctacgccgtggggaaccacatccccctggatgccctccagccttggtttgggctggagtcagggcctggatacagtattttgaatttgtatgccactggtttgcattgctggtcaggaactctagtgctttgcatagccctggtttggaaacatgttatagcagttcttggtatagagccaactagaagaaccagcatcattccactgtcctgccaggtacacctcagtactccccttcccactgaagtggt

SEQ ID NO: 316534 - DNA, 445 bp, Homo sapiens
aaagggaacacaagctggcgctcacggatccttaattaaattaatcctccccccccccgggcagtggtgctgggagtgtcgtggacgccgtgccgttactcgtagtcaggcggcggcgcaggcggcggcggcggcatagcgcacagcgcgccttagcagcagcagcagcagcagcagcatcggaggtaccccgctgttcctgatcggctccaaggcgatcatcagcgagaacctgccggtgggccagcgggccaaggtgttttccctgcgctacaccctgaccaatgtcggctacgccaccggcccgatgctcggcgtggtgattgccgggcagatgcccctggcaccgttcctgatcgccagcgcgattgcctttggcagcctgttcctgatgatcggcatcccgccgacccaacgcgacgacagcaacaaacccttaagtttt

SEQ ID NO: 316535 - DNA, 254 bp, Homo sapiens
aaagggaacacaagctggcgctcacggatccttaattaaattaatcctccccccccccgggcagtggtgctgggagtgtcgtggacgccgtgccgttactcgtagtcaggcggcggcgcaggcggcggcggcggcatagcgcacagcgcgccttagcagcagcagcagcagcagcagcatcggaggtaccccctgaacactctctgaacctgggctgaaccgaggccggctggctgtggttccttcacctggtg

SEQ ID NO: 316536 - DNA, 564 bp, Homo sapiens
tgtttcttgactgttactttgaattgttgtgagcttttgcaaatcctgttttctgcattagctgtttgcatgtatttagtaggttagaggtgggaactagagatcagagaattgtttatggcagcagagttagcagtaacttgagagggcatagctaagtcaaagacctacttccccacactacatcattagcaataacaattgctgaatgttcacaggatggcaatggttatatcagtgcagcagaactacgtcacgtcatgacaaacttaggagaaaaactaacagatgaagaagtagatgaaatgatcagagaagcagatattgatggagacggacaagtcaactatgaaggtaaaactaaattctctgagctcagtgtttcatagtcttacctttagatctgtaagcaagccaactgcttcactagacagcctttgactttattttatgtacagtaaagatgttgtgttcattaaagctgttttcaaagataaccaaaagttactattatatttgtcttttcagaattcgtacagatgatgactgcaaaatgaagaccta

SEQ ID NO: 316537 - DNA, 430 bp, Homo sapiens
tttccactaatgtgtcttaatctatccctccagctggcagttactgtttttttaatcccctgaagttgtcctgtaggagacagaaattctttgctgtctgtatcccttggagtaagaaggtagtggcatgggtggagtgtgtgttctttctccaaatctattatgatgtttattaaacacttctgtagcaaagatggtggtagttcttttgttactgaagttgcccttcaccatggctatttgaaaaggagatgtacttggacgtttctgtaaatcttgagataaactgtttggagatttaaccacctctctgatgggggaccaactctatggaaattgtaaatacgttttatttataaacctggcactgtattcaataaacatttctgcagcctttcatctctaatctaactgcgaactgtgtaggttt

SEQ ID NO: 316538 - DNA, 4261 bp, Homo sapiens
aaagggaacacaagctggcgctcacggatccttaattaaattaatcctccccccccccgggcagtggtgctgggagtgtcgtggacgccgtgccgttactcgtagtcaggcggcggcgcaggcggcggcggcggcatagcgcacagcgcgccttagcagcagcagcagcagcagcagcatcggaggtacccccgccgtcgcagcccccgcgctggtgcagccaccctcgctccctctgctcttcctcccttcgctcgcaccatggctgatcagctgaccgaagaacagattgctgaattcaaggaagccttctccctatttgataaagatggcgatggcaccatcacaacaaaggaacttggaactgtcatgaggtcactgggtcagaacccaacagaagctgaattgcaggatatgatcaatgaagtggatgctgatggtaatggcaccattgacttccccgaatttttgactatgatggctagaaaaatgaaagatacagatagtgaagaagaaatccgtgaggcattccgagtctttgacaaggatggcaatggttatatcagtgcagcagaactacgtcacgtcatgacaaacttaggagaaaaactaacagatgaagaagtagatgaaatgatcagagaagcagatattgatggagacggacaagtcaactatgaagaattcgtacagatgatgactgcaaaatgaagacctactttcaactcctttttcccccctctagaagaatcaaattgaatcttttacttacctcttgcaaaaaaaagaaaaaagaaaaaagttcatttattcattctgtttctatatagcaaaactgaatgtcaaaagtaccttctgtccacacacacaaaatctgcatgtattggttggtggtcctgtcccctaaagatcaagctacacatcagttttacaatataaatacttgtactaccttaatgataaggactccttaaagttccatttgctaatgattaatacactgtttgggctggccagtttttcatgcatgcagcttgacgattgagcacagtcaggcctttgtattaaaaatgaaaaatgaaaaaacaaattcaaaacctattcaaatgggttctagttcaatttgtttagtataaattgtcatagctggtttactgaaaacaaacacatttaaaattggtttacctcaggatgacgtgcagaaaaatgggtgaaggataaaccgttgagacgtggccccactggtaggatggtcctcttgtacttcgtgtgctccgacccatggtgacgatgacacaccctggtggcatgcccgtgtatgttggtttagcgttgtctgcattgttctagagtgaaacaggtgtcaggctgtcactgttcacacaaatttttaataagaaacatttaccaagggagcatctttggactctctgtttttaaaaccttctgaaccatgacttggagccggcagagtaggctgtggctgtggacttcagcacaaccatcaacattgctgttcaaagaaattacagtttacgtccattccaagttgtaaatgctagtcttttttttttttttttccaataaaaagaccattaacttaaagtggtgttaaatgctttgtaaagctgagatctaaatggggacaaggcaggtggaggggaggccagtgtacatgtaaatgcccacagcccagcattgggtttccctcccaaggccccagcaccaacctctgagcccaagaccttgcctgaaaacaagcagataccgattgcttcatcctatttatggacatgtaggtctagttgcattttcactggggggaggggggaaggtgaattatggtaacttttaatgatctattcaggcagtagagctcttaaggaaaaaaaaaacccactttctctcaagcatgtatttaggggttgttctcaattgtgctgctgattacctgtcttatgtaactacttgagaccatctgcaagagacatgatttagtgtgtctgtaattcaatcttcgctgtgtgtggtagaagcagtagtcacttttgtaagccagtctcttcatgcctaaaagacactaccagtcacctttgattcgcgacttttaatttatgattatacttagcctcctcctcctttttttttttttcccaagttgacttgactttgcttttttccccccaagtagaactaatgctagcttccagcttgaaagtaaaactccagtgtggagtgaattttgtgtctaattataaacctgtaaccaaaactcagacatctggtactggtctttgcattgagattggtccctgtaaaaccccctttaaaagcatattgcatttagtacagagctcttttttgaaatgaaggctggagatgtgcatttttcacggtgttaactggttgtatcttattagcaaggagattggggttttgagtgtttgcgtgggtggtttcaatttgccagggaacagtggcaggctgctagcaaggcagtgagaagctcttggcagccaaatgggtgcattcagggctgatttatagagacccttggcttctccttctcctactccctgtctttctggcattttgtagcttgttagattttctgccagaggggtgggtcagagcagtggaggggagacatcgcccatgtgcttctgctactggtccttgggctgggtggttggtagaggagatgttgacactatgagctaagggttggcttttgtaattacctgaatctgaaaggaatgcctaaggttaccttggggtttctcttctggtgagatagggttcctggtttgagtaagttaatgtcctggatatttcttgtggcagggggtggtcaaagagcctgattgctgacccagtctcaggcctgtggtcgatgacctctcggtagtttcaaagggggctggagggggatatttgacttgttttttcgaaatgtagccttctaaccctcaagtctttagaagctgggtggactcttagtggtcctgcagcgtatcctaaaagactacctttgaaacaggattcttgtatggccaggatcctgtctgggaaccagaaaccctacaccctccccctccaggaatgctgagttccagttttgagcagaggtgaggcagaatccactgtagccttccgccctggtatttggggggatgaccagcccaggcgttgggtgttagtctgcatgagtttgtgagaggaaatagctgggtgtcctggcagtgcccttgaagttggttaggaccttcctgtaaactcttgcccctacttctaactactctataaatatatacatatatttatatataaagtgattagttgaactggcatcctgctttagcctgagacttgccataagaaactgctgagtacttggcaaaccctttcatagttttgttctccatctgtttggggtaggtgttgagcgaggcaaatggatctcgatatttcagatgggcttttgatgcactgttgccaaggaaggctttttctgattttttgacaaatgaatttttgcacactttcattggtgtctttcggcaacttacacacattgaaaatgagctattgtacatatttttatattctctttataaatgcatgtctgattgtacttgtaacaatattgtaatgaacggctgtgcagtaggcccagcgctgctgtgtctcgtcagaggaatagcttaccacgaacccctcagcatactgggaatctcttcctgaacaacgaatgtaaatttggtcaagtctactcttccgttcattcaattattttaagcatttgaattatttattgtatatcctaaatatatttctcctttggcagtgactagatttccactaatgtgtcttaatctatccctccagctggcagttactgtttttttaatcccctgaagttgtcctgtaggagacagaaattctttgctgtctgtatcccttggagtaagaaggtagtggcatgggtggagtgtgtgttctttctccaaatctattatgatgtttattaaacacttctgtagcaaagatggtggtagttcttttgttactgaagttgcccttcaccatggctatttgaaaaggagatgtacttggacgtttctgtaaatcttgagataaactgtttggagatttaaccacctctctgatgggggaccaactctatggaaattgtaaatacgttttatttataaacctggcactgtattcaataaacatttctgcagcctttcatctctaa

SEQ ID NO: 316539 - DNA, 4230 bp, Homo sapiens
aaagggaacacaagctggcgctcacggatccttaattaaattaatcctccccccccccgggcagtggtgctgggagtgtcgtggacgccgtgccgttactcgtagtcaggcggcggcgcaggcggcggcggcggcatagcgcacagcgcgccttagcagcagcagcagcagcagcagcatcggaggtacccccgccgtcgcagcccccgcgctggtgcagccaccctcgctccctctgctcttcctcccttcgctcgcaccatggctgatcagctgaccgaagaacagattgctgaattcaaggaagccttctccctatttgataaagatggcgatggcaccatcacaacaaaggaacttggaactgtcatgaggtcactgggtcagaacccaacagaagctgaattgcaggatatgatcaatgaagtggatgctgatggtaatggcaccattgacttccccgaatttttgactatgatggctagaaaaatgaaagatacagatagtgaagaagaaatccgtgaggcattccgagtctttgacaaggatggcaatggttatatcagtgcagcagaactacgtcacgtcatgacaaacttaggagaaaaactaacagatgaagaagtagatgaaatgatcagagaagcagatattgatggagacggacaagtcaactatgaagaattcgtacagatgatgactgcaaaatgaagacctactttcaactcctttttcccccctctagaagaatcaaattgaatcttttacttacctcttgcaaaaaaaagaaaaaagaaaaaagttcatttattcattctgtttctatatagcaaaactgaatgtcaaaagtaccttctgtccacacacacaaaatctgcatgtattggttggtggtcctgtcccctaaagatcaagctacacatcagttttacaatataaatacttgtactaccttaatgataaggactccttaaagttccatttgctaatgattaatacactgtttgggctggccagtttttcatgcatgcagcttgacgattgagcacagtcaggcctttgtattaaaaatgaaaaatgaaaaaacaaattcaaaacctattcaaatgggttctagttcaatttgtttagtataaattgtcatagctggtttactgaaaacaaacacatttaaaattggtttacctcaggatgacgtgcagaaaaatgggtgaaggataaaccgttgagacgtggccccactggtaggatggtcctcttgtacttcgtgtgctccgacccatggtgacgatgacacaccctggtggcatgcccgtgtatgttggtttagcgttgtctgcattgttctagagtgaaacaggtgtcaggctgtcactgttcacacaaatttttaataagaaacatttaccaagggagcatctttggactctctgtttttaaaaccttctgaaccatgacttggagccggcagagtaggctgtggctgtggacttcagcacaaccatcaacattgctgttcaaagaaattacagtttacgtccattccaagttgtaaatgctagtcttttttttttttttttccaataaaaagaccattaacttaaagtggtgttaaatgctttgtaaagctgagatctaaatggggacaaggcaggtggaggggaggccagtgtacatgtaaatgcccacagcccagcattgggtttccctcccaaggccccagcaccaacctctgagcccaagaccttgcctgaaaacaagcagataccgattgcttcatcctatttatggacatgtaggtctagttgcattttcactggggggaggggggaaggtgaattatggtaacttttaatgatctattcaggcagtagagctcttaaggaaaaaaaaaacccactttctctcaagcatgtatttaggggttgttctcaattgtgctgctgattacctgtcttatgtaactacttgagaccatctgcaagagacatgatttagtgtgtctgtaattcaatcttcgctgtgtgtggtagaagcagtagtcacttttgtaagccagtctcttcatgcctaaaagacactaccagtcacctttgattcgcgacttttttttttttttttcccaagttgacttgactttgcttttttccccccaagtagaactaatgctagcttccagcttgaaagtaaaactccagtgtggagtgaattttgtgtctaattataaacctgtaaccaaaactcagacatctggtactggtctttgcattgagattggtccctgtaaaaccccctttaaaagcatattgcatttagtacagagctcttttttgaaatgaaggctggagatgtgcatttttcacggtgttaactggttgtatcttattagcaaggagattggggttttgagtgtttgcgtgggtggtttcaatttgccagggaacagtggcaggctgctagcaaggcagtgagaagctcttggcagccaaatgggtgcattcagggctgatttatagagacccttggcttctccttctcctactccctgtctttctggcattttgtagcttgttagattttctgccagaggggtgggtcagagcagtggaggggagacatcgcccatgtgcttctgctactggtccttgggctgggtggttggtagaggagatgttgacactatgagctaagggttggcttttgtaattacctgaatctgaaaggaatgcctaaggttaccttggggtttctcttctggtgagatagggttcctggtttgagtaagttaatgtcctggatatttcttgtggcagggggtggtcaaagagcctgattgctgacccagtctcaggcctgtggtcgatgacctctcggtagtttcaaagggggctggagggggatatttgacttgttttttcgaaatgtagccttctaaccctcaagtctttagaagctgggtggactcttagtggtcctgcagcgtatcctaaaagactacctttgaaacaggattcttgtatggccaggatcctgtctgggaaccagaaaccctacaccctccccctccaggaatgctgagttccagttttgagcagaggtgaggcagaatccactgtagccttccgccctggtatttggggggatgaccagcccaggcgttgggtgttagtctgcatgagtttgtgagaggaaatagctgggtgtcctggcagtgcccttgaagttggttaggaccttcctgtaaactcttgcccctacttctaactactctataaatatatacatatatttatatataaagtgattagttgaactggcatcctgctttagcctgagacttgccataagaaactgctgagtacttggcaaaccctttcatagttttgttctccatctgtttggggtaggtgttgagcgaggcaaatggatctcgatatttcagatgggcttttgatgcactgttgccaaggaaggctttttctgattttttgacaaatgaatttttgcacactttcattggtgtctttcggcaacttacacacattgaaaatgagctattgtacatatttttatattctctttataaatgcatgtctgattgtacttgtaacaatattgtaatgaacggctgtgcagtaggcccagcgctgctgtgtctcgtcagaggaatagcttaccacgaacccctcagcatactgggaatctcttcctgaacaacgaatgtaaatttggtcaagtctactcttccgttcattcaattattttaagcatttgaattatttattgtatatcctaaatatatttctcctttggcagtgactagatttccactaatgtgtcttaatctatccctccagctggcagttactgtttttttaatcccctgaagttgtcctgtaggagacagaaattctttgctgtctgtatcccttggagtaagaaggtagtggcatgggtggagtgtgtgttctttctccaaatctattatgatgtttattaaacacttctgtagcaaagatggtggtagttcttttgttactgaagttgcccttcaccatggctatttgaaaaggagatgtacttggacgtttctgtaaatcttgagataaactgtttggagatttaaccacctctctgatgggggaccaactctatggaaattgtaaatacgttttatttataaacctggcactgtattcaataaacatttctgcagcctttcatctctaa

SEQ ID NO: 316540 - DNA, 4654 bp, Homo sapiens
aaagggaacacaagctggcgctcacggatccttaattaaattaatcctccccccccccgggcagtggtgctgggagtgtcgtggacgccgtgccgttactcgtagtcaggcggcggcgcaggcggcggcggcggcatagcgcacagcgcgccttagcagcagcagcagcagcagcagcatcggaggtacccccgccgtcgcagcccccgcgctggtgcagccaccctcgctccctctgctcttcctcccttcgctcgcaccatggctgatcagctgaccgaagaacagattgctgaattcaaggaagccttctccctatttgataaagatggcgatggcaccatcacaacaaaggaacttggaactgtcatgaggtcactgggtcagaacccaacagaagctgaattgcaggatatgatcaatgaagtggatgctgatggtaatggcaccattgacttccccgaatttttgactatgatggctagaaaaatgaaagatacagatagtgaagaagaaatccgtgaggcattccgagtctttgacaaggatggcaatggttatatcagtgcagcagaactacgtcacgtcatgacaaacttaggagaaaaactaacagatgaagaagtagatgaaatgatcagagaagcagatattgatggagacggacaagtcaactatgaagaattcgtacagatgatgactgcaaaatgaagacctactttcaactcctttttcccccctctagaagaatcaaattgaatcttttacttacctcttgcaaaaaaaagaaaaaagaaaaaagttcatttattcattctgtttctatatagcaaaactgaatgtcaaaagtaccttctgtccacacacacaaaatctgcatgtattggttggtggtcctgtcccctaaagatcaagctacacatcagttttacaatataaatacttgtactaccttaatgataaggactccttaaagttccatttgctaatgattaatacactgtttgggctggccagtttttcatgcatgcagcttgacgattgagcacagtcaggcctttgtattaaaaatgaaaaatgaaaaaacaaattcaaaacctattcaaatgggttctagttcaatttgtttagtataaattgtcatagctggtttactgaaaacaaacacatttaaaattggtttacctcaggatgacgtgcagaaaaatgggtgaaggataaaccgttgagacgtggccccactggtaggatggtcctcttgtacttcgtgtgctccgacccatggtgacgatgacacaccctggtggcatgcccgtgtatgttggtttagcgttgtctgcattgttctagagtgaaacaggtgtcaggctgtcactgttcacacaaatttttaataagaaacatttaccaagggagcatctttggactctctgtttttaaaaccttctgaaccatgacttggagccggcagagtaggctgtggctgtggacttcagcacaaccatcaacattgctgttcaaagaaattacagtttacgtccattccaagttgtaaatgctagtcttttttttttttttttccaataaaaagaccattaacttaaagtggtgttaaatgctttgtaaagctgagatctaaatggggacaaggcaggtggaggggaggccagtgtacatgtaaatgcccacagcccagcattgggtttccctcccaaggccccagcaccaacctctgagcccaagaccttgcctgaaaacaagcagataccgattgcttcatcctatttatggacatgtaggtctagttgcattttcactggggggaggggggaaggtgaattatggtaacttttaatgatctattcaggcagtagagctcttaaggaaaaaaaaaacccactttctctcaagcatgtatttaggggttgttctcaattgtgctgctgattacctgtcttatgtaactacttgagaccatctgcaagagacatgatttagtgtgtctgtaattcaatcttcgctgtgtgtggtagaagcagtagtcacttttgtaagccagtctcttcatgcctaaaagacactaccagtcacctttgattcgcgacttttaatttatgattatacttagcctcctcctcctttttttttttttcccaagttgacttgactttgcttttttccccccaagtagaactaatgctagcttccagcttgaaagtaaaactccagtgtggagtgaattttgtgtctaattataaacctgtaaccaaaactcagacatctggtactggtctttgcattgagattggtccctgtaaaaccccctttaaaagcatattgcatttagtacagagctcttttttgaaatgaaggctggagatgtgcatttttcacggtgttaactggttgtatcttattagcaaggagattggggttttgagtgtttgcgtgggtggtttcaatttgccagggaacagtggcaggctgctagcaaggcagtgagaagctcttggcagccaaatgggtgcattcagggctgatttatagagacccttggcttctccttctcctactccctgtctttctggcattttgtagcttgttagattttctgccagaggggtgggtcagagcagtggaggggagacatcgcccatgtgcttctgctactggtccttgggctgggtggttggtagaggagatgttgacactatgagctaagggttggcttttgtaattacctgaatctgaaaggaatgcctaaggttaccttggggtttctcttctggtgagatagggttcctggtttgagtaagttaatgtcctggatatttcttgtggcagggggtggtcaaagagcctgattgctgacccagtctcaggcctgtggtcgatgacctctcggtagtttcaaagggggctggagggggatatttgacttgttttttcgaaatgtagccttctaaccctcaagtctttagaagctgggtggactcttagtggtcctgcagcgtatcctaaaagactacctttgaaacaggattcttgtatggccaggatcctgtctgggaaccagaaaccctacaccctccccctccaggaatgctgagttccagttttgagcagaggtgaggcagaatccactgtagccttccgccctggtatttggggggatgaccagcccaggcgttgggtgttagtctgcatgagtttgtgagaggaaatagctgggtgtcctggcagtgcccttgaagttggttaggaccttcctgtaaactcttgcccctacttctaactactctataaatatatacatatatttatatataaagtgattagttgaactggcatcctgctttagcctgagacttgccataagaaactgctgagtacttggcaaaccctttcatagttttgttctccatctgtttggggtaggtgttgagcgaggcaaatggatctcgatatttcagatgggcttttgatgcactgttgccaaggaaggctttttctgattttttgacaaatgaatttttgcacactttcattggtgtctttcggcaacttacacacattgaaaatgagctattgtacatatttttatattctctttataaatgcatgtctgattgtacttgtaacaatattgtaatgaacggctgtgcagtaggcccagcgctgctgtgtctcgtcagaggaatagcttaccacgaacccctcagcatactgggaatctcttcctgaacaacgaatgtaaatttggtcaagtctactcttccgttcattcaattattttaagcatttgaattatttattgtatatcctaaatatatttctcctttggcagtgactagatttccactaatgtgtcttaatctatccctccagctggcagttactgtttttttaatcccctgaagttgtcctgtaggagacagaaattctttgctgtctgtatcccttggagtaagaaggtagtggcatgggtggagtgtgtgttctttctccaaatctattatgatgtttattaaacacttctgtagcaaagatggtggtagttcttttgttactgaagttgcccttcaccatggctatttgaaaaggagatgtacttggacgtttctgtaaatcttgagataaactgtttggagatttaaccacctctctgatgggggaccaactctatggaaattgtaaatacgttttatttataaacctggcactgtattcaataaacatttctgcagcctttcatctctaaaaaaaaaaaaaaaaaaaaaaaaaaaaaaaaaaaaaagggggggggggtaaaaaattctcccggggggggcccaagttagcgggtaaccgagtttttgtggacaaggggggccccaatatagaggaggaggcgaatattatataagacctgaagccaggggcgccagctctattaaacaacgccgggacggcgggaacacacgtgtctagtggggactccttgtggagaaggaccccactaccctgggggcggcgaacattttgtggggacaactctcctaaggagaatttaaagggctggaggaactatcacagttaacgtgatgtgggtgtttaaaccagaggtattatcgtgagatgagaattgctacgggcagtgattcaaaattttcgg

SEQ ID NO: 316541 - DNA, 4416 bp, Homo sapiens
aaagggaacacaagctggcgctcacggatccttaattaaattaatcctccccccccccgggcagtggtgctgggagtgtcgtggacgccgtgccgttactcgtagtcaggcggcggcgcaggcggcggcggcggcatagcgcacagcgcgccttagcagcagcagcagcagcagcagcatcggaggtacccccgccgtcgcagcccccgcgctggtgcagccaccctcgctccctctgctcttcctcccttcgctcgcaccatggctgatcagctgaccgaagaacagattgctgaattcaaggaagccttctccctatttgataaagatggcgatggcaccatcacaacaaaggaacttggaactgtcatgaggtcactgggtcagaacccaacagaagctgaattgcaggatatgatcaatgaagtggatgctgatggtaatggcaccattgacttccccgaatttttgactatgatggctagaaaaatgaaagatacagatagtgaagaagaaatccgtgaggcattccgagtctttgacaaggatggcaatggttatatcagtgcagcagaactacgtcacgtcatgacaaacttaggagaaaaactaacagatgaagaagtagatgaaatgatcagagaagcagatattgatggagacggacaagtcaactatgaagaattcgtacagatgatgactgcaaaatgaagacctactttcaactcctttttcccccctctagaagaatcaaattgaatcttttacttacctcttgcaaaaaaaagaaaaaagaaaaaagttcatttattcattctgtttctatatagcaaaactgaatgtcaaaagtaccttctgtccacacacacaaaatctgcatgtattggttggtggtcctgtcccctaaagatcaagctacacatcagttttacaatataaatacttgtactaccttaatgataaggactccttaaagttccatttgctaatgattaatacactgtttgggctggccagtttttcatgcatgcagcttgacgattgagcacagtcaggcctttgtattaaaaatgaaaaatgaaaaaacaaattcaaaacctattcaaatgggttctagttcaatttgtttagtataaattgtcatagctggtttactgaaaacaaacacatttaaaattggtttacctcaggatgacgtgcagaaaaatgggtgaaggataaaccgttgagacgtggccccactggtaggatggtcctcttgtacttcgtgtgctccgacccatggtgacgatgacacaccctggtggcatgcccgtgtatgttggtttagcgttgtctgcattgttctagagtgaaacaggtgtcaggctgtcactgttcacacaaatttttaataagaaacatttaccaagggagcatctttggactctctgtttttaaaaccttctgaaccatgacttggagccggcagagtaggctgtggctgtggacttcagcacaaccatcaacattgctgttcaaagaaattacagtttacgtccattccaagttgtaaatgctagtcttttttttttttttttccaataaaaagaccattaacttaaagtggtgttaaatgctttgtaaagctgagatctaaatggggacaaggcaggtggaggggaggccagtgtacatgtaaatgcccacagcccagcattgggtttccctcccaaggccccagcaccaacctctgagcccaagaccttgcctgaaaacaagcagataccgattgcttcatcctatttatggacatgtaggtctagttgcattttcactggggggaggggggaaggtgaattatggtaacttttaatgatctattcaggcagtagagctcttaaggaaaaaaaaaacccactttctctcaagcatgtatttaggggttgttctcaattgtgctgctgattacctgtcttatgtaactacttgagaccatctgcaagagacatgatttagtgtgtctgtaattcaatcttcgctgtgtgtggtagaagcagtagtcacttttgtaagccagtctcttcatgcctaaaagacactaccagtcacctttgattcgcgacttttaatttatgattatacttagcctcctcctcctttttttttttttcccaagttgacttgactttgcttttttccccccaagtagaactaatgctagcttccagcttgaaagtaaaactccagtgtggagtgaattttgtgtctaattataaacctgtaaccaaaactcagacatctggtactggtctttgcattgagattggtccctgtaaaaccccctttaaaagcatattgcatttagtacagagctcttttttgaaatgaaggctggagatgtgcatttttcacggtgttaactggttgtatcttattagcaaggagattggggttttgagtgtttgcgtgggtggtttcaatttgccagggaacagtggcaggctgctagcaaggcagtgagaagctcttggcagccaaatgggtgcattcagggctgatttatagagacccttggcttctccttctcctactccctgtctttctggcattttgtagcttgttagattttctgccagaggggtgggtcagagcagtggaggggagacatcgcccatgtgcttctgctactggtccttgggctgggtggttggtagaggagatgttgacactatgagctaagggttggcttttgtaattacctgaatctgaaaggaatgcctaaggttaccttggggtttctcttctggtgagatagggttcctggtttgagtaagttaatgtcctggatatttcttgtggcagggggtggtcaaagagcctgattgctgacccagtctcaggcctgtggtcgatgacctctcggtagtttcaaagggggctggagggggatatttgacttgttttttcgaaatgtagccttctaaccctcaagtctttagaagctgggtggactcttagtggtcctgcagcgtatcctaaaagactacctttgaaacaggattcttgtatggccaggatcctgtctgggaaccagaaaccctacaccctccccctccaggaatgctgagttccagttttgagcagaggtgaggcagaatccactgtagccttccgccctggtatttggggggatgaccagcccaggcgttgggtgttagtctgcatgagtttgtgagaggaaatagctgggtgtcctggcagtgcccttgaagttggttaggaccttcctgtaaactcttgcccctacttctaactactctataaatatatacatatatttatatataaagtgattagttgaactggcatcctgctttagcctgagacttgccataagaaactgctgagtacttggcaaaccctttcatagttttgttctccatctgtttggggtaggtgttgagcgaggcaaatggatctcgatatttcagatgggcttttgatgcactgttgccaaggaaggctttttctgattttttgacaaatgaatttttgcacactttcattggtgtctttcggcaacttacacacattgaaaatgagctattgtacatatttttatattctctttataaatgcatgtctgattgtacttgtaacaatattgtaatgaacggctgtgcagtaggcccagcgctgctgtgtctcgtcagaggaatagcttaccacgaacccctcagcatactgggaatctcttcctgaacaacgaatgtaaatttggtcaagtctactcttccgttcattcaattattttaagcatttgaattatttattgtatatcctaaatatatttctcctttggcagtgactagatttccactaatgtgtcttaatctatccctccagctggcagttactgtttttttaatcccctgaagttgtcctgtaggagacagaaattctttgctgtctgtatcccttggagtaagaaggtagtggcatgggtggagtgtgtgttctttctccaaatctattatgatgtttattaaacacttctgtagcaaagatggtggtagttcttttgttactgaagttgcccttcaccatggctatttgaaaaggagatgtacttggacgtttctgtaaatcttgagataaactgtttggagatttaaccacctctctgatgggggaccaactctatggaaattgtaaatacgttttatttataaacctggcactgtattcaataaacatttctgcagcctttcatctctaaaacaaaactactacttaaccacccctattgccctaatatcccttccacatatcccactttccttcgaggggtccccttacccaactcccttataataagttcttttcaattcttgccctacttttaaaatgtcggctttgtaaaacccctggtaa

SEQ ID NO: 316542 - DNA, 4045 bp, Homo sapiens
aaagggaacacaagctggcgctcacggatccttaattaaattaatcctccccccccccgggcagtggtgctgggagtgtcgtggacgccgtgccgttactcgtagtcaggcggcggcgcaggcggcggcggcggcatagcgcacagcgcgccttagcagcagcagcagcagcagcagcatcggaggtacccccgccgtcgcagcccccgcgctggtgcagccaccctcgctccctctgctcttcctcccttcgctcgcaccatggctgatcagctgaccgaagaacagattgctgaattcaaggaagccttctccctatttgataaagatggcgatggcaccatcacaacaaaggaacttggaactgtcatgaggtcactgggtcagaacccaacagaagctgaattgcaggatatgatcaatgaagtggatgctgatggtaatggcaccattgacttccccgaatttttgactatgatggctagaaaaatgaaagatacagatagtgaagaagaaatccgtgaggcattccgagtctttgacaaggatggcaatggttatatcagtgcagcagaactacgtcacgtcatgacaaacttaggagaaaaactaacagatgaagaagtagatgaaatgatcagagaagcagatattgatggagacggacaagtcaactatgaagaattcgtacagatgatgactgcaaaatgaagacctactttcaactcctttttcccccctctagaagaatcaaattgaatcttttacttacctcttgcaaaaaaaagaaaaaagaaaaaagttcatttattcattctgtttctatatagcaaaactgaatgtcaaaagtaccttctgtccacacacacaaaatctgcatgtattggttggtggtcctgtcccctaaagatcaagctacacatcagttttacaatataaatacttgtactaccttaatgataaggactccttaaagttccatttgctaatgattaatacactgtttgggctggccagtttttcatgcatgcagcttgacgattgagcacagtcaggcctttgtattaaaaatgaaaaatgaaaaaacaaattcaaaacctattcaaatgggttctagttcaatttgtttagtataaattgtcatagctggtttactgaaaacaaacacatttaaaattggtttacctcaggatgacgtgcagaaaaatgggtgaaggataaaccgttgagacgtggccccactggtaggatggtcctcttgtacttcgtgtgctccgacccatggtgacgatgacacaccctggtggcatgcccgtgtatgttggtttagcgttgtctgcattgttctagagtgaaacaggtgtcaggctgtcactgttcacacaaatttttaataagaaacatttaccaagggagcatctttggactctctgtttttaaaaccttctgaaccatgacttggagccggcagagtaggctgtggctgtggacttcagcacaaccatcaacattgctgttcaaagaaattacagtttacgtccattccaagttgtaaatgctagtcttttttttttttttttccaataaaaagaccattaacttaaagtggtgttaaatgctttgtaaagctgagatctaaatggggacaaggcaggtggaggggaggccagtgtacatgtaaatgcccacagcccagcattgggtttccctcccaaggccccagcaccaacctctgagcccaagaccttgcctgaaaacaagcagataccgattgcttcatcctatttatggacatgtaggtctagttgcattttcactggggggaggggggaaggtgaattatggtaacttttaatgatctattcaggcagtagagctcttaaggaaaaaaaaaacccactttctctcaagcatgtatttaggggttgttctcaattgtgctgctgattacctgtcttatgtaactacttgagaccatctgcaagagacatgatttagtgtgtctgtaattcaatcttcgctgtgtgtggtagaagcagtagtcacttttgtaagccagtctcttcatgcctaaaagacactaccagtcacctttgattcgcgacttttaatttatgattatacttagcctcctcctcctttttttttttttcccaagttgacttgactttgcttttttccccccaagtagaactaatgctagcttccagcttgaaagtaaaactccagtgtggagtgaattttgtgtctaattataaacctgtaaccaaaactcagacatctggtactggtctttgcattgagattggtccctgtaaaaccccctttaaaagcatattgcatttagtacagagctcttttttgaaatgaaggctggagatgtgcatttttcacggtgttaactggttgtatcttattagcaaggagattggggttttgagtgtttgcgtgggtggtttcaatttgccagggaacagtggcaggctgctagcaaggcagtgagaagctcttggcagccaaatgggtgcattcagggctgatttatagagacccttggcttctccttctcctactccctgtctttctggcattttgtagcttgttagattttctgccagaggggtgggtcagagcagtggaggggagacatcgcccatgtgcttctgctactggtccttgggctgggtggttggtagaggagatgttgacactatgagctaagggttggcttttgtaattacctgaatctgaaaggaatgcctaaggttaccttggggtttctcttctggtgagatagggttcctggtttgagtaagttaatgtcctggatatttcttgtggcagggggtggtcaaagagcctgattgctgacccagtctcaggcctgtggtcgatgacctctcggtagtttcaaagggggctggagggggatatttgacttgttttttcgaaatgtagccttctaaccctcaagtctttagaagctgggtggactcttagtggtcctgcagcgtatcctaaaagactacctttgaaacaggattcttgtatggccaggatcctgtctgggaaccagaaaccctacaccctccccctccaggaatgctgagttccagttttgagcagaggtgaggcagaatccactgtagccttccgccctggtatttggggggatgaccagcccaggcgttgggtgttagtctgcatgagtttgtgagaggaaatagctgggtgtcctggcagtgcccttgaagttggttaggaccttcctgtaaactcttgcccctacttctaactactctataaatatatacatatatttatatataaagtgattagttgaactggcatcctgctttagcctgagacttgccataagaaactgctgagtacttggcaaaccctttcatagttttgttctccatctgtttggggtaggtgttgagcgaggcaaatggatctcgatatttcagatgggcttttgatgcactgttgccaaggaaggctttttctgattttttgacaaatgaatttttgcacactttcattggtgtctttcggcaacttacacacattgaaaatgagctattgtacatatttttatattctctttataaatgcatgtctgattgtacttgtaacaatattgtaatgaacggctgtgcagtaggcccagcgctgctgtgtctcgtcagaggaatagcttaccacgaacccctcagcatactgggaatctcttcctgaacaacgaatgtaaatttggtcaagtctactcttccgttcattcaattattttaagcatttgaattatttattgtatatcctaaatatatttctcctttggcagtgactagatttccactaatgtgtcttaatctatccctccagctggcagttactgtttttttaatcccctgaagttgtcctgtaggagacagaaattctttgctgtctgtatcccttggagtaagaaggtagtggcatgggtggagtgtgtgttctttctccaaatctattatgatgtttattaaacacttctgtagca

SEQ ID NO: 316543 - DNA, 3971 bp, Homo sapiens
  misc_feature (3903)..(3903): n is a, c, g, or t
  misc_feature (3949)..(3949): n is a, c, g, or t
aaagggaacacaagctggcgctcacggatccttaattaaattaatcctccccccccccgggcagtggtgctgggagtgtcgtggacgccgtgccgttactcgtagtcaggcggcggcgcaggcggcggcggcggcatagcgcacagcgcgccttagcagcagcagcagcagcagcagcatcggaggtacccccgccgtcgcagcccccgcgctggtgcagccaccctcgctccctctgctcttcctcccttcgctcgcaccatggctgatcagctgaccgaagaacagattgctgaattcaaggaagccttctccctatttgataaagatggcgatggcaccatcacaacaaaggaacttggaactgtcatgaggtcactgggtcagaacccaacagaagctgaattgcaggatatgatcaatgaagtggatgctgatggtaatggcaccattgacttccccgaatttttgactatgatggctagaaaaatgaaagatacagatagtgaagaagaaatccgtgaggcattccgagtctttgacaaggatggcaatggttatatcagtgcagcagaactacgtcacgtcatgacaaacttaggagaaaaactaacagatgaagaagtagatgaaatgatcagagaagcagatattgatggagacggacaagtcaactatgaagaattcgtacagatgatgactgcaaaatgaagacctactttcaactcctttttcccccctctagaagaatcaaattgaatcttttacttacctcttgcaaaaaaaagaaaaaagaaaaaagttcatttattcattctgtttctatatagcaaaactgaatgtcaaaagtaccttctgtccacacacacaaaatctgcatgtattggttggtggtcctgtcccctaaagatcaagctacacatcagttttacaatataaatacttgtactaccttaatgataaggactccttaaagttccatttgctaatgattaatacactgtttgggctggccagtttttcatgcatgcagcttgacgattgagcacagtcaggcctttgtattaaaaatgaaaaatgaaaaaacaaattcaaaacctattcaaatgggttctagttcaatttgtttagtataaattgtcatagctggtttactgaaaacaaacacatttaaaattggtttacctcaggatgacgtgcagaaaaatgggtgaaggataaaccgttgagacgtggccccactggtaggatggtcctcttgtacttcgtgtgctccgacccatggtgacgatgacacaccctggtggcatgcccgtgtatgttggtttagcgttgtctgcattgttctagagtgaaacaggtgtcaggctgtcactgttcacacaaatttttaataagaaacatttaccaagggagcatctttggactctctgtttttaaaaccttctgaaccatgacttggagccggcagagtaggctgtggctgtggacttcagcacaaccatcaacattgctgttcaaagaaattacagtttacgtccattccaagttgtaaatgctagtcttttttttttttttttccaataaaaagaccattaacttaaagtggtgttaaatgctttgtaaagctgagatctaaatggggacaaggcaggtggaggggaggccagtgtacatgtaaatgcccacagcccagcattgggtttccctcccaaggccccagcaccaacctctgagcccaagaccttgcctgaaaacaagcagataccgattgcttcatcctatttatggacatgtaggtctagttgcattttcactggggggaggggggaaggtgaattatggtaacttttaatgatctattcaggcagtagagctcttaaggaaaaaaaaaacccactttctctcaagcatgtatttaggggttgttctcaattgtgctgctgattacctgtcttatgtaactacttgagaccatctgcaagagacatgatttagtgtgtctgtaattcaatcttcgctgtgtgtggtagaagcagtagtcacttttgtaagccagtctcttcatgcctaaaagacactaccagtcacctttgattcgcgacttttaatttatgattatacttagcctcctcctcctttttttttttttcccaagttgacttgactttgcttttttccccccaagtagaactaatgctagcttccagcttgaaagtaaaactccagtgtggagtgaattttgtgtctaattataaacctgtaaccaaaactcagacatctggtactggtctttgcattgagattggtccctgtaaaaccccctttaaaagcatattgcatttagtacagagctcttttttgaaatgaaggctggagatgtgcatttttcacggtgttaactggttgtatcttattagcaaggagattggggttttgagtgtttgcgtgggtggtttcaatttgccagggaacagtggcaggctgctagcaaggcagtgagaagctcttggcagccaaatgggtgcattcagggctgatttatagagacccttggcttctccttctcctactccctgtctttctggcattttgtagcttgttagattttctgccagaggggtgggtcagagcagtggaggggagacatcgcccatgtgcttctgctactggtccttgggctgggtggttggtagaggagatgttgacactatgagctaagggttggcttttgtaattacctgaatctgaaaggaatgcctaaggttaccttggggtttctcttctggtgagatagggttcctggtttgagtaagttaatgtcctggatatttcttgtggcagggggtggtcaaagagcctgattgctgacccagtctcaggcctgtggtcgatgacctctcggtagtttcaaagggggctggagggggatatttgacttgttttttcgaaatgtagccttctaaccctcaagtctttagaagctgggtggactcttagtggtcctgcagcgtatcctaaaagactacctttgaaacaggattcttgtatggccaggatcctgtctgggaaccagaaaccctacaccctccccctccaggaatgctgagttccagttttgagcagaggtgaggcagaatccactgtagccttccgccctggtatttggggggatgaccagcccaggcgttgggtgttagtctgcatgagtttgtgagaggaaatagctgggtgtcctggcagtgcccttgaagttggttaggaccttcctgtaaactcttgcccctacttctaactactctataaatatatacatatatttatatataaagtgattagttgaactggcatcctgctttagcctgagacttgccataagaaactgctgagtacttggcaaaccctttcatagttttgttctccatctgtttggggtaggtgttgagcgaggcaaatggatctcgatatttcagatgggcttttgatgcactgttgccaaggaaggctttttctgattttttgacaaatgaatttttgcacactttcattggtgtctttcggcaacttacacacattgaaaatgagctattgtacatatttttatattctctttataaatgcatgtctgattgtacttgtaacaatattgtaatgaacggctgtgcagtaggcccagcgctgctgtgtctcgtcagaggaatagcttaccacgaacccctcagcatactgggaatctcttcctgaacaacgaatgtaaatttggtcaagtctactcttccgttcattcaattattttaagcatttgaattatttattgtatatcctaaatatatttctcctttggcagtgactagatttccactaatgtgtcttaatctatccctccagctggcacctgatttngtatccccctgtagcagcattactgaaatacataggcttatatacnatgcttctttcctgtatattct

SEQ ID NO: 316544 - DNA, 4314 bp, Homo sapiens
cgcaaagtttctgctccgggaggaggcggcggcgccgcgggctcgtcgcctgggggagcagaagcgggtgggaggtgcgggtggccttggcctcagccctggtgcgcgggggccgggggtggtgaccctcctggccgaggaggggcggcgtccagacgcccgctcgggggccgccttcccccccacgcctgcccccgggcacgcgccctgcccggtccctcgccccgcgccacttccagtccgcagagagatgccctccacgtttctgctttctctgcagcctctagattgccagatgcgactgtgcgcctcgctgggctgatcagctgaccgaagaacagattgctgaattcaaggaagccttctccctatttgataaagatggcgatggcaccatcacaacaaaggaacttggaactgtcatgaggtcactgggtcagaacccaacagaagctgaattgcaggatatgatcaatgaagtggatgctgatggtaatggcaccattgacttccccgaatttttgactatgatggctagaaaaatgaaagatacagatagtgaagaagaaatccgtgaggcattccgagtctttgacaaggatggcaatggttatatcagtgcagcagaactacgtcacgtcatgacaaacttaggagaaaaactaacagatgaagaagtagatgaaatgatcagagaagcagatattgatggagacggacaagtcaactatgaagaattcgtacagatgatgactgcaaaatgaagacctactttcaactcctttttcccccctctagaagaatcaaattgaatcttttacttacctcttgcaaaaaaaagaaaaaagaaaaaagttcatttattcattctgtttctatatagcaaaactgaatgtcaaaagtaccttctgtccacacacacaaaatctgcatgtattggttggtggtcctgtcccctaaagatcaagctacacatcagttttacaatataaatacttgtactaccttaatgataaggactccttaaagttccatttgctaatgattaatacactgtttgggctggccagtttttcatgcatgcagcttgacgattgagcacagtcaggcctttgtattaaaaatgaaaaatgaaaaaacaaattcaaaacctattcaaatgggttctagttcaatttgtttagtataaattgtcatagctggtttactgaaaacaaacacatttaaaattggtttacctcaggatgacgtgcagaaaaatgggtgaaggataaaccgttgagacgtggccccactggtaggatggtcctcttgtacttcgtgtgctccgacccatggtgacgatgacacaccctggtggcatgcccgtgtatgttggtttagcgttgtctgcattgttctagagtgaaacaggtgtcaggctgtcactgttcacacaaatttttaataagaaacatttaccaagggagcatctttggactctctgtttttaaaaccttctgaaccatgacttggagccggcagagtaggctgtggctgtggacttcagcacaaccatcaacattgctgttcaaagaaattacagtttacgtccattccaagttgtaaatgctagtcttttttttttttttttccaataaaaagaccattaacttaaagtggtgttaaatgctttgtaaagctgagatctaaatggggacaaggcaggtggaggggaggccagtgtacatgtaaatgcccacagcccagcattgggtttccctcccaaggccccagcaccaacctctgagcccaagaccttgcctgaaaacaagcagataccgattgcttcatcctatttatggacatgtaggtctagttgcattttcactggggggaggggggaaggtgaattatggtaacttttaatgatctattcaggcagtagagctcttaaggaaaaaaaaaacccactttctctcaagcatgtatttaggggttgttctcaattgtgctgctgattacctgtcttatgtaactacttgagaccatctgcaagagacatgatttagtgtgtctgtaattcaatcttcgctgtgtgtggtagaagcagtagtcacttttgtaagccagtctcttcatgcctaaaagacactaccagtcacctttgattcgcgacttttaatttatgattatacttagcctcctcctcctttttttttttttcccaagttgacttgactttgcttttttccccccaagtagaactaatgctagcttccagcttgaaagtaaaactccagtgtggagtgaattttgtgtctaattataaacctgtaaccaaaactcagacatctggtactggtctttgcattgagattggtccctgtaaaaccccctttaaaagcatattgcatttagtacagagctcttttttgaaatgaaggctggagatgtgcatttttcacggtgttaactggttgtatcttattagcaaggagattggggttttgagtgtttgcgtgggtggtttcaatttgccagggaacagtggcaggctgctagcaaggcagtgagaagctcttggcagccaaatgggtgcattcagggctgatttatagagacccttggcttctccttctcctactccctgtctttctggcattttgtagcttgttagattttctgccagaggggtgggtcagagcagtggaggggagacatcgcccatgtgcttctgctactggtccttgggctgggtggttggtagaggagatgttgacactatgagctaagggttggcttttgtaattacctgaatctgaaaggaatgcctaaggttaccttggggtttctcttctggtgagatagggttcctggtttgagtaagttaatgtcctggatatttcttgtggcagggggtggtcaaagagcctgattgctgacccagtctcaggcctgtggtcgatgacctctcggtagtttcaaagggggctggagggggatatttgacttgttttttcgaaatgtagccttctaaccctcaagtctttagaagctgggtggactcttagtggtcctgcagcgtatcctaaaagactacctttgaaacaggattcttgtatggccaggatcctgtctgggaaccagaaaccctacaccctccccctccaggaatgctgagttccagttttgagcagaggtgaggcagaatccactgtagccttccgccctggtatttggggggatgaccagcccaggcgttgggtgttagtctgcatgagtttgtgagaggaaatagctgggtgtcctggcagtgcccttgaagttggttaggaccttcctgtaaactcttgcccctacttctaactactctataaatatatacatatatttatatataaagtgattagttgaactggcatcctgctttagcctgagacttgccataagaaactgctgagtacttggcaaaccctttcatagttttgttctccatctgtttggggtaggtgttgagcgaggcaaatggatctcgatatttcagatgggcttttgatgcactgttgccaaggaaggctttttctgattttttgacaaatgaatttttgcacactttcattggtgtctttcggcaacttacacacattgaaaatgagctattgtacatatttttatattctctttataaatgcatgtctgattgtacttgtaacaatattgtaatgaacggctgtgcagtaggcccagcgctgctgtgtctcgtcagaggaatagcttaccacgaacccctcagcatactgggaatctcttcctgaacaacgaatgtaaatttggtcaagtctactcttccgttcattcaattattttaagcatttgaattatttattgtatatcctaaatatatttctcctttggcagtgactagatttccactaatgtgtcttaatctatccctccagctggcagttactgtttttttaatcccctgaagttgtcctgtaggagacagaaattctttgctgtctgtatcccttggagtaagaaggtagtggcatgggtggagtgtgtgttctttctccaaatctattatgatgtttattaaacacttctgtagcaaagatggtggtagttcttttgttactgaagttgcccttcaccatggctatttgaaaaggagatgtacttggacgtttctgtaaatcttgagataaactgtttggagatttaaccacctctctgatgggggaccaactctatggaaattgtaaatacgttttatttataaacctggcactgtattcaataaacatttctgcagcctttcatctctaa

SEQ ID NO: 316545 - DNA, 4086 bp, Homo sapiens
cccaggcagtggaagaaatacgactttcactacgacaatgtgctctgggctctgctgacgctgttcacagtgtccacgggagaaggctggctgatcagctgaccgaagaacagattgctgaattcaaggaagccttctccctatttgataaagatggcgatggcaccatcacaacaaaggaacttggaactgtcatgaggtcactgggtcagaacccaacagaagctgaattgcaggatatgatcaatgaagtggatgctgatggtaatggcaccattgacttccccgaatttttgactatgatggctagaaaaatgaaagatacagatagtgaagaagaaatccgtgaggcattccgagtctttgacaaggatggcaatggttatatcagtgcagcagaactacgtcacgtcatgacaaacttaggagaaaaactaacagatgaagaagtagatgaaatgatcagagaagcagatattgatggagacggacaagtcaactatgaagaattcgtacagatgatgactgcaaaatgaagacctactttcaactcctttttcccccctctagaagaatcaaattgaatcttttacttacctcttgcaaaaaaaagaaaaaagaaaaaagttcatttattcattctgtttctatatagcaaaactgaatgtcaaaagtaccttctgtccacacacacaaaatctgcatgtattggttggtggtcctgtcccctaaagatcaagctacacatcagttttacaatataaatacttgtactaccttaatgataaggactccttaaagttccatttgctaatgattaatacactgtttgggctggccagtttttcatgcatgcagcttgacgattgagcacagtcaggcctttgtattaaaaatgaaaaatgaaaaaacaaattcaaaacctattcaaatgggttctagttcaatttgtttagtataaattgtcatagctggtttactgaaaacaaacacatttaaaattggtttacctcaggatgacgtgcagaaaaatgggtgaaggataaaccgttgagacgtggccccactggtaggatggtcctcttgtacttcgtgtgctccgacccatggtgacgatgacacaccctggtggcatgcccgtgtatgttggtttagcgttgtctgcattgttctagagtgaaacaggtgtcaggctgtcactgttcacacaaatttttaataagaaacatttaccaagggagcatctttggactctctgtttttaaaaccttctgaaccatgacttggagccggcagagtaggctgtggctgtggacttcagcacaaccatcaacattgctgttcaaagaaattacagtttacgtccattccaagttgtaaatgctagtcttttttttttttttttccaataaaaagaccattaacttaaagtggtgttaaatgctttgtaaagctgagatctaaatggggacaaggcaggtggaggggaggccagtgtacatgtaaatgcccacagcccagcattgggtttccctcccaaggccccagcaccaacctctgagcccaagaccttgcctgaaaacaagcagataccgattgcttcatcctatttatggacatgtaggtctagttgcattttcactggggggaggggggaaggtgaattatggtaacttttaatgatctattcaggcagtagagctcttaaggaaaaaaaaaacccactttctctcaagcatgtatttaggggttgttctcaattgtgctgctgattacctgtcttatgtaactacttgagaccatctgcaagagacatgatttagtgtgtctgtaattcaatcttcgctgtgtgtggtagaagcagtagtcacttttgtaagccagtctcttcatgcctaaaagacactaccagtcacctttgattcgcgacttttaatttatgattatacttagcctcctcctcctttttttttttttcccaagttgacttgactttgcttttttccccccaagtagaactaatgctagcttccagcttgaaagtaaaactccagtgtggagtgaattttgtgtctaattataaacctgtaaccaaaactcagacatctggtactggtctttgcattgagattggtccctgtaaaaccccctttaaaagcatattgcatttagtacagagctcttttttgaaatgaaggctggagatgtgcatttttcacggtgttaactggttgtatcttattagcaaggagattggggttttgagtgtttgcgtgggtggtttcaatttgccagggaacagtggcaggctgctagcaaggcagtgagaagctcttggcagccaaatgggtgcattcagggctgatttatagagacccttggcttctccttctcctactccctgtctttctggcattttgtagcttgttagattttctgccagaggggtgggtcagagcagtggaggggagacatcgcccatgtgcttctgctactggtccttgggctgggtggttggtagaggagatgttgacactatgagctaagggttggcttttgtaattacctgaatctgaaaggaatgcctaaggttaccttggggtttctcttctggtgagatagggttcctggtttgagtaagttaatgtcctggatatttcttgtggcagggggtggtcaaagagcctgattgctgacccagtctcaggcctgtggtcgatgacctctcggtagtttcaaagggggctggagggggatatttgacttgttttttcgaaatgtagccttctaaccctcaagtctttagaagctgggtggactcttagtggtcctgcagcgtatcctaaaagactacctttgaaacaggattcttgtatggccaggatcctgtctgggaaccagaaaccctacaccctccccctccaggaatgctgagttccagttttgagcagaggtgaggcagaatccactgtagccttccgccctggtatttggggggatgaccagcccaggcgttgggtgttagtctgcatgagtttgtgagaggaaatagctgggtgtcctggcagtgcccttgaagttggttaggaccttcctgtaaactcttgcccctacttctaactactctataaatatatacatatatttatatataaagtgattagttgaactggcatcctgctttagcctgagacttgccataagaaactgctgagtacttggcaaaccctttcatagttttgttctccatctgtttggggtaggtgttgagcgaggcaaatggatctcgatatttcagatgggcttttgatgcactgttgccaaggaaggctttttctgattttttgacaaatgaatttttgcacactttcattggtgtctttcggcaacttacacacattgaaaatgagctattgtacatatttttatattctctttataaatgcatgtctgattgtacttgtaacaatattgtaatgaacggctgtgcagtaggcccagcgctgctgtgtctcgtcagaggaatagcttaccacgaacccctcagcatactgggaatctcttcctgaacaacgaatgtaaatttggtcaagtctactcttccgttcattcaattattttaagcatttgaattatttattgtatatcctaaatatatttctcctttggcagtgactagatttccactaatgtgtcttaatctatccctccagctggcagttactgtttttttaatcccctgaagttgtcctgtaggagacagaaattctttgctgtctgtatcccttggagtaagaaggtagtggcatgggtggagtgtgtgttctttctccaaatctattatgatgtttattaaacacttctgtagcaaagatggtggtagttcttttgttactgaagttgcccttcaccatggctatttgaaaaggagatgtacttggacgtttctgtaaatcttgagataaactgtttggagatttaaccacctctctgatgggggaccaactctatggaaattgtaaatacgttttatttataaacctggcactgtattcaataaacatttctgcagcctttcatctctaa

SEQ ID NO: 316546 - DNA, 948 bp, Homo sapiens
taggctagtcgaggcccgtgttaatcggccgaggagcgaagatggcgtcgcccggctgcctgtggctcttggctgtggctctcctgccatggacctgcgcttctcgggcgctgcagcatctggacccgccggcgccgctgccgttggtgatctggcatgggatgggagacagctgttgcaatcccttaagcatgggtgctattaaaaaaatggtggagaagaaaatacctggaatttacgtcttatctttagagattgggaagaccctgatggaggacgtggagaacagcttcttcttgaatgtcaattcccaagtaacaacagtgtgtcaggcacttgctaaggatcctaaattgcagcaaggctacaatgctatgggattctcccagggaggccaatttctgagggcagtggctcagagatgcccttcacctcccatgatcaatctgatctcggttgggggacaacatcaaggtgtttttggactccctcgatgcccaggagagagctctcacatctgtgacttcatccgaaaaacactgaatgctggggcgtactccaaagttgttcaggaacgcctcgtgcaagccgaatactggcatgaccccataaaggaggatgtgtatcgcaaccacagcatcttcttggcagatataaatcaggagcggggtatcaatgagtcctacaagaaaaacctgatggccctgaagaagtttgtgatggtgaaattcctcaatgattccattgtggaccctgtagattcggagtggtttggattttacagaagtggccaagccaaggaaaccattcccttacaggagacctccctgtacacacagacgctggggctaagacctggccatgccggacactatttcttggctacacagggaccttcctttgcttaaaggttttgccctttatcctccggttaccgtttcacacgca

SEQ ID NO: 316547 - DNA, 419 bp, Homo sapiens
gcagctcgtaccccgatatttgtgtttctggctacagaaggggaccatcttcagttgtctgaagaatggttttatgcccacatcataccattccttggatgaaacccgtatagttcacaatagagctcagggagcccctaactcttccaaaccacatgggagacagtttccttcatgcccaagcctgagctcagatccagcttgcaactaatccttctatcatctaacatgccctacttggaaagatctaagatctgaatcttatcctttgccatcttctgttaccatatggtgttgaatgcaagtttaattaccatggagattgttttacaaacttttgatgtggtcaagttcagttttagaaaagggagtctgttccagatcagtgccagaaccacaaatatcggggtgcgagcagc

SEQ ID NO: 316548 - DNA, 2307 bp, Homo sapiens
cggacgcgtgtgtgacacacgcgagaagcgaagatggcgtcgcccggctgcctgtggctcttggctgtggctctcctgccatggacctgcgcttctcgggcgctgcagcatctggacccgccggcgccgctgccgttggtgatctggcatgggatgggagacagctgttgcaatcccttaagcatgggtgctattaaaaaaatggtggagaagaaaatacctggaatttacgtcttatctttagagattgggaagaccctgatggaggacgtggagaacagcttcttcttgaatgtcaattcccaagtaacaacagtgtgtcaggcacttgctaaggatcctaaattgcagcaaggctacaatgctatgggattctcccagggaggccaatttctgagggcagtggctcagagatgcccttcacctcccatgatcaatctgatctcggttgggggacaacatcaaggtgtttttggactccctcgatgcccaggagagagctctcacatctgtgacttcatccgaaaaacactgaatgctggggcgtactccaaagttgttcaggaacgcctcgtgcaagccgaatactggcatgaccccataaaggaggatgtgtatcgcaaccacagcatcttcttggcagatataaatcaggagcggggtatcaatgagtcctacaagaaaaacctgatggccctgaagaagtttgtgatggtgaaattcctcaatgattccattgtggaccctgtagattcggagtggtttggattttacagaagtggccaagccaaggaaaccattcccttacaggagacctccctgtacacacaggaccgcctggggctaaaggaaatggacaatgcaggacagctagtgtttctggctacagaaggggaccatcttcagttgtctgaagaatggttttatgcccacatcataccattccttggatgaaacccgtatagttcacaatagagctcagggagcccctaactcttccaaaccacatgggagacagtttccttcatgcccaagcctgagctcagatccagcttgcaactaatccttctatcatctaacatgccctacttggaaagatctaagatctgaatcttatcctttgccatcttctgttaccatatggtgttgaatgcaagtttaattaccatggagattgttttacaaacttttgatgtggtcaagttcagttttagaaaagggagtctgttccagatcagtgccagaactgtgcccaggcccaaaggagacaactaactaaagtagtgagatagattctaagggcaaacatttttccaagtcttgccatatttcaagcaaagaggtgcccaggcctgaggtactcacataaatgctttgttttgctggtgatttaaccagtgcttggaaaaatcttgcttggctatttctgcatcatttcttaaggctgccttcctctctgagtacgttgccctctgtgctatcaatcatcttatcatcaattattagacaaatcccactggcctacagtcttgcttctgcagcacccactttgtctcctcaggtagtgatgaattagttgctgtcacaaaaggagggaagtagcacccaaattaaattgcttaagagaggaaatgtacatcttgtataacttagggagcgaagaaaatgtaggcgcgaaagtgaaaagtgaggcagctagttcttcctattccattctcgaccaacctgccctttcttaatatgactagtggtcttgatgctagagtcaacttactctgttgctggctttagcagagaataggaggaaccatatgaaaaagatcaggctttctgacttccatccccaaaacacatttaccagcatactccaaactgtttctgatgtgttccatgagaaaaggattgtttgctcaaaaagcttggaaaatactacacactccctttctccttctggagatcaacccacattagagtgtctaaggactcctgagaattcctgttacagtaaacaaaactaacgtaatctaccatttcctacactatttgagcatggaaatcatagtccccactctgtgaaaacttaacgctttttggaagacatttctgtagcatgtcagtttggagaaatgatgagctacgccttgatgaaagaaccgtgttggtgctgctaagtttagccattatggtttttcctttctctctcttaagccttattcttcaactaaaagatgaggattaagagcaagaagttgggggggatgtgaaaataattttatgaggttgtctaaaataaagagtagtttctta

SEQ ID NO: 316549 - DNA, 2376 bp, Homo sapiens
ctaacctaatacaccgggcccttttatgtgtcagcgacaaggcacctgagtgatggccgcacacttccagagccaccgtatgtgcctcgtgccgaagcgaagatggcgtcgcccggctgcctgtggctcttggctgtggctctcctgccatggacctgcgcttctcgggcgctgcagcatctggacccgccggcgccgctgccgttggtgatctggcatgggatgggagacagctgttgcaatcccttaagcatgggtgctattaaaaaaatggtggagaagaaaatacctggaatttacgtcttatctttagagattgggaagaccctgatggaggacgtggagaacagcttcttcttgaatgtcaattcccaagtaacaacagtgtgtcaggcacttgctaaggatcctaaattgcagcaaggctacaatgctatgggattctcccagggaggccaatttctgagggcagtggctcagagatgcccttcacctcccatgatcaatctgatctcggttgggggacaacatcaaggtgtttttggactccctcgatgcccaggagagagctctcacatctgtgacttcatccgaaaaacactgaatgctggggcgtactccaaagttgttcaggaacgcctcgtgcaagccgaatactggcatgaccccataaaggaggatgtgtatcgcaaccacagcatcttcttggcagatataaatcaggagcggggtatcaatgagtcctacaagaaaaacctgatggccctgaagaagtttgtgatggtgaaattcctcaatgattccattgtggaccctgtagattcggagtggtttggattttacagaagtggccaagccaaggaaaccattcccttacaggagacctccctgtacacacaggaccgcctggggctaaaggaaatggacaatgcaggacagctagtgtttctggctacagaaggggaccatcttcagttgtctgaagaatggttttatgcccacatcataccattccttggatgaaacccgtatagttcacaatagagctcagggagcccctaactcttccaaaccacatgggagacagtttccttcatgcccaagcctgagctcagatccagcttgcaactaatccttctatcatctaacatgccctacttggaaagatctaagatctgaatcttatcctttgccatcttctgttaccatatggtgttgaatgcaagtttaattaccatggagattgttttacaaacttttgatgtggtcaagttcagttttagaaaagggagtctgttccagatcagtgccagaactgtgcccaggcccaaaggagacaactaactaaagtagtgagatagattctaagggcaaacatttttccaagtcttgccatatttcaagcaaagaggtgcccaggcctgaggtactcacataaatgctttgttttgctggtgatttaaccagtgcttggaaaaatcttgcttggctatttctgcatcatttcttaaggctgccttcctctctgagtacgttgccctctgtgctatcaatcatcttatcatcaattattagacaaatcccactggcctacagtcttgcttctgcagcacccactttgtctcctcaggtagtgatgaattagttgctgtcacaaaaggagggaagtagcacccaaattaaattgcttaagagaggaaatgtacatcttgtataacttagggagcgaagaaaatgtaggcgcgaaagtgaaaagtgaggcagctagttcttcctattccattctcgaccaacctgccctttcttaatatgactagtggtcttgatgctagagtcaacttactctgttgctggctttagcagagaataggaggaaccatatgaaaaagatcaggctttctgacttccatccccaaaacacatttaccagcatactccaaactgtttctgatgtgttccatgagaaaaggattgtttgctcaaaaagcttggaaaatactacacactccctttctccttctggagatcaacccacattagagtgtctaaggactcctgagaattcctgttacagtaaacaaaactaacgtaatctaccatttcctacactatttgagcatggaaatcatagtccccactctgtgaaaacttaacgctttttggaagacatttctgtagcatgtcagtttggagaaatgatgagctacgccttgatgaaagaaccgtgttggtgctgctaagtttagccattatggtttttcctttctctctcttaagccttattcttcaactaaaagatgaggattaagagcaagaagttgggggggatgtgaaaataattttatgaggttgtctaaaataaagagtagtttctta

SEQ ID NO: 316550 - DNA, 2338 bp, Homo sapiens
tcatcgctgtctggaacagcgatgactcgagagcgaagatggcgtcgcccggctgcctgtggctcttggctgtggctctcctgccatggacctgcgcttctcgggcgctgcagcatctggacccgccggcgccgctgccgttggtgatctggcatgggatgggagacagctgttgcaatcccttaagcatgggtgctattaaaaaaatggtggagaagaaaatacctggaatttacgtcttatctttagagattgggaagaccctgatggaggacgtggagaacagcttcttcttgaatgtcaattcccaagtaacaacagtgtgtcaggcacttgctaaggatcctaaattgcagcaaggctacaatgctatgggattctcccagggaggccaatttctgagggcagtggctcagagatgcccttcacctcccatgatcaatctgatctcggttgggggacaacatcaaggtgtttttggactccctcgatgcccaggagagagctctcacatctgtgacttcatccgaaaaacactgaatgctggggcgtactccaaagttgttcaggaacgcctcgtgcaagccgaatactggcatgaccccataaaggaggatgtgtatcgcaaccacagcatcttcttggcagatataaatcaggagcggggtatcaatgagtcctacaagaaaaacctgatggccctgaagaagtttgtgatggtgaaattcctcaatgattccattgtggaccctgtagattcggagtggtttggattttacagaagtggccaagccaaggaaaccattcccttacaggagacctccctgtacacacaggaccgcctggggctaaaggaaatggacaatgcaggacagctagtgtttctggctacagaaggggaccatcttcagttgtctgaagaatggttttatgcccacatcataccattccttggatgaaacccgtatagttcacaatagagctcagggagcccctaactcttccaaaccacatgggagacagtttccttcatgcccaagcctgagctcagatccagcttgcaactaatccttctatcatctaacatgccctacttggaaagatctaagatctgaatcttatcctttgccatcttctgttaccatatggtgttgaatgcaagtttaattaccatggagattgttttacaaacttttgatgtggtcaagttcagttttagaaaagggagtctgttccagatcagtgccagaactgtgcccaggcccaaaggagacaactaactaaagtagtgagatagattctaagggcaaacatttttccaagtcttgccatatttcaagcaaagaggtgcccaggcctgaggtactcacataaatgctttgttttgctggtgatttaaccagtgcttggaaaaatcttgcttggctatttctgcatcatttcttaaggctgccttcctctctgagtacgttgccctctgtgctatcaatcatcttatcatcaattattagacaaatcccactggcctacagtcttgcttctgcagcacccactttgtctcctcaggtagtgatgaattagttgctgtcacaaaaggagggaagtagcacccaaattaaattgcttaagagaggaaatgtacatcttgtataacttagggagcgaagaaaatgtaggcgcgaaagtgaaaagtgaggcagctagttcttcctattccattctcgaccaacctgccctttcttaatatgactagtggtcttgatgctagagtcaacttactctgttgctggctttagcagagaataggaggaaccatatgaaaaagatcaggctttctgacttccatccccaaaacacatttaccagcatactccaaactgtttctgatgtgttccatgagaaaaggattgtttgctcaaaaagcttggaaaatactacacactccctttctccttctggagatcaacccacattagagtgtctaaggactcctgagaattcctgttacagtaaacaaaactaacgtaatctaccatttcctacactatttgagcatggaaatcatagtccccactctgtgaaaacttaacgctttttggaagacatttctgtagcatgtcagtttggagaaatgatgagctacgccttgatgaaagaaccgtgttggtgctgctaagtttagccattatggtttttcctttctctctcttaagccttattcttcaactaaaagatgaggattaagagcaagaagttgggggggatgtgaaaataattttatgaggttgtctaaaataaagagtagtttcttaaaaaatatgataaaacaccaaaaagg

SEQ ID NO: 316551 - DNA, 2890 bp, Homo sapiens
tcatcgctgtctggaacagcgatgactcgagagcgaagatggcgtcgcccggctgcctgtggctcttggctgtggctctcctgccatggacctgcgcttctcgggcgctgcagcatctggacccgccggcgccgctgccgttggtgatctggcatgggatgggagacagctgttgcaatcccttaagcatgggtgctattaaaaaaatggtggagaagaaaatacctggaatttacgtcttatctttagagattgggaagaccctgatggaggacgtggagaacagcttcttcttgaatgtcaattcccaagtaacaacagtgtgtcaggcacttgctaaggatcctaaattgcagcaaggctacaatgctatgggattctcccagggaggccaatttctgagggcagtggctcagagatgcccttcacctcccatgatcaatctgatctcggttgggggacaacatcaaggtgtttttggactccctcgatgcccaggagagagctctcacatctgtgacttcatccgaaaaacactgaatgctggggcgtactccaaagttgttcaggaacgcctcgtgcaagccgaatactggcatgaccccataaaggaggatgtgtatcgcaaccacagcatcttcttggcagatataaatcaggagcggggtatcaatgagtcctacaagaaaaacctgatggccctgaagaagtttgtgatggtgaaattcctcaatgattccattgtggaccctgtagattcggagtggtttggattttacagaagtggccaagccaaggaaaccattcccttacaggagacctccctgtacacacaggaccgcctggggctaaaggaaatggacaatgcaggacagctagtgtttctggctacagaaggggaccatcttcagttgtctgaagaatggttttatgcccacatcataccattccttggatgaaacccgtatagttcacaatagagctcagggagcccctaactcttccaaaccacatgggagacagtttccttcatgcccaagcctgagctcagatccagcttgcaactaatccttctatcatctaacatgccctacttggaaagatctaagatctgaatcttatcctttgccatcttctgttaccatatggtgttgaatgcaagtttaattaccatggagattgttttacaaacttttgatgtggtcaagttcagttttagaaaagggagtctgttccagatcagtgccagaactgtgcccaggcccaaaggagacaactaactaaagtagtgagatagattctaagggcaaacatttttccaagtcttgccatatttcaagcaaagaggtgcccaggcctgaggtactcacataaatgctttgttttgctggtgatttaaccagtgcttggaaaaatcttgcttggctatttctgcatcatttcttaaggctgccttcctctctgagtacgttgccctctgtgctatcaatcatcttatcatcaattattagacaaatcccactggcctacagtcttgcttctgcagcacccactttgtctcctcaggtagtgatgaattagttgctgtcacaaaaggagggaagtagcacccaaattaaattgcttaagagaggaaatgtacatcttgtataacttagggagcgaagaaaatgtaggcgcgaaagtgaaaagtgaggcagctagttcttcctattccattctcgaccaacctgccctttcttaatatgactagtggtcttgatgctagagtcaacttactctgttgctggctttagcagagaataggaggaaccatatgaaaaagatcaggctttctgacttccatccccaaaacacatttaccagcatactccaaactgtttctgatgtgttccatgagaaaaggattgtttgctcaaaaagcttggaaaatactacacactccctttctccttctggagatcaacccacattagagtgtctaaggactcctgagaattcctgttacagtaaacaaaactaacgtaatctaccatttcctacactatttgagcatggaaatcatagtccccactctgtgaaaacttaacgctttttggaagacatttctgtagcatgtcagtttggagaaatgatgagctacgccttgatgaaagaaccgtgttggtgctgctaagtttagccattatggtttttcctttctctctcttaagccttattcttcaactaaaagatgaggattaagagcaagaagttgggggggatgtgaaaataattttatgaggttgtctaaaataaagagtagtttcttaaaacacaaaaacaaaccaacacacaacaacaacaaacacacaaaaacaacacaaaaaaaaaaaacaccacaacacaaacacaaacacaacaacacaaaaacaacaaaaaaaacaacgacagggggggggggaccaaagacgccgcgcgcgagcaccagtagagcaccacagatacaggagaggagcgcacaaacaggggaataaacaacagagcggagcctagaatccacgcagccgaccgagagacaaaaagacagcgacgaaatcaaagaagagacccacacataggggaagacaaaaagaggagcacccaccgagaacaaacagacgcgagaacaacaccacagctgtagcggcaaccaaacagcagtggcaagacaaagactccgggagaaatttaaaaatgacaaggcaggaaaatacagcaaagagcaagaagagagagggacgacgaaacgagaagggaggaagcgaggtgatagaaaaagagatacgaaagaagaggaacgtgaaacgagtagaatacgaacgacacaagaaagacgaaacaaggcaaagagcgcagcgcacatcttcta

SEQ ID NO: 316552 - DNA, 2301 bp, Homo sapiens
  misc_feature (53)..(54): n is a, c, g, or t
  misc_feature (57)..(57): n is a, c, g, or t
tcacaacacaccacaccacaccaacgaaaaaactacggctaggtagcgaggcnnggngttgtggctctcctgccatggacctgcgcttctcgggcgctgcagcatctggacccgccggcgccgctgccgttggtgatctggcatgggatgggagacagctgttgcaatcccttaagcatgggtgctattaaaaaaatggtggagaagaaaatacctggaatttacgtcttatctttagagattgggaagaccctgatggaggacgtggagaacagcttcttcttgaatgtcaattcccaagtaacaacagtgtgtcaggcacttgctaaggatcctaaattgcagcaaggctacaatgctatgggattctcccagggaggccaatttctgagggcagtggctcagagatgcccttcacctcccatgatcaatctgatctcggttgggggacaacatcaaggtgtttttggactccctcgatgcccaggagagagctctcacatctgtgacttcatccgaaaaacactgaatgctggggcgtactccaaagttgttcaggaacgcctcgtgcaagccgaatactggcatgaccccataaaggaggatgtgtatcgcaaccacagcatcttcttggcagatataaatcaggagcggggtatcaatgagtcctacaagaaaaacctgatggccctgaagaagtttgtgatggtgaaattcctcaatgattccattgtggaccctgtagattcggagtggtttggattttacagaagtggccaagccaaggaaaccattcccttacaggagacctccctgtacacacaggaccgcctggggctaaaggaaatggacaatgcaggacagctagtgtttctggctacagaaggggaccatcttcagttgtctgaagaatggttttatgcccacatcataccattccttggatgaaacccgtatagttcacaatagagctcagggagcccctaactcttccaaaccacatgggagacagtttccttcatgcccaagcctgagctcagatccagcttgcaactaatccttctatcatctaacatgccctacttggaaagatctaagatctgaatcttatcctttgccatcttctgttaccatatggtgttgaatgcaagtttaattaccatggagattgttttacaaacttttgatgtggtcaagttcagttttagaaaagggagtctgttccagatcagtgccagaactgtgcccaggcccaaaggagacaactaactaaagtagtgagatagattctaagggcaaacatttttccaagtcttgccatatttcaagcaaagaggtgcccaggcctgaggtactcacataaatgctttgttttgctggtgatttaaccagtgcttggaaaaatcttgcttggctatttctgcatcatttcttaaggctgccttcctctctgagtacgttgccctctgtgctatcaatcatcttatcatcaattattagacaaatcccactggcctacagtcttgcttctgcagcacccactttgtctcctcaggtagtgatgaattagttgctgtcacaaaaggagggaagtagcacccaaattaaattgcttaagagaggaaatgtacatcttgtataacttagggagcgaagaaaatgtaggcgcgaaagtgaaaagtgaggcagctagttcttcctattccattctcgaccaacctgccctttcttaatatgactagtggtcttgatgctagagtcaacttactctgttgctggctttagcagagaataggaggaaccatatgaaaaagatcaggctttctgacttccatccccaaaacacatttaccagcatactccaaactgtttctgatgtgttccatgagaaaaggattgtttgctcaaaaagcttggaaaatactacacactccctttctccttctggagatcaacccacattagagtgtctaaggactcctgagaattcctgttacagtaaacaaaactaacgtaatctaccatttcctacactatttgagcatggaaatcatagtccccactctgtgaaaacttaacgctttttggaagacatttctgtagcatgtcagtttggagaaatgatgagctacgccttgatgaaagaaccgtgttggtgctgctaagtttagccattatggtttttcctttctctctcttaagccttattcttcaactaaaagatgaggattaagagcaagaagttgggggggatgtgaaaataattttatgaggttgtctaaaataaagagtagtttctta

SEQ ID NO: 316553 - DNA, 2240 bp, Homo sapiens
tcatcgctgtctggaacagcgatgactcgagagcgaagatggcgtcgcccggctgcctgtggctcttggctgtggctctcctgccatggacctgcgcttctcgggcgctgcagcatctggacccgccggcgccgctgccgttggtgatctggcatgggatgggagacagctgttgcaatcccttaagcatgggtgctattaaaaaaatggtggagaagaaaatacctggaatttacgtcttatctttagagattgggaagaccctgatggaggacgtggagaacagcttcttcttgaatgtcaattcccaagtaacaacagtgtgtcaggcacttgctaaggatcctaaattgcagcaaggctacaatgctatgggattctcccagggaggccaatttctgagggcagtggctcagagatgcccttcacctcccatgatcaatctgatctcggttgggggacaacatcaaggtgtttttggactccctcgatgcccaggagagagctctcacatctgtgacttcatccgaaaaacactgaatgctggggcgtactccaaagttgttcaggaacgcctcgtgcaagccgaatactggcatgaccccataaaggaggatgtgtatcgcaaccacagcatcttcttggcagatataaatcaggagcggggtatcaatgagtcctacaagaaaaacctgatggccctgaagaagtttgtgatggtgaaattcctcaatgattccattgtggaccctgtagattcggaggaccgcctggggctaaaggaaatggacaatgcaggacagctagtgtttctggctacagaaggggaccatcttcagttgtctgaagaatggttttatgcccacatcataccattccttggatgaaacccgtatagttcacaatagagctcagggagcccctaactcttccaaaccacatgggagacagtttccttcatgcccaagcctgagctcagatccagcttgcaactaatccttctatcatctaacatgccctacttggaaagatctaagatctgaatcttatcctttgccatcttctgttaccatatggtgttgaatgcaagtttaattaccatggagattgttttacaaacttttgatgtggtcaagttcagttttagaaaagggagtctgttccagatcagtgccagaactgtgcccaggcccaaaggagacaactaactaaagtagtgagatagattctaagggcaaacatttttccaagtcttgccatatttcaagcaaagaggtgcccaggcctgaggtactcacataaatgctttgttttgctggtgatttaaccagtgcttggaaaaatcttgcttggctatttctgcatcatttcttaaggctgccttcctctctgagtacgttgccctctgtgctatcaatcatcttatcatcaattattagacaaatcccactggcctacagtcttgcttctgcagcacccactttgtctcctcaggtagtgatgaattagttgctgtcacaaaaggagggaagtagcacccaaattaaattgcttaagagaggaaatgtacatcttgtataacttagggagcgaagaaaatgtaggcgcgaaagtgaaaagtgaggcagctagttcttcctattccattctcgaccaacctgccctttcttaatatgactagtggtcttgatgctagagtcaacttactctgttgctggctttagcagagaataggaggaaccatatgaaaaagatcaggctttctgacttccatccccaaaacacatttaccagcatactccaaactgtttctgatgtgttccatgagaaaaggattgtttgctcaaaaagcttggaaaatactacacactccctttctccttctggagatcaacccacattagagtgtctaaggactcctgagaattcctgttacagtaaacaaaactaacgtaatctaccatttcctacactatttgagcatggaaatcatagtccccactctgtgaaaacttaacgctttttggaagacatttctgtagcatgtcagtttggagaaatgatgagctacgccttgatgaaagaaccgtgttggtgctgctaagtttagccattatggtttttcctttctctctcttaagccttattcttcaactaaaagatgaggattaagagcaagaagttgggggggatgtgaaaataattttatgaggttgtctaaaataaagagtagtttctta

SEQ ID NO: 316554 - DNA, 2264 bp, Homo sapiens
cggacgcgtgtgtgacacacgcgagaagcgaagatggcgtcgcccggctgcctgtggctcttggctgtggctctcctgccatggacctgcgcttctcgggcgctgcagcatctggacccgccggcgccgctgccgttggtgatctggcatgggatgggagacagctgttgcaatcccttaagcatgggtgctattaaaaaaatggtggagaagaaaatacctggaatttacgtcttatctttagagattgggaagaccctgatggaggacgtggagaacagcttcttcttgaatgtcaattcccaagtaacaacagtgtgtcaggcacttgctaaggatcctaaattgcagcaaggctacaatgctatgggattctcccagggaggccaatttctgagggcagtggctcagagatgcccttcacctcccatgatcaatctgatctcggttgggggacaacatcaaggtgtttttggactccctcgatgcccaggagagagctctcacatctgtgacttcatccgaacctcgtgcaagccgaatactggcatgaccccataaaggaggatgtgtatcgcaaccacagcatcttcttggcagatataaatcaggagcggggtatcaatgagtcctacaagaaaaacctgatggccctgaagaagtttgtgatggtgaaattcctcaatgattccattgtggaccctgtagattcggagtggtttggattttacagaagtggccaagccaaggaaaccattcccttacaggagacctccctgtacacacaggaccgcctggggctaaaggaaatggacaatgcaggacagctagtgtttctggctacagaaggggaccatcttcagttgtctgaagaatggttttatgcccacatcataccattccttggatgaaacccgtatagttcacaatagagctcagggagcccctaactcttccaaaccacatgggagacagtttccttcatgcccaagcctgagctcagatccagcttgcaactaatccttctatcatctaacatgccctacttggaaagatctaagatctgaatcttatcctttgccatcttctgttaccatatggtgttgaatgcaagtttaattaccatggagattgttttacaaacttttgatgtggtcaagttcagttttagaaaagggagtctgttccagatcagtgccagaactgtgcccaggcccaaaggagacaactaactaaagtagtgagatagattctaagggcaaacatttttccaagtcttgccatatttcaagcaaagaggtgcccaggcctgaggtactcacataaatgctttgttttgctggtgatttaaccagtgcttggaaaaatcttgcttggctatttctgcatcatttcttaaggctgccttcctctctgagtacgttgccctctgtgctatcaatcatcttatcatcaattattagacaaatcccactggcctacagtcttgcttctgcagcacccactttgtctcctcaggtagtgatgaattagttgctgtcacaaaaggagggaagtagcacccaaattaaattgcttaagagaggaaatgtacatcttgtataacttagggagcgaagaaaatgtaggcgcgaaagtgaaaagtgaggcagctagttcttcctattccattctcgaccaacctgccctttcttaatatgactagtggtcttgatgctagagtcaacttactctgttgctggctttagcagagaataggaggaaccatatgaaaaagatcaggctttctgacttccatccccaaaacacatttaccagcatactccaaactgtttctgatgtgttccatgagaaaaggattgtttgctcaaaaagcttggaaaatactacacactccctttctccttctggagatcaacccacattagagtgtctaaggactcctgagaattcctgttacagtaaacaaaactaacgtaatctaccatttcctacactatttgagcatggaaatcatagtccccactctgtgaaaacttaacgctttttggaagacatttctgtagcatgtcagtttggagaaatgatgagctacgccttgatgaaagaaccgtgttggtgctgctaagtttagccattatggtttttcctttctctctcttaagccttattcttcaactaaaagatgaggattaagagcaagaagttgggggggatgtgaaaataattttatgaggttgtctaaaataaagagtagtttctta

SEQ ID NO: 316555 - DNA, 276 bp, Homo sapiens
ttgaagggttgctgactgatttcatagcatatactgttaaaatgctttgccttgtgttttcagcagcagatcatacagtgatactttcacccttgagtggctcatgtgaggataccaacctaaatgagtttacctcttagagaagatgtcagtggttgttttcagtcccatcctctcacttctctctggcttcttttttaggacgtggagaacagcttcttcttgaatgtcaattcccaagtaacaacagtgtgtcaggcacttgctaaggatcct

SEQ ID NO: 316556 - DNA, 2312 bp, Homo sapiens
tcatcgctgtctggaacagcgatgactcgagagcgaagatggcgtcgcccggctgcctgtggctcttggctgtggctctcctgccatggacctgcgcttctcgggcgctgcagcatctggacccgccggcgccgctgccgttggtgatctggcatgggatgggagacagctgttgcaatcccttaagcatgggtgctattaaaaaaatggtggagaagaaaatacctggaatttacgtcttatctttagagattgggaagaccctgatggaggacgtggagaacagcttcttcttgaatgtcaattcccaagtaacaacagtgtgtcaggcacttgctaaggatcctaaattgcagcaaggctacaatgctatgggattctcccagggaggccaatttctgagggcagtggctcagagatgcccttcacctcccatgatcaatctgatctcggttgggggacaacatcaaggtgtttttggactccctcgatgcccaggagagagctctcacatctgtgacttcatccgaaaaacactgaatgctggggcgtactccaaagttgttcaggaacgcctcgtgcaagccgaatactggcatgaccccataaaggaggatgtgtatcgcaaccacagcatcttcttggcagatataaatcaggagcggggtatcaatgagtcctacaagaaaaacctgatggccctgaagaagtttgtgatggtgaaattcctcaatgattccattgtggaccctgtagattcggagtggtttggattttacagaagtggccaagccaaggaaaccattcccttacaggagacctccctgtacacacaggaccgcctggggctaaaggaaatggacaatgcaggacagctagtgtttctggctacagaaggggaccatcttcagttgtctgaagaatggttttatgcccacatcataccattccttggatgaaacccgtatagttcacaatagagctcagggagcccctaactcttccaaaccacatgggagacagtttccttcatgcccaagcctgagctcagatccagcttgcaactaatccttctatcatctaacatgccctacttggaaagatctaagatctgaatcttatcctttgccatcttctgttaccatatggtgttgaatgcaagtttaattaccatggagattgttttacaaacttttgatgtggtcaagttcagttttagaaaagggagtctgttccagatcagtgccagaactgtgcccaggcccaaaggagacaactaactaaagtagtgagatagattctaagggcaaacatttttccaagtcttgccatatttcaagcaaagaggtgcccaggcctgaggtactcacataaatgctttgttttgctggtgatttaaccagtgcttggaaaaatcttgcttggctatttctgcatcatttcttaaggctgccttcctctctgagtacgttgccctctgtgctatcaatcatcttatcatcaattattagacaaatcccactggcctacagtcttgcttctgcagcacccactttgtctcctcaggtagtgatgaattagttgctgtcacaaaaggagggaagtagcacccaaattaaattgcttaagagaggaaatgtacatcttgtataacttagggagcgaagaaaatgtaggcgcgaaagtgaaaagtgaggcagctagttcttcctattccattctcgaccaacctgccctttcttaatatgactagtggtcttgatgctagagtcaacttactctgttgctggctttagcagagaataggaggaaccatatgaaaaagatcaggctttctgacttccatccccaaaacacatttaccagcatactccaaactgtttctgatgtgttccatgagaaaaggattgtttgctcaaaaagcttggaaaatactacacactccctttctccttctggagatcaacccacattagagtgtctaaggactcctgagaattcctgttacagtaaacaaaactaacgtaatctaccatttcctacactatttgagcatggaaatcatagtccccactctgtgaaaacttaacgctttttggaagacatttctgtagcatgtcagtttggagaaatgatgagctacgccttgatgaaagaaccgtgttggtgctgctaagtttagccattatggtttttcctttctctctcttaagccttattcttcaactaaaagatgaggattaagagcaagaagttgggggggatgtgaaaataattttatgaggttgtctaaaataaagagtagtttctta

SEQ ID NO: 316557 - DNA, 2315 bp, Homo sapiens
taggctagtcgaggcccgtgttaatcggccgaggagcgaagatggcgtcgcccggctgcctgtggctcttggctgtggctctcctgccatggacctgcgcttctcgggcgctgcagcatctggacccgccggcgccgctgccgttggtgatctggcatgggatgggagacagctgttgcaatcccttaagcatgggtgctattaaaaaaatggtggagaagaaaatacctggaatttacgtcttatctttagagattgggaagaccctgatggaggacgtggagaacagcttcttcttgaatgtcaattcccaagtaacaacagtgtgtcaggcacttgctaaggatcctaaattgcagcaaggctacaatgctatgggattctcccagggaggccaatttctgagggcagtggctcagagatgcccttcacctcccatgatcaatctgatctcggttgggggacaacatcaaggtgtttttggactccctcgatgcccaggagagagctctcacatctgtgacttcatccgaaaaacactgaatgctggggcgtactccaaagttgttcaggaacgcctcgtgcaagccgaatactggcatgaccccataaaggaggatgtgtatcgcaaccacagcatcttcttggcagatataaatcaggagcggggtatcaatgagtcctacaagaaaaacctgatggccctgaagaagtttgtgatggtgaaattcctcaatgattccattgtggaccctgtagattcggagtggtttggattttacagaagtggccaagccaaggaaaccattcccttacaggagacctccctgtacacacaggaccgcctggggctaaaggaaatggacaatgcaggacagctagtgtttctggctacagaaggggaccatcttcagttgtctgaagaatggttttatgcccacatcataccattccttggatgaaacccgtatagttcacaatagagctcagggagcccctaactcttccaaaccacatgggagacagtttccttcatgcccaagcctgagctcagatccagcttgcaactaatccttctatcatctaacatgccctacttggaaagatctaagatctgaatcttatcctttgccatcttctgttaccatatggtgttgaatgcaagtttaattaccatggagattgttttacaaacttttgatgtggtcaagttcagttttagaaaagggagtctgttccagatcagtgccagaactgtgcccaggcccaaaggagacaactaactaaagtagtgagatagattctaagggcaaacatttttccaagtcttgccatatttcaagcaaagaggtgcccaggcctgaggtactcacataaatgctttgttttgctggtgatttaaccagtgcttggaaaaatcttgcttggctatttctgcatcatttcttaaggctgccttcctctctgagtacgttgccctctgtgctatcaatcatcttatcatcaattattagacaaatcccactggcctacagtcttgcttctgcagcacccactttgtctcctcaggtagtgatgaattagttgctgtcacaaaaggagggaagtagcacccaaattaaattgcttaagagaggaaatgtacatcttgtataacttagggagcgaagaaaatgtaggcgcgaaagtgaaaagtgaggcagctagttcttcctattccattctcgaccaacctgccctttcttaatatgactagtggtcttgatgctagagtcaacttactctgttgctggctttagcagagaataggaggaaccatatgaaaaagatcaggctttctgacttccatccccaaaacacatttaccagcatactccaaactgtttctgatgtgttccatgagaaaaggattgtttgctcaaaaagcttggaaaatactacacactccctttctccttctggagatcaacccacattagagtgtctaaggactcctgagaattcctgttacagtaaacaaaactaacgtaatctaccatttcctacactatttgagcatggaaatcatagtccccactctgtgaaaacttaacgctttttggaagacatttctgtagcatgtcagtttggagaaatgatgagctacgccttgatgaaagaaccgtgttggtgctgctaagtttagccattatggtttttcctttctctctcttaagccttattcttcaactaaaagatgaggattaagagcaagaagttgggggggatgtgaaaataattttatgaggttgtctaaaataaagagtagtttctta

SEQ ID NO: 316558 - DNA, 2614 bp, Homo sapiens
tcatcgctgtctggaacagcgatgactcgagagcgaagatggcgtcgcccggctgcctgtggctcttggctgtggctctcctgccatggacctgcgcttctcgggcgctgcagcatctggacccgccggcgccgctgccgttggtgatctggcatgggatgggagacagctgttgcaatcccttaagcatgggtgctattaaaaaaatggtggagaagaaaatacctggaatttacgtcttatctttagagattgggaagaccctgatggaggacgtggagaacagcttcttcttgaatgtcaattcccaagtaacaacagtgtgtcaggcacttgctaaggatcctaaattgcagcaaggctacaatgctatgggattctcccagggaggccaatttctgagggcagtggctcagagatgcccttcacctcccatgatcaatctgatctcggttgggggacaacatcaaggtgtttttggactccctcgatgcccaggagagagctctcacatctgtgacttcatccgaaaaacactgaatgctggggcgtactccaaagttgttcaggaacgcctcgtgcaagccgaatactggcatgaccccataaaggaggatgtgtatcgcaaccacagcatcttcttggcagatataaatcaggagcggggtatcaatgagtcctacaagaaaaacctgatggccctgaagaagtttgtgatggtgaaattcctcaatgattccattgtggaccctgtagattcggagtggtttggattttacagaagtggccaagccaaggaaaccattcccttacaggagacctccctgtacacacaggaccgcctggggctaaaggaaatggacaatgcaggacagctagtgtttctggctacagaaggggaccatcttcagttgtctgaagaatggttttatgcccacatcataccattccttggatgaaacccgtatagttcacaatagagctcagggagcccctaactcttccaaaccacatgggagacagtttccttcatgcccaagcctgagctcagatccagcttgcaactaatccttctatcatctaacatgccctacttggaaagatctaagatctgaatcttatcctttgccatcttctgttaccatatggtgttgaatgcaagtttaattaccatggagattgttttacaaacttttgatgtggtcaagttcagttttagaaaagggagtctgttccagatcagtgccagaactgtgcccaggcccaaaggagacaactaactaaagtagtgagatagattctaagggcaaacatttttccaagtcttgccatatttcaagcaaagaggtgcccaggcctgaggtactcacataaatgctttgttttgctggtgatttaaccagtgcttggaaaaatcttgcttggctatttctgcatcatttcttaaggctgccttcctctctgagtacgttgccctctgtgctatcaatcatcttatcatcaattattagacaaatcccactggcctacagtcttgcttctgcagcacccactttgtctcctcaggtagtgatgaattagttgctgtcacaaaaggagggaagtagcacccaaattaaattgcttaagagaggaaatgtacatcttgtataacttagggagcgaagaaaatgtaggcgcgaaagtgaaaagtgaggcagctagttcttcctattccattctcgaccaacctgccctttcttaatatgactagtggtcttgatgctagagtcaacttactctgttgctggctttagcagagaataggaggaaccatatgaaaaagatcaggctttctgacttccatccccaaaacacatttaccagcatactccaaactgtttctgatgtgttccatgagaaaaggattgtttgctcaaaaagcttggaaaatactacacactccctttctccttctggagatcaacccacattagagtgtctaaggactcctgagaattcctgttacagtaaacaaaactaacgtaatctaccatttcctacactatttgagcatggaaatcatagtccccactctgtgaaaacttaacgctttttggaagacatttctgtagcatgtcagtttggagaaatgatgagctacgccttgatgaaagaaccgtgttggtgctgctaagtttagccattatggtttttcctttctctctcttaagccttattcttcaactaaaagatgaggattaagagcaagaagttgggggggatgtgaaaataattttatgaggttgtctaaaataaagagtagtttcttaaaaaaaaacaacaaaccacacgaacaaaaaaacaagagaaaaacagacggcacggaccaaaacaaagcaacaacaaccaacacaaaaagacacgaacccggaagagcacaaaacaacaagaaaaacaaaaaagaccagaaagaaagcataatatatatgcggggcaagagaccagccagaacagacagagaaaggaaaaaaaaagaaaagaaacgaaaaaaagggagaaaacaaaggagagaggaagacaggggagacacaagaaaaacaccaggagcatagcaaccccaaaccacgaagat

SEQ ID NO: 316559 - DNA, 2232 bp, Homo sapiens
tcatcgctgtctggaacagcgatgactcgagagcgaagatggcgtcgcccggctgcctgtggctcttggctgtggctctcctgccatggacctgcgcttctcgggcgctgcagcatctggacccgccggcgccgctgccgttggtgatctggcatgggatgggagacagctgttgcaatcccttaagcatgggtgctattaaaaaaatggtggagaagaaaatacctggaatttacgtcttatctttagagattgggaagaccctgatggaggacgtggagaacagcttcttcttgaatgtcaattcccaagtaacaacagtgtgtcaggcacttgctaaggatcctaaattgcagcaaggctacaatgctatgggattctcccagggaggccaatttctgagggcagtggctcagagatgcccttcacctcccatgatcaatctgatctcggttgggggacaacatcaaggtgtttttggactccctcgatgcccaggagagagctctcacatctgtgacttcatccgaaaaacactgaatgctggggcgtactccaaagttgttcaggaacgcctcgtgcaagccgaatactggcatgaccccataaaggaggatgtgtatcgcaaccacagcatcttcttggcagatataaatcaggagcggggtatcaatgagtcctacaagaaaaacctgatggccctgaagaagtttgtgatggtgaaattcctcaatgattccattgtggaccctgtagattcggagtggtttggattttacagaagtggccaagccaaggaaaccattcccttacaggagacctccctgtacacacaggaccgcctggggctaaaggaaatggacaatgcaggacagctagtgtttctggctacagaaggggaccatcttcagttgtctgaagaatggttttatgcccacatcataccattccttggatgaaacccgtatagttcacaatagagctcagggagcccctaactcttccaaaccacatgggagacagtttccttcatgcccaagcctgagctcagatccagcttgcaactaatccttctatcatctaacatgccctacttggaaagatctaagatctgaatcttatcccaagttcagttttagaaaagggagtctgttccagatcagtgccagaactgtgcccaggcccaaaggagacaactaactaaagtagtgagatagattctaagggcaaacatttttccaagtcttgccatatttcaagcaaagaggtgcccaggcctgaggtactcacataaatgctttgttttgctggtgatttaaccagtgcttggaaaaatcttgcttggctatttctgcatcatttcttaaggctgccttcctctctgagtacgttgccctctgtgctatcaatcatcttatcatcaattattagacaaatcccactggcctacagtcttgcttctgcagcacccactttgtctcctcaggtagtgatgaattagttgctgtcacaaaaggagggaagtagcacccaaattaaattgcttaagagaggaaatgtacatcttgtataacttagggagcgaagaaaatgtaggcgcgaaagtgaaaagtgaggcagctagttcttcctattccattctcgaccaacctgccctttcttaatatgactagtggtcttgatgctagagtcaacttactctgttgctggctttagcagagaataggaggaaccatatgaaaaagatcaggctttctgacttccatccccaaaacacatttaccagcatactccaaactgtttctgatgtgttccatgagaaaaggattgtttgctcaaaaagcttggaaaatactacacactccctttctccttctggagatcaacccacattagagtgtctaaggactcctgagaattcctgttacagtaaacaaaactaacgtaatctaccatttcctacactatttgagcatggaaatcatagtccccactctgtgaaaacttaacgctttttggaagacatttctgtagcatgtcagtttggagaaatgatgagctacgccttgatgaaagaaccgtgttggtgctgctaagtttagccattatggtttttcctttctctctcttaagccttattcttcaactaaaagatgaggattaagagcaagaagttgggggggatgtgaaaataattttatgaggttgtctaaaataaagagtagtttctta

SEQ ID NO: 316560 - DNA, 2250 bp, Homo sapiens
cccatgggaccttggcagcttcattcgggcagcatgacagcactacatttgtggaacctcgcacgtgacagccgtgcgctggtgatctggcatgggatgggagacagctgttgcaatcccttaagcatgggtgctattaaaaaaatggtggagaagaaaatacctggaatttacgtcttatctttagagattgggaagaccctgatggaggacgtggagaacagcttcttcttgaatgtcaattcccaagtaacaacagtgtgtcaggcacttgctaaggatcctaaattgcagcaaggctacaatgctatgggattctcccagggaggccaatttctgagggcagtggctcagagatgcccttcacctcccatgatcaatctgatctcggttgggggacaacatcaaggtgtttttggactccctcgatgcccaggagagagctctcacatctgtgacttcatccgaaaaacactgaatgctggggcgtactccaaagttgttcaggaacgcctcgtgcaagccgaatactggcatgaccccataaaggaggatgtgtatcgcaaccacagcatcttcttggcagatataaatcaggagcggggtatcaatgagtcctacaagaaaaacctgatggccctgaagaagtttgtgatggtgaaattcctcaatgattccattgtggaccctgtagattcggagtggtttggattttacagaagtggccaagccaaggaaaccattcccttacaggagacctccctgtacacacaggaccgcctggggctaaaggaaatggacaatgcaggacagctagtgtttctggctacagaaggggaccatcttcagttgtctgaagaatggttttatgcccacatcataccattccttggatgaaacccgtatagttcacaatagagctcagggagcccctaactcttccaaaccacatgggagacagtttccttcatgcccaagcctgagctcagatccagcttgcaactaatccttctatcatctaacatgccctacttggaaagatctaagatctgaatcttatcctttgccatcttctgttaccatatggtgttgaatgcaagtttaattaccatggagattgttttacaaacttttgatgtggtcaagttcagttttagaaaagggagtctgttccagatcagtgccagaactgtgcccaggcccaaaggagacaactaactaaagtagtgagatagattctaagggcaaacatttttccaagtcttgccatatttcaagcaaagaggtgcccaggcctgaggtactcacataaatgctttgttttgctggtgatttaaccagtgcttggaaaaatcttgcttggctatttctgcatcatttcttaaggctgccttcctctctgagtacgttgccctctgtgctatcaatcatcttatcatcaattattagacaaatcccactggcctacagtcttgcttctgcagcacccactttgtctcctcaggtagtgatgaattagttgctgtcacaaaaggagggaagtagcacccaaattaaattgcttaagagaggaaatgtacatcttgtataacttagggagcgaagaaaatgtaggcgcgaaagtgaaaagtgaggcagctagttcttcctattccattctcgaccaacctgccctttcttaatatgactagtggtcttgatgctagagtcaacttactctgttgctggctttagcagagaataggaggaaccatatgaaaaagatcaggctttctgacttccatccccaaaacacatttaccagcatactccaaactgtttctgatgtgttccatgagaaaaggattgtttgctcaaaaagcttggaaaatactacacactccctttctccttctggagatcaacccacattagagtgtctaaggactcctgagaattcctgttacagtaaacaaaactaacgtaatctaccatttcctacactatttgagcatggaaatcatagtccccactctgtgaaaacttaacgctttttggaagacatttctgtagcatgtcagtttggagaaatgatgagctacgccttgatgaaagaaccgtgttggtgctgctaagtttagccattatggtttttcctttctctctcttaagccttattcttcaactaaaagatgaggattaagagcaagaagttgggggggatgtgaaaataattttatgaggttgtctaaaataaagagtagtttctta

SEQ ID NO: 316561 - DNA, 1276 bp, Homo sapiens
tcatcgctgtctggaacagcgatgactcgagagcgaagatggcgtcgcccggctgcctgtggctcttggctgtggctctcctgccatggacctgcgcttctcgggcgctgcagcatctggacccgccggcgccgctgccgttggtgatctggcatgggatgggagacagctgttgcaatcccttaagcatgggtgctattaaaaaaatggtggagaagaaaatacctggaatttacgtcttatctttagagattgggaagaccctgatggaggacgtggagaacagcttcttcttgaatgtcaattcccaagtaacaacagtgtgtcaggcacttgctaaggatcctaaattgcagcaaggctacaatgctatgggattctcccagggaggccaatttctgagggcagtggctcagagatgcccttcacctcccatgatcaatctgatctcggttgggggacaacatcaaggtgtttttggactccctcgatgcccaggagagagctctcacatctgtgacttcatccgaaaaacactgaatgctggggcgtactccaaagttgttcaggaacgcctcgtgcaagccgaatactggcatgaccccataaaggaggatgtgtatcgcaaccacagcatcttcttggcagatataaatcaggagcggggtatcaatgagtcctacaagaaaaacctgatggccctgaagaagtttgtgatggtgaaattcctcaatgattccattgtggaccctgtagattcggagtggtttggattttacagaagtggccaagccaaggaaaccattcccttacaggagacctccctgtacacacaggaccgcctggggctaaaggaaatggacaatgcaggacagctagtgtttctggctacagaaggggaccatcttcagttgtctgaagaatggttttatgcccacatcataccattccttggatgaaacccgtatagttcacaatagagctcagggagcccctaactcttccaaaccacatgggagacagtttccttcatgcccaagcctgagctcagatccagcttgcaactaatccttctatcatctaacatgccctacttggaaagatctaagatctgaatcttatcctttgccatcttctgttaccatatggtgttgaatgcaagtttaattaccatggagattgttttacaaacttttgatgtggtcaagttcagttttagaaaagggagtctgttccagatcagtgccagaaccacaaatatcggggtgcgagcagc

SEQ ID NO: 316562 - DNA, 808 bp, Homo sapiens
tcatcgctgtctggaacagcgatgactcgagagcgaagatggcgtcgcccggctgcctgtggctcttggctgtggctctcctgccatggacctgcgcttctcgggcgctgcagcatctggacccgccggcgccgctgccgttggtgatctggcatgggatgggagacagctgttgcaatcccttaagcatgggtgctattaaaaaaatggtggagaagaaaatacctggaatttacgtcttatctttagagattgggaagaccctgatggaggacgtggagaacagcttcttcttgaatgtcaattcccaagtaacaacagtgtgtcaggcacttgctaaggatcctaaattgcagcaaggctacaatgctatgggattctcccagggaggccaatttctgagggcagtggctcagagatgcccttcacctcccatgatcaatctgatctcggttgggggacaacatcaaggtgtttttggactccctcgatgcccaggagagagctctcacatctgtgacttcatccgaaaaacactgaatgctggggcgtactccaaagttgttcaggaacgcctcgtgcaagccgaatactggcatgaccccataaaggaggatgtgtatcgcaaccacagcatcttcttggcagatataaatcaggagcggggtatcaatgagtcctacaagaaaaacctgatggccctgaagaagtttgtgatggtgaaattcctcaatgattccattgtggaccctgtagattcggagtggtttggatttcacagaagtgggagtcgagctcgacttggtaa

SEQ ID NO: 316563 - DNA, 2011 bp, Homo sapiens
aggcgggacttccgccggcgccccctcccccgcggcgccgtctcctcctcccgcctgaggcgagtctgggctcagcctagagctctccggcggcggcgcagcttcagggcagcgcgggctgcagcggcggcggcggttagggctgtgtagggcgaggcctcccccttcctcctcgccatcctactcctccctcctcgtcatcctcccccttcgtcctcctcgccttcctcctcctcgtcaggctcgacccagctgtgagcggcaagatggcggcgcccaggccgccgcctgccaggctgtcgggcgtcatggtgccggcgcccatccaagacctggaggccctgcgcgcgctcacggcgctcttcaaagagcagcggaaccgagaaacagcacccaggactatcttccaaagagttctggatatcctaaagaaatcttctcatgctgttgagcttgcctgcagagatccatcccaagtggaaaacctggcttccagtctgcagttaataacagaatgcttcaggtgtcttcgcaatgcttgcatagagtgttctgtgaaccagaattcaatcaggaacttggatacgattggtgttgctgttgatttgattcttctgtttcgtgaactgcgagtggaacaggaatctctgttgacagcttttcgctgtggcctgcagtttttaggcaacattgcctcacggaatgaagattcccagtctattgtttgggtgcatgctttcccagaactgttttgtcttgcttaaatcatccggacaaaaaaattgttgcctactcttcaatgattttgtttacatcccttaatcatgaaagaatgaaagaactggaggagaacctcaatattgcaattgatgtcatagatgcttaccaaaaacatcctgaatcagaatggccgttcttgattattacagacctctttctgaaaagcccggaattggtacaagccatgtttcccaaactgaacaatcaagaaagagttacactgttagaccttatgatagccaagataacgagtgatgagccactcaccaaggatgacatccctgtgtttttgcggcatgctgagttgattgcaagcacctttgtggatcagtgcaagactgtgctcaagctggcctctgaggagcctcctgatgatgaggaggcactggctacaattaggcttctcgacgtcctgtgcgaaatgactgtgaatactgagctgctcggctatctgcaggttttccctggcttgctggaaagagtgattgatcttttgcgggtgattcatgtagctggaaaagaaaccacaaacatcttcagtaattgtggttgcgtgagagcagaaggtgacatctccaatgtggccaatgggtttaagtctcatctcattcgtctgattggaaatctgtgttacaagaataaagataaccaagacaaggtaaatgagctggatggtatcccgttgatcctggacaactgcaacatcagtgacagtaacccctttctgacccagtgggtgatatatgccatccgaaaccttaccgaagacaacagccaaaaccaagatttgattgcaaagatggaggaacaggggctggcagatgcatccctacttaaaaaagtgggttttgaagttgaaaagaaaggcgaaaagctgatcctgaaatctactagagacacccctaagccatgaatgaactacatccaaatacctgaatttttggaatctgtttcatggatttttcatcttctaccgtatgtgaaattgcaagtgtttgaagatttataagtacaaatttgggaacatacaaatcttttaggtagtagagtttaacgtgtataagctaaaagtgaaagtaactgagtgttctcttgtttctttgcattaatgtaactgtgtggtttgcctttgtccccctggatagaacgtgcatttaaagaatatattgtacttactgtgacagcagataataaaccagtctcttggagggcacaacccttatttgacaaa

SEQ ID NO: 316564 - DNA, 2955 bp, Homo sapiens
aggcgggacttccgccggcgccccctcccccgcggcgccgtctcctcctcccgcctgaggcgagtctgggctcagcctagagctctccggcggcggcgcagcttcagggcagcgcgggctgcagcggcggcggcggttagggctgtgtagggcgaggcctcccccttcctcctcgccatcctactcctccctcctcgtcatcctcccccttcgtcctcctcgccttcctcctcctcgtcaggctcgacccagctgtgagcggcaagatggcggcgcccaggccgccgcctgccaggctgtcgggcgtcatggtgccggcgcccatccaagacctggaggccctgcgcgcgctcacggcgctcttcaaagagcagcggaaccgagaaacagcacccaggactatcttccaaagagttctggatatcctaaagaaatcttctcatgctgttgagcttgcctgcagagatccatcccaagtggaaaacctggcttccagtctgcagttaataacagaatgcttcaggtgtcttcgcaatgcttgcatagagtgttctgtgaaccagaattcaatcaggaacttggatacgattggtgttgctgttgatttgattcttctgtttcgtgaactgcgagtggaacaggaatctctgttgacagcttttcgctgtggcctgcagtttttaggcaacattgcctcacggaatgaagattcccagtctattgtttgggtgcatgctttcccagaactgttttgtcttgcttaaatcatccggacaaaaaaattgttgcctactcttcaatgattttgtttacatcccttaatcatgaaagaatgaaagaactggaggagaacctcaatattgcaattgatgtcatagatgcttaccaaaaacatcctgaatcagaatggccgttcttgattattacagacctctttctgaaaagcccggaattggtacaagccatgtttcccaaactgaacaatcaagaaagagttacactgttagaccttatgatagccaagataacgagtgatgagccactcaccaaggatgacatccctgtgtttttgcggcatgctgagttgattgcaagcacctttgtggatcagtgcaagactgtgctcaagctggcctctgaggagcctcctgatgatgaggaggcactggctacaattaggcttctcgacgtcctgtgcgaaatgactgtgaatactgagctgctcggctatctgcaggttttccctggcttgctggaaagagtgattgatcttttgcgggtgattcatgtagctggaaaagaaaccacaaacatcttcagtaattgtggttgcgtgagagcagaaggtgacatctccaatgtggccaatgggtttaagtctcatctcattcgtctgattggaaatctgtgttacaagaataaagataaccaagacaaggtaaatgagctggatggtatcccgttgatcctggacaactgcaacatcagtgacagtaacccctttctgacccagtgggtgatatatgccatccgaaaccttaccgaagacaacagccaaaaccaagatttgattgcaaagatggaggaacaggggctggcagatgcatccctacttaaaaaagtgggttttgaagttgaaaagaaaggcgaaaagctgatcctgaaatctactagagacacccctaagccatgaatgaactacatccaaatacctgaatttttggaatctgtttcatggatttttcatcttctaccgtatgtgaaattgcaagtgtttgaagatttataagtacaaatttgggaacatacaaatcttttaggtagtagagtttaacgtgtataagctaaaagtgaaagtaactgagtgttctcttgtttctttgcattaatgtaactgtgtggtttgcctttgtccccctggatagaacgtgcatttaaagaatatattgtacttactgtgacagcagataataaaccagtctcttggagggcacaacccttatttgacaaaacttggatgttggcttgactgtgtttgtcccttcagatggcaagtcagcatcattctttatattcctcttctcattggggttttctgaactctggcaggcggttgaagtagtttctcactgtggattaattctagcaatctcttttcacccctctgcctttccaaaacattgacaagactcatttccagttaattaattcgagaaccctccctcttcattttgggtactgggctgtcttgtcactgagccctatccctttggaatgtggcagggagtgaggttggtgagagaacatgtgggcacttaactcttcatgttccagttcatcccagaagtagacatcccaggacccattctgtgtcaaggtgaatgcctgtgtcctccccagcttcatgcctctgtcatgggggaaggaatagcttatgttctgctctggtgcagtgccgtagattaaaggtacatttctatcttctttgatttaaaaagcaccagtctcataaaggtgccactcagttttagccatgtcttcactgaaattgcaaaagtacttttagggagcaggagtttatttgacatctagttatctgtctgtctgttcatctatctatctgtctgctgtatgagaggtaggactggattaaatgaccactgaactcactgaatccagatcattcatatcatcaacaaaagctctagggggaggtcacgttgtgaatgcttaaaacatattattttcttcaacaaccatatcgctaaactaatatatccagagattttgcacaattcgtgttgaaccttccaaaacaaaaataaagacctgtccaaaagttttgacaaaaatactgattgctcccaaataaagtgcttctaagctttgtgtagaaaatacatcaaaataaaactccagggggggccccggtaccccaattggcctataagggag

SEQ ID NO: 316565 - DNA, 2443 bp, Homo sapiens
aggcgggacttccgccggcgccccctcccccgcggcgccgtctcctcctcccgcctgaggcgagtctgggctcagcctagagctctccggcggcggcgcagcttcagggcagcgcgggctgcagcggcggcggcggttagggctgtgtagggcgaggcctcccccttcctcctcgccatcctactcctccctcctcgtcatcctcccccttcgtcctcctcgccttcctcctcctcgtcaggctcgacccagctgtgagcggcaagatggcggcgcccaggccgccgcctgccaggctgtcgggcgtcatggtgccggcgcccatccaagacctggaggccctgcgcgcgctcacggcgctcttcaaagagcagcggaaccgagaaacagcacccaggactatcttccaaagagttctggatatcctaaagaaatcttctcatgctgttgagcttgcctgcagagatccatcccaagtggaaaacctggcttccagtctgcagttaataacagaatgcttcaggtgtcttcgcaatgcttgcatagagtgttctgtgaaccagaattcaatcaggaacttggatacgattggtgttgctgttgatttgattcttctgtttcgtgaactgcgagtggaacaggaatctctgttgacagcttttcgctgtggcctgcagtttttaggcaacattgcctcacggaatgaagattcccagtctattgtttgggtgcatgctttcccagaactgttttgtcttgcttaaatcatccggacaaaaaaattgttgcctactcttcaatgattttgtttacatcccttaatcatgaaagaatgaaagaactggaggagaacctcaatattgcaattgatgtcatagatgcttaccaaaaacatcctgaatcagaatggccgttcttgattattacagacctctttctgaaaagcccggaattggtacaagccatgtttcccaaactgaacaatcaagaaagagttacactgttagaccttatgatagccaagataacgagtgatgagccactcaccaaggatgacatccctgtgtttttgcggcatgctgagttgattgcaagcacctttgtggatcagtgcaagactgtgctcaagctggcctctgaggagcctcctgatgatgaggaggcactggctacaattaggcttctcgacgtcctgtgcgaaatgactgtgaatactgagctgctcggctatctgcaggttttccctggcttgctggaaagagtgattgatcttttgcgggtgattcatgtagctggaaaagaaaccacaaacatcttcagtaattgtggttgcgtgagagcagaaggtgacatctccaatgtggccaatgggtttaagtctcatctcattcgtctgattggaaatctgtgttacaagaataaagataaccaagacaaggtaaatgagctggatggtatcccgttgatcctggacaactgcaacatcagtgacagtaacccctttctgacccagtgggtgatatatgccatccgaaaccttaccgaagacaacagccaaaaccaagatttgattgcaaagatggaggaacaggggctggcagatgcatccctacttaaaaaagtgggttttgaagttgaaaagaaaggcgaaaagctgatcctgaaatctactagagacacccctaagccatgaatgaactacatccaaatacctgaatttttggaatctgtttcatggatttttcatcttctaccgtatgtgaaattgcaagtgtttgaagatttataagtacaaatttgggaacatacaaatcttttaggtagtagagtttaacgtgtataagctaaaagtgaaagtaactgagtgttctcttgtttctttgcattaatgtaactgtgtggtttgcctttgtccccctggatagaacgtgcatttaaagaatatattgtacttactgtgacagcagataataaaccagtctcttggagggcacaacccttatttgacaaaaaaaaaaaaaaaaaaaaaaaaaaaaaaaaaaaaaaaaaaaaaaaaagaaaaaaaaaaaaagaaagagaaaaaaaaaagaaaaaacaaaaaaaaaaagaaacaagcggggaagggcggtatacaggggggagcaacaacaaccgcataacatagcaaacaggaaaaacggagagggaagcccgaaacgaacaagcaactagaacaacacaacaagcacagaagcaggcaccagaggccgaacagatcccagcgccaaacggatacacatgtcaagaagaacataaacacagcgagagcagcagacgatcgagcaaggaacaacgaaagagcacaccaagcacacagtgctgaagctggtaaaaggacacaataaacacacgcaccaaaacgaaaacacagaagcgcagaaaaacacacgcaaacaaaaacccg

SEQ ID NO: 316566 - DNA, 1926 bp, Homo sapiens
aggcgggacttccgccggcgccccctcccccgcggcgccgtctcctcctcccgcctgaggcgagtctgggctcagcctagagctctccggcggcggcgcagcttcagggcagcgcgggctgcagcggcggcggcggttagggctgtgtagggcgaggcctcccccttcctcctcgccatcctactcctccctcctcgtcatcctcccccttcgtcctcctcgccttcctcctcctcgtcaggctcgacccagctgtgagcggcaagatggcggcgcccaggccgccgcctgccaggctgtcgggcgtcatggtgccggcgcccatccaagacctggaggccctgcgcgcgctcacggcgctcttcaaagagcagcggaaccgagaaacagcacccaggactatcttccaaagagttctggatatcctaaagaaatcttctcatgctgttgagcttgcctgcagagatccatcccaagtggaaaacctggcttccagtctgcagttaataacagaatgcttcaggtgtcttcgcaatgcttgcatagagtgttctgtgaaccagaattcaatcaggaacttggatacgattggtgttgctgttgatttgattcttctgtttcgtgaactgcgagtggaacaggaatctctgttgacagcttttcgctgtggcctgcagtttttaggcaacattgcctcacggaatgaagattcccagtctattgtttgggtgcatgctttcccagaactgttttgtcttgcttaaatcatccggacaaaaaaattgttgcctactcttcaatgattttgtttacatcccttaatcatgaaagaatgaaagaactggaggagaacctcaatattgcaattgatgtcatagatgcttaccaaaaacatcctgaatcagaatggccgttcttgattattacagacctctttctgaaaagcccggaattggtacaagccatgtttcccaaactgaacaatcaagaaagagttacactgttagaccttatgatagccaagataacgagtgatgagccactcaccaaggatgacatccctgtgtttttgcggcatgctgagttgattgcaagcacctttgtggatcagtgcaagactgtgctcaagctggcctctgaggagcctcctgatgatgaggaggcactggctacaattaggcttctcgacgtcctgtgcgaaatgactgtgaatactgagctgctcggctatctgcaggttttccctggcttgctggaaagagtgattgatcttttgcgggtgattcatgtagctggaaaagaaaccacaaacatcttcagtaattgtggttgcgtgagagcagaaggtgacatctccaatgtggccaatgggtttaagtctcatctcattcgtctgattggaaatctgtgttacaagaataaagataaccaagacaaggtaaatgagctggatggtatcccgttgatcctggacaactgcaacatcagtgacagtaacccctttctgacccagtgggtgatatatgccatccgaaaccttaccgaagacaacagccaaaaccaagatttgattgcaaagatggaggaacaggggctggcagatgcatccctacttaaaaaagtgggttttgaagttgaaaagaaaggcgaaaagctgatcctgaaatctactagagacacccctaagccatgaatgaactacatccaaatacctgaatttttggaatctgtttcatggatttttcatcttctaccgtatgtgaaattgcaagtgtttgaagatttataagtacaaatttgggaacatacaaatcttttaggtagtagagtttaacgtgtataagctaaaagtgaaagtaactgagtgttctcttgtttctttgcattaatgtaactgtgtggaccttcggcgtgtggggtaccgag

SEQ ID NO: 316567 - DNA, 3249 bp, Homo sapiens
tccggccggggggctgccccgggcaggggagggcggccgggactcccgcggcggccccggcctggacccaggcgccgcccccgcctcgctggagacgcggagggcgaggcctgcgcgggctgcctgagcgccacccaggcctcccgactcccaggcaccgcctcgtgctcgtgggtccccgcggggcctggggcgggcgccccgctcccccaccgcagccagtccgggtgcgaagccgcgatcccgggagcccttgccgcggcgtgccggtgatgttgacccaacacacgagaaacagcacccaggactatcttccaaagagttctggatatcctaaagaaatcttctcatgctgttgagcttgcctgcagagatccatcccaagtggaaaacctggcttccagtctgcagttaataacagaatgcttcaggtgtcttcgcaatgcttgcatagagtgttctgtgaaccagaattcaatcaggaacttggatacgattggtgttgctgttgatttgattcttctgtttcgtgaactgcgagtggaacaggaatctctgttgacagcttttcgctgtggcctgcagtttttaggcaacattgcctcacggaatgaagattcccagtctattgtttgggtgcatgctttcccagaactgttttgtcttgcttaaatcatccggacaaaaaaattgttgcctactcttcaatgattttgtttacatcccttaatcatgaaagaatgaaagaactggaggagaacctcaatattgcaattgatgtcatagatgcttaccaaaaacatcctgaatcagaatggccgttcttgattattacagacctctttctgaaaagcccggaattggtacaagccatgtttcccaaactgaacaatcaagaaagagttacactgttagaccttatgatagccaagataacgagtgatgagccactcaccaaggatgacatccctgtgtttttgcggcatgctgagttgattgcaagcacctttgtggatcagtgcaagactgtgctcaagctggcctctgaggagcctcctgatgatgaggaggcactggctacaattaggcttctcgacgtcctgtgcgaaatgactgtgaatactgagctgctcggctatctgcaggttttccctggcttgctggaaagagtgattgatcttttgcgggtgattcatgtagctggaaaagaaaccacaaacatcttcagtaattgtggttgcgtgagagcagaaggtgacatctccaatgtggccaatgggtttaagtctcatctcattcgtctgattggaaatctgtgttacaagaataaagataaccaagacaaggtaaatgagctggatggtatcccgttgatcctggacaactgcaacatcagtgacagtaacccctttctgacccagtgggtgatatatgccatccgaaaccttaccgaagacaacagccaaaaccaagatttgattgcaaagatggaggaacaggggctggcagatgcatccctacttaaaaaagtgggttttgaagttgaaaagaaaggcgaaaagctgatcctgaaatctactagagacacccctaagccatgaatgaactacatccaaatacctgaatttttggaatctgtttcatggatttttcatcttctaccgtatgtgaaattgcaagtgtttgaagatttataagtacaaatttgggaacatacaaatcttttaggtagtagagtttaacgtgtataagctaaaagtgaaagtaactgagtgttctcttgtttctttgcattaatgtaactgtgtggtttgcctttgtccccctggatagaacgtgcatttaaagaatatattgtacttactgtgacagcagataataaaccagtctcttggagggcacaacccttatttgacaaaacttggatgttggcttgactgtgtttgtcccttcagatggcaagtcagcatcattctttatattcctcttctcattggggttttctgaactctggcaggcggttgaagtagtttctcactgtggattaattctagcaatctcttttcacccctctgcctttccaaaacattgacaagactcatttccagttaattaattcgagaaccctccctcttcattttgggtactgggctgtcttgtcactgagccctatccctttggaatgtggcagggagtgaggttggtgagagaacatgtgggcacttaactcttcatgttccagttcatcccagaagtagacatcccaggacccattctgtgtcaaggtgaatgcctgtgtcctccccagcttcatgcctctgtcatgggggaaggaatagcttatgttctgctctggtgcagtgccgtagattaaaggtacatttctatcttctttgatttaaaaagcaccagtctcataaaggtgccactcagttttagccatgtcttcactgaaattgcaaaagtacttttagggagcaggagtttatttgacatctagttatctgtctgtctgttcatctatctatctgtctgctgtatgagaggtaggactggattaaatgaccactgaactcactgaatccagatcattcatatcatcaacaaaagctctagggggaggtcacgttgtgaatgcttaaaacatattattttcttcaacaaccatatcgctaaactaatatatccagagattttgcacaattcgtgttgaaccttccaaaacaaaaataaagacctgtccaaaagttttgacaaaaatactgattgctcccaaataaagtgcttctaagctttgtgtagacatagtttaactgatttgtaaaaatagcttaagcatgttgagaatgaagtaaaagttttcccatgtgctgtctaatgtactctgtgtaactctgaagacacatcagcttctaggattgcagcaatctatgaataacattttttctctcatttatgactttccatcagtaaagaagccattgcagaatttaaaattacacaaaggagtcattctctcctgggacataaagagttaaagctctgtcctctaaatagaagcctggccaaagggagaaaacagtgggagtcccttttcccttttaacaagtttgcaatagacacttctttttttcctgtctcaatggatgtgtgcacaccagtggaatcgcacaaacttgtcggtatgagctatataataacaaacacaaataaataaaagggagccttgtgagaatacaaatggggtaa

SEQ ID NO: 316568 - DNA, 1687 bp, Homo sapiens
aggcgggacttccgccggcgccccctcccccgcggcgccgtctcctcctcccgcctgaggcgagtctgggctcagcctagagctctccggcggcggcgcagcttcagggcagcgcgggctgcagcggcggcggcggttagggctgtgtagggcgaggcctcccccttcctcctcgccatcctactcctccctcctcgtcatcctcccccttcgtcctcctcgccttcctcctcctcgtcaggctcgacccagctgtgagcggcaagatggcggcgcccaggccgccgcctgccaggctgtcgggcgtcatggtgccggcgcccatccaagacctggaggccctgcgcgcgctcacggcgctcttcaaagagcagcggaaccgagaaacagcacccaggactatcttccaaagagttctggatatcctaaagaaatcttctcatgctgttgagcttgcctgcagagatccatcccaagtggaaaacctggcttccagtctgcagttaataacagaatgcttcaggtgtcttcgcaatgcttgcatagagtgttctgtgaaccagaattcaatcaggaacttggatacgattggtgttgctgttgatttgattcttctgtttcgtgaactgcgagtggaacaggaatctctgttgacagcttttcgctgtggcctgcagtttttaggcaacattgcctcacggaatgaagattcccagtctattgtttgggtgcatgctttcccagaactgttttgtcttgcttaaatcatccggacaaaaaaattgttgcctactcttcaatgattttgtttacatcccttaatcatgaaagaatgaaagaactggaggagaacctcaatattgcaattgatgtcatagatgcttaccaaaaacatcctgaatcagaatggccgttcttgattattacagacctctttctgaaaagcccggaattggtacaagccatgtttcccaaactgaacaatcaagaaagagttacactgttagaccttatgatagccaagataacgagtgatgagccactcaccaaggatgacatccctgtgtttttgcggcatgctgagttgattgcaagcacctttgtggatcagtgcaagactgtgctcaagctggcctctgaggagcctcctgatgatgaggaggcactggctacaattaggcttctcgacgtcctgtgcgaaatgactgtgaatactgagctgctcggctatctgcaggttttccctggcttgctggaaagagtgattgatcttttgcgggtgattcatgtagctggaaaagaaaccacaaacatcttcagtaattgtggttgcgtgagagcagaaggtgacatctccaatgtggccaatgggtttaagtctcatctcattcgtctgattggaaatctgtgttacaagaataaagataaccaagacaaggtaaatgagctggatggtatcccgttgatcctggacaactgcaacatcagtgacagtaacccctgtatccttgcatgtgaattaccatgcacaagtttacagccggggcccttagcaaaacaagtcccttgcctcatgttcattcatgccaccatccagtccacacttgcatcattgctggccctgaacttcggcagtgacttcctaactcatctttcagtttctgctcctgctgggtccaggtgattt

SEQ ID NO: 316569 - DNA, 1360 bp, Homo sapiens
  misc_feature (1304)..(1304): n is a, c, g, or t
aggcgggacttccgccggcgccccctcccccgcggcgccgtctcctcctcccgcctgaggcgagtctgggctcagcctagagctctccggcggcggcgcagcttcagggcagcgcgggctgcagcggcggcggcggttagggctgtgtagggcgaggcctcccccttcctcctcgccatcctactcctccctcctcgtcatcctcccccttcgtcctcctcgccttcctcctcctcgtcaggctcgacccagctgtgagcggcaagatggcggcgcccaggccgccgcctgccaggctgtcgggcgtcatggtgccggcgcccatccaagacctggaggccctgcgcgcgctcacggcgctcttcaaagagcagcggaaccgagaaacagcacccaggactatcttccaaagagttctggatatcctaaagaaatcttctcatgctgttgagcttgcctgcagagatccatcccaagtggaaaacctggcttccagtctgcagttaataacagaatgcttcaggtgtcttcgcaatgcttgcatagagtgttctgtgaaccagaattcaatcaggaacttggatacgattggtgttgctgttgatttgattcttctgtttcgtgaactgcgagtggaacaggaatctctgttgacagcttttcgctgtggcctgcagtttttaggcaacattgcctcacggaatgaagattcccagtctattgtttgggtgcatgctttcccagaactgttttgtcttgcttaaatcatccggacaaaaaaattgttgcctactcttcaatgattttgtttacatcccttaatcatgaaagaatgaaagaactggaggagaacctcaatattgcaattgatgtcatagatgcttaccaaaaacatcctgaatcagaatggccgttcttgattattacagacctctttctgaaaagcccggaattggtacaagccatgtttcccaaactgaacaatcaagaaagagttacactgttagaccttatgatagccaagataacgagtgatgagccactcaccaaggatgacatccctgtgtttttgcggcatgctgagttgattgcaagcacctttgtggatcagtgcaagactgtgctcaagctggcctctgaggagcctcctgatgatgaggaggcactggctacaattaggcttctcgacgtcctgtgcgaaatgactgtgaatactgagctgctcggctatctgcaggttttccctggcttgctggaaagagtgattgatcttattgcggtgattcatgtaacttgagctccanacattttaggtaattgtggtgctttagagcagtgtgacatttccattgttgcctgt

SEQ ID NO: 316570 - DNA, 2388 bp, Homo sapiens
  misc_feature (30)..(30): n is a, c, g, or t
tgccggaccaacatgcgaacggactgatcnatcaagaaagagttacactgttagaccttatgatagccaagataacgagtgatgagccactcaccaaggatgacatccctgtgtttttgcggcatgctgagttgattgcaagcacctttgtggatcagtgcaagactgtgctcaagctggcctctgaggagcctcctgatgatgaggaggcactggctacaattaggcttctcgacgtcctgtgcgaaatgactgtgaatactgagctgctcggctatctgcaggttttccctggcttgctggaaagagtgattgatcttttgcgggtgattcatgtagctggaaaagaaaccacaaacatcttcagtaattgtggttgcgtgagagcagaaggtgacatctccaatgtggccaatgggtttaagtctcatctcattcgtctgattggaaatctgtgttacaagaataaagataaccaagacaaggtaaatgagctggatggtatcccgttgatcctggacaactgcaacatcagtgacagtaacccctttctgacccagtgggtgatatatgccatccgaaaccttaccgaagacaacagccaaaaccaagatttgattgcaaagatggaggaacaggggctggcagatgcatccctacttaaaaaagtgggttttgaagttgaaaagaaaggcgaaaagctgatcctgaaatctactagagacacccctaagccatgaatgaactacatccaaatacctgaatttttggaatctgtttcatggatttttcatcttctaccgtatgtgaaattgcaagtgtttgaagatttataagtacaaatttgggaacatacaaatcttttaggtagtagagtttaacgtgtataagctaaaagtgaaagtaactgagtgttctcttgtttctttgcattaatgtaactgtgtggtttgcctttgtccccctggatagaacgtgcatttaaagaatatattgtacttactgtgacagcagataataaaccagtctcttggagggcacaacccttatttgacaaaacttggatgttggcttgactgtgtttgtcccttcagatggcaagtcagcatcattctttatattcctcttctcattggggttttctgaactctggcaggcggttgaagtagtttctcactgtggattaattctagcaatctcttttcacccctctgcctttccaaaacattgacaagactcatttccagttaattaattcgagaaccctccctcttcattttgggtactgggctgtcttgtcactgagccctatccctttggaatgtggcagggagtgaggttggtgagagaacatgtgggcacttaactcttcatgttccagttcatcccagaagtagacatcccaggacccattctgtgtcaaggtgaatgcctgtgtcctccccagcttcatgcctctgtcatgggggaaggaatagcttatgttctgctctggtgcagtgccgtagattaaaggtacatttctatcttctttgatttaaaaagcaccagtctcataaaggtgccactcagttttagccatgtcttcactgaaattgcaaaagtacttttagggagcaggagtttatttgacatctagttatctgtctgtctgttcatctatctatctgtctgctgtatgagaggtaggactggattaaatgaccactgaactcactgaatccagatcattcatatcatcaacaaaagctctagggggaggtcacgttgtgaatgcttaaaacatattattttcttcaacaaccatatcgctaaactaatatatccagagattttgcacaattcgtgttgaaccttccaaaacaaaaataaagacctgtccaaaagttttgacaaaaatactgattgctcccaaataaagtgcttctaagctttgtgtagacatagtttaactgatttgtaaaaatagcttaagcatgttgagaatgaagtaaaagttttcccatgtgctgtctaatgtactctgtgtaactctgaagacacatcagcttctaggattgcagcaatctatgaataacattttttctctcatttatgactttccatcagtaaagaagccattgcagaatttaaaattacacaaaggagtcattctctcctgggacataaagagttaaagctctgtcctctaaatagaagcctggccaaagggagaaaacagtgggagtcccttttcccttttaacaagtttgcaatagacacttctttttttcctgtctcaatggatgtgtgcacaccagtggaatcgcacaaacttgtcggtatgagctatataataacaaacacaaataaataaaagggagccttgtgagaatacaaatggggtaa

SEQ ID NO: 316571 - DNA, 679 bp, Homo sapiens
aggcgggacttccgccggcgccccctcccccgcggcgccgtctcctcctcccgcctgaggcgagtctgggctcagcctagagctctccggcggcggcgcagcttcagggcagcgcgggctgcagcggcggcggcggttagggctgtgtagggcgaggcctcccccttcctcctcgccatcctactcctccctcctcgtcatcctcccccttcgtcctcctcgccttcctcctcctcgtcaggctcgacccagctgtgagcggcaagatggcggcgcccaggccgccgcctgccaggctgtcgggcgtcatggtgccggcgcccatccaagacctggaggccctgcgcgcgctcacggcgctcttcaaagagcagcggaaccgagaaacagcacccaggactatcttccaaagagttctggatatcctaaagaaatcttctcatgctgttgagcttgcctgcagagatccatcccaagtggaaaacctggcttccagtctgcagttaataacagaatgcttcaggtcagaaagagcagcggaaccgataaacagtacccaggactatcttccaaagatgttctggatatcctaaagaaatcttctcatgctgttgagcttgcctgcagagatccatcccaagtggaaaacctggcttccagtctgcagttaataacagaa

SEQ ID NO: 316572 - DNA, 396 bp, Homo sapiens
gtgaaccagaattcaatcaggtagttacacacgtaccttggattctgtttctttgtatatgtgcatgctggttctgtcatttggtttatctgttagaagttgttttgggctgggtaaggtggctcatgcctgtaatcccagcattttgggaggctgaggcaggaggattgcttgagtccaggagttcaagaccggcctgggcaacatggtgagaccctgtctctacaaaaaaaatacaaaaaattagctggacatggtggcgcacacctgtagtcccaactgctcaggagactgaggtgggaggattgcttgggccagggagaggcagaggttgcagtaatctgagatgatgccattgctgcaggctgggccacattgtgagaccctgtctcaggg

SEQ ID NO: 316573 - DNA, 507 bp, Homo sapiens
agatagttaatgttcactatagtttaaaaaacagaactccttgaataatattgcatgaattgttttaggtttctctaagttatttgtcaccactgaccaaagttctgggttttttccccttttgtctgatgaatcttgtgaacagatttgctacatctgcaattttgtttctttcttcttctttagtgaatgaactacatccaaatacctgaatttttggaatctgtttcatggatttttcatcttctaccgtatgtgaaattgcaagtgtttgaagatttataagtacaaatttgggaacatacaaatcttttaggtagtagagtttaacgtgtataagctaaaagtgaaagtaactgagtgttctcttgtttctttgcattaatgtaactgtgtggtttgcctttgtccccctggatagaacgtgcatttaaagaatatattgtacttactgtgacagcagataataaaccagtctcttggagggcacaacccttatttgacaaa

SEQ ID NO: 316574 - DNA, 368 bp, Homo sapiens
aagtaatggacataaaaggtgcattaagcaattctagtttctgtggccaagacacatcaaagaaatgaagaatttaaaaaataggtgattgatgaagattaactttattcatgtttttcctagctagacattagaagcaaggtaaggaatttaaaataataatattcccttaaagttgctttcctaggtatttttagcattgtataatttaagtattatagattcatgcagaaatcctttatgttttacagagttacactgttagaccttatgatagccaagataacgagtgatgagccactcaccaaggatgacatccctgtgtttttgcggcatgctgagttgattgcaagcacctttgtggatca

SEQ ID NO: 316575 - DNA, 3341 bp, Homo sapiens
aggcgggacttccgccggcgccccctcccccgcggcgccgtctcctcctcccgcctgaggcgagtctgggctcagcctagagctctccggcggcggcgcagcttcagggcagcgcgggctgcagcggcggcggcggttagggctgtgtagggcgaggcctcccccttcctcctcgccatcctactcctccctcctcgtcatcctcccccttcgtcctcctcgccttcctcctcctcgtcaggctcgacccagctgtgagcggcaagatggcggcgcccaggccgccgcctgccaggctgtcgggcgtcatggtgccggcgcccatccaagacctggaggccctgcgcgcgctcacggcgctcttcaaagagcagcggaaccgagaaacagcacccaggactatcttccaaagagttctggatatcctaaagaaatcttctcatgctgttgagcttgcctgcagagatccatcccaagtggaaaacctggcttccagtctgcagttaataacagaatgcttcaggtgtcttcgcaatgcttgcatagagtgttctgtgaaccagaattcaatcaggaacttggatacgattggtgttgctgttgatttgattcttctgtttcgtgaactgcgagtggaacaggaatctctgttgacagcttttcgctgtggcctgcagtttttaggcaacattgcctcacggaatgaagattcccagtctattgtttgggtgcatgctttcccagaactgttttgtcttgcttaaatcatccggacaaaaaaattgttgcctactcttcaatgattttgtttacatcccttaatcatgaaagaatgaaagaactggaggagaacctcaatattgcaattgatgtcatagatgcttaccaaaaacatcctgaatcagaatggccgttcttgattattacagacctctttctgaaaagcccggaattggtacaagccatgtttcccaaactgaacaatcaagaaagagttacactgttagaccttatgatagccaagataacgagtgatgagccactcaccaaggatgacatccctgtgtttttgcggcatgctgagttgattgcaagcacctttgtggatcagtgcaagactgtgctcaagctggcctctgaggagcctcctgatgatgaggaggcactggctacaattaggcttctcgacgtcctgtgcgaaatgactgtgaatactgagctgctcggctatctgcaggttttccctggcttgctggaaagagtgattgatcttttgcgggtgattcatgtagctggaaaagaaaccacaaacatcttcagtaattgtggttgcgtgagagcagaaggtgacatctccaatgtggccaatgggtttaagtctcatctcattcgtctgattggaaatctgtgttacaagaataaagataaccaagacaaggtaaatgagctggatggtatcccgttgatcctggacaactgcaacatcagtgacagtaacccctttctgacccagtgggtgatatatgccatccgaaaccttaccgaagacaacagccaaaaccaagatttgattgcaaagatggaggaacaggggctggcagatgcatccctacttaaaaaagtgggttttgaagttgaaaagaaaggcgaaaagctgatcctgaaatctactagagacacccctaagccatgaatgaactacatccaaatacctgaatttttggaatctgtttcatggatttttcatcttctaccgtatgtgaaattgcaagtgtttgaagatttataagtacaaatttgggaacatacaaatcttttaggtagtagagtttaacgtgtataagctaaaagtgaaagtaactgagtgttctcttgtttctttgcattaatgtaactgtgtggtttgcctttgtccccctggatagaacgtgcatttaaagaatatattgtacttactgtgacagcagataataaaccagtctcttggagggcacaacccttatttgacaaaacttggatgttggcttgactgtgtttgtcccttcagatggcaagtcagcatcattctttatattcctcttctcattggggttttctgaactctggcaggcggttgaagtagtttctcactgtggattaattctagcaatctcttttcacccctctgcctttccaaaacattgacaagactcatttccagttaattaattcgagaaccctccctcttcattttgggtactgggctgtcttgtcactgagccctatccctttggaatgtggcagggagtgaggttggtgagagaacatgtgggcacttaactcttcatgttccagttcatcccagaagtagacatcccaggacccattctgtgtcaaggtgaatgcctgtgtcctccccagcttcatgcctctgtcatgggggaaggaatagcttatgttctgctctggtgcagtgccgtagattaaaggtacatttctatcttctttgatttaaaaagcaccagtctcataaaggtgccactcagttttagccatgtcttcactgaaattgcaaaagtacttttagggagcaggagtttatttgacatctagttatctgtctgtctgttcatctatctatctgtctgctgtatgagaggtaggactggattaaatgaccactgaactcactgaatccagatcattcatatcatcaacaaaagctctagggggaggtcacgttgtgaatgcttaaaacatattattttcttcaacaaccatatcgctaaactaatatatccagagattttgcacaattcgtgttgaaccttccaaaacaaaaataaagacctgtccaaaagttttgacaaaaatactgattgctcccaaataaagtgcttctaagctttgtgtagacatagtttaactgatttgtaaaaatagcttaagcatgttgagaatgaagtaaaagttttcccatgtgctgtctaatgtactctgtgtaactctgaagacacatcagcttctaggattgcagcaatctatgaataacattttttctctcatttatgactttccatcagtaaagaagccattgcagaatttaaaattacacaaaggagtcattctctcctgggacataaagagttaaagctctgtcctctaaatagaagcctggccaaagggagaaaacagtgggagtcccttttcccttttaacaagtttgcaatagacacttctttttttcctgtctcaatggatgtgtgcacaccagtggaatcgcacaaacttgtcggtatgagctatataataacaaacacaaataaataaaagggagccttgtgagaatacaaatggggtaa

SEQ ID NO: 316576 - DNA, 2836 bp, Homo sapiens
aggcgggacttccgccggcgccccctcccccgcggcgccgtctcctcctcccgcctgaggcgagtctgggctcagcctagagctctccggcggcggcgcagcttcagggcagcgcgggctgcagcggcggcggcggttagggctgtgtagggcgaggcctcccccttcctcctcgccatcctactcctccctcctcgtcatcctcccccttcgtcctcctcgccttcctcctcctcgtcaggctcgacccagctgtgagcggcaagatggcggcgcccaggccgccgcctgccaggctgtcgggcgtcatggtgccggcgcccatccaagacctggaggccctgcgcgcgctcacggcgctcttcaaagagcagcggaaccgagaaacagcacccaggactatcttccaaagagttctggatatcctaaagaaatcttctcatgctgttgagcttgcctgcagagatccatcccaagtggaaaacctggcttccagtctgcagttaataacagaatgcttcaggtgtcttcgcaatgcttgcatagagtgttctgtgaaccagaattcaatcaggaacttggatacgattggtgttgctgttgatttgattcttctgtttcgtgaactgcgagtggaacaggaatctctgttgacagcttttcgctgtggcctgcagtttttaggcaacattgcctcacggaatgaagattcccagtctattgtttgggtgcatgctttcccagaactgttttgtcttgcttaaatcatccggacaaaaaaattgttgcctactcttcaatgattttgtttacatcccttaatcatgaaagaatgaaagaactggaggagaacctcaatattgcaattgatgtcatagatgcttaccaaaaacatcctgaatcagaatggccgttcttgattattacagacctctttctgaaaagcccggaattggtacaagccatgtttcccaaactgaacaatcaagaaagagttacactgttagaccttatgatagccaagataacgagtgatgagccactcaccaaggatgacatccctgtgtttttgcggcatgctgagttgattgcaagcacctttgtggatcagtgcaagactgtgctcaagctggcctctgaggagcctcctgatgatgaggaggcactggctacaattaggcttctcgacgtcctgtgcgaaatgactgtgaatactgagctgctcggctatctgcaggttttccctggcttgctggaaagagtgattgatcttttgcgggtgattcatgtagctggaaaagaaaccacaaacatcttcagtaattgtggttgcgtgagagcagaaggtgacatctccaatgtggccaatgggtttaagtctcatctcattcgtctgattggaaatctgtgttacaagaataaagataaccaagacaaggtaaatgagctggatggtatcccgttgatcctggacaactgcaacatcagtgacagtaacccctttctgacccagtgggtgatatatgccatccgaaaccttaccgaagacaacagccaaaaccaagatttgattgcaaagatggaggaacaggggctggcagatgcatccctacttaaaaaagtgggttttgaagttgaaaagaaaggcgaaaagctgatcctgaaatctactagagacacccctaagccatgaatgaactacatccaaatacctgaatttttggaatctgtttcatggatttttcatcttctaccgtatgtgaaattgcaagtgtttgaagatttataagtacaaatttgggaacatacaaatcttttaggtagtagagtttaacgtgtataagctaaaagtgaaagtaactgagtgttctcttgtttctttgcattaatgtaactgtgtggtttgcctttgtccccctggatagaacgtgcatttaaagaatatattgtacttactgtgacagcagataataaaccagtctcttggagggcacaacccttatttgacaaaacttggatgttggcttgactgtgtttgtcccttcagatggcaagtcagcatcattctttatattcctcttctcattggggttttctgaactctggcaggcggttgaagtagtttctcactgtggattaattctagcaatctcttttcacccctctgcctttccaaaacattgacaagactcatttccagttaattaattcgagaaccctccctcttcattttgggtactgggctgtcttgtcactgagccctatccctttggaatgtggcagggagtgaggttggtgagagaacatgtgggcacttaactcttcatgttccagttcatcccagaagtagacatcccaggacccattctgtgtcaaggtgaatgcctgtgtcctccccagcttcatgcctctgtcatgggggaaggaatagcttatgttctgctctggtgcagtgccgtagattaaaggtacatttctatcttctttgatttaaaaagcaccagtctcataaaggtgccactcagttttagccatgtcttcactgaaattgcaaaagtacttttagggagcaggagtttatttgacatctagttatctgtctgtctgttcatctatctatctgtctgctgtatgagaggtaggactggattaaatgaccactgaactcactgaatccagatcattcatatcatcaacaaaagctctagggggaggtcacgttgtgaatgcttaaaacatattattttcttcaacaaccatatcgctaaactaatatatccagagattttgcacaattcgtgttgaaccttccaaaacaaaaataaagacctgtcca

SEQ ID NO: 316577 - DNA, 2044 bp, Homo sapiens
aggcgggacttccgccggcgccccctcccccgcggcgccgtctcctcctcccgcctgaggcgagtctgggctcagcctagagctctccggcggcggcgcagcttcagggcagcgcgggctgcagcggcggcggcggttagggctgtgtagggcgaggcctcccccttcctcctcgccatcctactcctccctcctcgtcatcctcccccttcgtcctcctcgccttcctcctcctcgtcaggctcgacccagctgtgagcggcaagatggcggcgcccaggccgccgcctgccaggctgtcgggcgtcatggtgccggcgcccatccaagacctggaggccctgcgcgcgctcacggcgctcttcaaagagcagcggaaccgagaaacagcacccaggactatcttccaaagagttctggatatcctaaagaaatcttctcatgctgttgagcttgcctgcagagatccatcccaagtggaaaacctggcttccagtctgcagttaataacagaatgcttcaggtgtcttcgcaatgcttgcatagagtgttctgtgaaccagaattcaatcaggaacttggatacgattggtgttgctgttgatttgattcttctgtttcgtgaactgcgagtggaacaggaatctctgttgacagcttttcgctgtggcctgcagtttttaggcaacattgcctcacggaatgaagattcccagtctattgtttgggtgcatgctttcccagaactgttttgtcttgcttaaatcatccggacaaaaaaattgttgcctactcttcaatgattttgtttacatcccttaatcatgaaagaatgaaagaactggaggagaacctcaatattgcaattgatgtcatagatgcttaccaaaaacatcctgaatcagaatggccgttcttgattattacagacctctttctgaaaagcccggaattggtacaagccatgtttcccaaactgaacaatcaagaaagagttacactgttagaccttatgatagccaagataacgagtgatgagccactcaccaaggatgacatccctgtgtttttgcggcatgctgagttgattgcaagcacctttgtggatcagtgcaagactgtgctcaagctggcctctgaggagcctcctgatgatgaggaggcactggctacaattaggcttctcgacgtcctgtgcgaaatgactgtgaatactgagctgctcggctatctgcaggttttccctggcttgctggaaagagtgattgatcttttgcgggtgattcatgtagctggaaaagaaaccacaaacatcttcagtaattgtggttgcgtgagagcagaaggtgacatctccaatgtggccaatgggtttaagtctcatctcattcgtctgattggaaatctgtgttacaagaataaagataaccaagacaaggtaaatgagctggatggtatcccgttgatcctggacaactgcaacatcagtgacagtaacccctttctgacccagtgggtgatatatgccatccgaaaccttaccgaagacaacagccaaaaccaagatttgattgcaaagatggaggaacaggggctggcagatgcatccctacttaaaaaagtgggttttgaagttgaaaagaaaggcgaaaagctgatcctgaaatctactagagacacccctaagccatgaatgaactacatccaaatacctgaatttttggaatctgtttcatggatttttcatcttctaccgtatgtgaaattgcaagtgtttgaagatttataagtacaaatttgggaacatacaaatcttttaggtagtagagtttaacgtgtataagctaaaagtgaaagtaactgagtgttctcttgtttctttgcattaatgtaactgtgtggtttgcctttgtccccctggatagaacgtgcatttaaagaatatattgtacttactgtgacagcagataataaaccagtctcttggagggcacaacccttatttgacaaagttaccattcaaaatgatttggaaacatctcga

SEQ ID NO: 316578 - DNA, 1528 bp, Homo sapiens
aggcgggacttccgccggcgccccctcccccgcggcgccgtctcctcctcccgcctgaggcgagtctgggctcagcctagagctctccggcggcggcgcagcttcagggcagcgcgggctgcagcggcggcggcggttagggctgtgtagggcgaggcctcccccttcctcctcgccatcctactcctccctcctcgtcatcctcccccttcgtcctcctcgccttcctcctcctcgtcaggctcgacccagctgtgagcggcaagatggcggcgcccaggccgccgcctgccaggctgtcgggcgtcatggtgccggcgcccatccaagacctggaggccctgcgcgcgctcacggcgctcttcaaagagcagcggaaccgagaaacagcacccaggactatcttccaaagagttctggatatcctaaagaaatcttctcatgctgttgagcttgcctgcagagatccatcccaagtggaaaacctggcttccagtctgcagttaataacagaatgcttcaggtgtcttcgcaatgcttgcatagagtgttctgtgaaccagaattcaatcaggaacttggatacgattggtgttgctgttgatttgattcttctgtttcgtgaactgcgagtggaacaggaatctctgttgacagcttttcgctgtggcctgcagtttttaggcaacattgcctcacggaatgaagattcccagtctattgtttgggtgcatgctttcccagaactgttttgtcttgcttaaatcatccggacaaaaaaattgttgcctactcttcaatgattttgtttacatcccttaatcatgaaagaatgaaagaactggaggagaacctcaatattgcaattgatgtcatagatgcttaccaaaaacatcctgaatcagaatggccgttcttgattattacagacctctttctgaaaagcccggaattggtacaagccatgtttcccaaactgaacaatcaagaaagagttacactgttagaccttatgatagccaagataacgagtgatgagccactcaccaaggatgacatccctgtgtttttgcggcatgctgagttgattgcaagcacctttgtggatcagtgcaagactgtgctcaagctggcctctgaggagcctcctgatgatgaggaggcactggctacaattaggcttctcgacgtcctgtgcgaaatgactgtgaatactgagctgctcggctatctgcaggttttccctggcttgctggaaagagtgattgatcttttgcgggtgattcatgtagctggaaaagaaaccacaaacatcttcagtaattgtggttgcgtgagagcagaaggtgacatctccaatgtggccaatgggtttaagtctcatctcattcgtctgattggaaatctgtgttacaagaataaagataaccaagacaaggtaaatgagctggatggtggatgaacagatagacgaataggtggataagtggataggtggatggatggatgttggaggggggtctcaaaa

SEQ ID NO: 316579 - DNA, 2497 bp, Homo sapiens
catagatgcttaccaaaaacaatcctgaatcagaatgcttaccaaaaacattctgattcaggatggccgttcttgattattacagacctctttctgaaaagcccggaattggtacaagccatgtttcccaaactgaacaatcaagaaagagttacactgttagaccttatgatagccaagataacgagtgatgagccactcaccaaggatgacatccctgtgtttttgcggcatgctgagttgattgcaagcacctttgtggatcagtgcaagactgtgctcaagctggcctctgaggagcctcctgatgatgaggaggcactggctacaattaggcttctcgacgtcctgtgcgaaatgactgtgaatactgagctgctcggctatctgcaggttttccctggcttgctggaaagagtgattgatcttttgcgggtgattcatgtagctggaaaagaaaccacaaacatcttcagtaattgtggttgcgtgagagcagaaggtgacatctccaatgtggccaatgggtttaagtctcatctcattcgtctgattggaaatctgtgttacaagaataaagataaccaagacaaggtaaatgagctggatggtatcccgttgatcctggacaactgcaacatcagtgacagtaacccctttctgacccagtgggtgatatatgccatccgaaaccttaccgaagacaacagccaaaaccaagatttgattgcaaagatggaggaacaggggctggcagatgcatccctacttaaaaaagtgggttttgaagttgaaaagaaaggcgaaaagctgatcctgaaatctactagagacacccctaagccatgaatgaactacatccaaatacctgaatttttggaatctgtttcatggatttttcatcttctaccgtatgtgaaattgcaagtgtttgaagatttataagtacaaatttgggaacatacaaatcttttaggtagtagagtttaacgtgtataagctaaaagtgaaagtaactgagtgttctcttgtttctttgcattaatgtaactgtgtggtttgcctttgtccccctggatagaacgtgcatttaaagaatatattgtacttactgtgacagcagataataaaccagtctcttggagggcacaacccttatttgacaaaacttggatgttggcttgactgtgtttgtcccttcagatggcaagtcagcatcattctttatattcctcttctcattggggttttctgaactctggcaggcggttgaagtagtttctcactgtggattaattctagcaatctcttttcacccctctgcctttccaaaacattgacaagactcatttccagttaattaattcgagaaccctccctcttcattttgggtactgggctgtcttgtcactgagccctatccctttggaatgtggcagggagtgaggttggtgagagaacatgtgggcacttaactcttcatgttccagttcatcccagaagtagacatcccaggacccattctgtgtcaaggtgaatgcctgtgtcctccccagcttcatgcctctgtcatgggggaaggaatagcttatgttctgctctggtgcagtgccgtagattaaaggtacatttctatcttctttgatttaaaaagcaccagtctcataaaggtgccactcagttttagccatgtcttcactgaaattgcaaaagtacttttagggagcaggagtttatttgacatctagttatctgtctgtctgttcatctatctatctgtctgctgtatgagaggtaggactggattaaatgaccactgaactcactgaatccagatcattcatatcatcaacaaaagctctagggggaggtcacgttgtgaatgcttaaaacatattattttcttcaacaaccatatcgctaaactaatatatccagagattttgcacaattcgtgttgaaccttccaaaacaaaaataaagacctgtccaaaagttttgacaaaaatactgattgctcccaaataaagtgcttctaagctttgtgtagacatagtttaactgatttgtaaaaatagcttaagcatgttgagaatgaagtaaaagttttcccatgtgctgtctaatgtactctgtgtaactctgaagacacatcagcttctaggattgcagcaatctatgaataacattttttctctcatttatgactttccatcagtaaagaagccattgcagaatttaaaattacacaaaggagtcattctctcctgggacataaagagttaaagctctgtcctctaaatagaagcctggccaaagggagaaaacagtgggagtcccttttcccttttaacaagtttgcaatagacacttctttttttcctgtctcaatggatgtgtgcacaccagtggaatcgcacaaacttgtcggtatgagctatataataacaaacacaaataaataaaagggagccttgtgagaatacaaatggggtaa

SEQ ID NO: 316580 - DNA, 936 bp, Homo sapiens
aggcgggacttccgccggcgccccctcccccgcggcgccgtctcctcctcccgcctgaggcgagtctgggctcagcctagagctctccggcggcggcgcagcttcagggcagcgcgggctgcagcggcggcggcggttagggctgtgtagggcgaggcctcccccttcctcctcgccatcctactcctccctcctcgtcatcctcccccttcgtcctcctcgccttcctcctcctcgtcaggctcgacccagctgtgagcggcaagatggcggcgcccaggccgccgcctgccaggctgtcgggcgtcatggtgccggcgcccatccaagacctggaggccctgcgcgcgctcacggcgctcttcaaagagcagcggaaccgagaaacagcacccaggactatcttccaaagagttctggatatcctaaagaaatcttctcatgctgttgagcttgcctgcagagatccatcccaagtggaaaacctggcttccagtctgcagttaataacagaatgcttcaggtgtcttcgcaatgcttgcatagagtgttctgtgaaccagaattcaatcaggaacttggatacgattggtgttgctgttgatttgattcttctgtttcgtgaactgcgagtggaacaggaatctctgttgacagcttttcgctgtggcctgcagtttttaggcaacattgcctcacggaatgaagattcccagtctattgtttgggtgcatgctttcccagaactgttttgtcttgcttaaatcatccggacaaaaaaattgttgcctactcttcaatgattttgtttacatcccttaatcatgaaagaatgaaagaactggaggagaacctcaatattgcaattgatgtcatagatgcttaccaaaaacatcctgaatcagaatggcccctcccctaggagacagaagagca

SEQ ID NO: 316581 - DNA, 2751 bp, Homo sapiens
gggccgattccgcgggcctcgcccggcgcttcagccgattcccgcccagctccgggctcatgggcgcggtcagcagggcgggccagggcggcggggcgcgacactgggaggaagtgcgggccgcctgcccgggcgcgttaaggaagttgcccaaaatgaggaagagccgcgggcccggcggctgaggccaccccggcggcggctggagagcgaggaggagcgggtggccccgcgctgcgcccgccctcgcctcacctggcgcaggtggacacctgcgcaggtgtgtgccctccggcccctgaagcatggccagcagcggcatggctgacagcgccaaccacctgcccttctttttcggcaacatcacccgggaggaggcagaagattacctggtccaggggggcatgagtgatgggctttatttgctgcgccagagccgcaactacctgggtggcttcgccctgtccgtggcccacgggaggaaggcacaccactacaccatcgagcgggagctgaatggcacctacgccatcgccggtggcaggacccatgccagccccgccgacctctgccactaccactcccaggagtctgatggcctggtctgcctcctcaagaagcccttcaaccggccccaaggggtgcagcccaagactgggccctttgaggatttgaaggaaaacctcatcagggaatatgtgaagcagacatggaacctgcagggtcaggctctggagcaggccatcatcagtcagaagcctcagctggagaagctgatcgctaccacagcccatgaaaaaatgccttggttccatggaaaaatctctcgggaagaatctgagcaaattgtcctgataggatcaaagacaaatggaaagttcctgatccgagccagagacaacaacggctcctacgccctgtgcctgctgcacgaagggaaggtgctgcactatcgcatcgacaaagacaagacagggaagctctccatccccgagggaaagaagttcgacacgctctggcagctagtcgagcattattcttataaagcagatggtttgttaagagttcttactgtcccatgtcaaaaaatcggcacacagggaaatgttaattttggaggccgtccacaacttccaggttcccatcctgcgacttggtcagcgggtggaataatctcaagaatcaaatcatactccttcccaaagcctggccacagaaagtcctcccctgcccaagggaaccggcaagagagtactgtgtcattcaatccgtatgagccagaacttgcaccctgggctgcagacaaaggcccccagagagaagccctacccatggacacagaggtgtacgagagcccctacgcggaccccgaggagatcaggcccaaggaggtttacctggaccgaaagctgctgacgctggaagacaaagaactgggctctggtaattttggaactgtgaaaaagggctactaccaaatgaaaaaagttgtgaaaaccgtggctgtgaaaatactgaaaaacgaggccaatgaccccgctcttaaagatgagttattagcagaagcaaatgtcatgcagcagctggacaacccgtacatcgtgcggatgatcgggatatgcgaggccgagtcctggatgctggttatggagatggcagaacttggtcccctcaataagtatttgcagcagaacagacatgtcaaggataagaacatcatagaactggttcatcaggtttccatgggcatgaagtacttggaggagagcaattttgtgcacagagatctggctgcaagaaatgtgttgctagttacccaacattacgccaagatcagtgatttcggactttccaaagcactgcgtgctgatgaaaactactacaaggcccagacccatggaaagtggcctgtcaagtggtacgctccggaatgcatcaactactacaagttctccagcaaaagcgatgtctggagctttggagtgttgatgtgggaagcattctcctatgggcagaagccatatcgagggatgaaaggaagtgaagtcaccgctatgttagagaaaggagagcggatggggtgccctgcagggtgtccaagagagatgtacgatctcatgaatctgtgctggacatacgatgtggaaaacaggcccggattcgcagcagtggaactgcggctgcgcaattactactatgacgtggtgaactaaccgctcccgcacctgtcggtggctgcctttgatcacaggagcaatcacaggaaaatgtatccagaggaattgattgtcagccacctccctctgccagtcgggagagccaggcttggatggaacatgcccacaacttgtcacccaaagcctgtcccaggactcaccctccacaaagcaaaggcagtcccgggagaaaagacggatggcaggatccaaggggctagctggatttgtttgttttcttgtctgtgtgattttcatacaggttatttttacgatctgtttccaaatccctttcatgtctttccacttctctgggtcccggggtgcatttgttactcatcgggcccagggacattgcagagtggcctagagcactctcaccccaagcggccttttccaaatgcccaaggatgccttagcatgtgactcctgaagggaaggcaaaggcagaggaatttggctgcttctacggccatgagactgatccctggccactgaaaagctttcctgacaataaaaatgttttgaggcttta

SEQ ID NO: 316582 - DNA, 2682 bp, Homo sapiens
gggccgattccgcgggcctcgcccggcgcttcagccgattcccgcccagctccgggctcatgggcgcggtcagcagggcgggccagggcggcggggcgcgacactgggaggaagtgcgggccgcctgcccgggcgcgttaaggaagttgcccaaaatgaggaagagccgcgggcccggcggctgaggccaccccggcggcggctggagagcgaggaggagcgggtggccccgcgctgcgcccgccctcgcctcacctggcgcaggtggacacctgcgcaggtgtgtgccctccggcccctgaagcatggccagcagcggcatggctgacagcgccaaccacctgcccttctttttcggcaacatcacccgggaggaggcagaagattacctggtccaggggggcatgagtgatgggctttatttgctgcgccagagccgcaactacctgggtggcttcgccctgtccgtggcccacgggaggaaggcacaccactacaccatcgagcgggagctgaatggcacctacgccatcgccggtggcaggacccatgccagccccgccgacctctgccactaccactcccaggagtctgatggcctggtctgcctcctcaagaagcccttcaaccggccccaaggggtgcagcccaagactgggccctttgaggatttgaaggaaaacctcatcagggaatatgtgaagcagacatggaacctgcagggtcaggctctggagcaggccatcatcagtcagaagcctcagctggagaagctgatcgctaccacagcccatgaaaaaatgccttggttccatggaaaaatctctcgggaagaatctgagcaaattgtcctgataggatcaaagacaaatggaaagttcctgatccgagccagagacaacaacggctcctacgccctgtgcctgctgcacgaagggaaggtgctgcactatcgcatcgacaaagacaagacagggaagctctccatccccgagggaaagaagttcgacacgctctggcagctagtcgagcattattcttataaagcagatggtttgttaagagttcttactgtcccatgtcaaaaaatcggcacacagggaaatgttaattttggaggccgtccacaacttccaggttcccatcctgcgtcctcccctgcccaagggaaccggcaagagagtactgtgtcattcaatccgtatgagccagaacttgcaccctgggctgcagacaaaggcccccagagagaagccctacccatggacacagaggtgtacgagagcccctacgcggaccccgaggagatcaggcccaaggaggtttacctggaccgaaagctgctgacgctggaagacaaagaactgggctctggtaattttggaactgtgaaaaagggctactaccaaatgaaaaaagttgtgaaaaccgtggctgtgaaaatactgaaaaacgaggccaatgaccccgctcttaaagatgagttattagcagaagcaaatgtcatgcagcagctggacaacccgtacatcgtgcggatgatcgggatatgcgaggccgagtcctggatgctggttatggagatggcagaacttggtcccctcaataagtatttgcagcagaacagacatgtcaaggataagaacatcatagaactggttcatcaggtttccatgggcatgaagtacttggaggagagcaattttgtgcacagagatctggctgcaagaaatgtgttgctagttacccaacattacgccaagatcagtgatttcggactttccaaagcactgcgtgctgatgaaaactactacaaggcccagacccatggaaagtggcctgtcaagtggtacgctccggaatgcatcaactactacaagttctccagcaaaagcgatgtctggagctttggagtgttgatgtgggaagcattctcctatgggcagaagccatatcgagggatgaaaggaagtgaagtcaccgctatgttagagaaaggagagcggatggggtgccctgcagggtgtccaagagagatgtacgatctcatgaatctgtgctggacatacgatgtggaaaacaggcccggattcgcagcagtggaactgcggctgcgcaattactactatgacgtggtgaactaaccgctcccgcacctgtcggtggctgcctttgatcacaggagcaatcacaggaaaatgtatccagaggaattgattgtcagccacctccctctgccagtcgggagagccaggcttggatggaacatgcccacaacttgtcacccaaagcctgtcccaggactcaccctccacaaagcaaaggcagtcccgggagaaaagacggatggcaggatccaaggggctagctggatttgtttgttttcttgtctgtgtgattttcatacaggttatttttacgatctgtttccaaatccctttcatgtctttccacttctctgggtcccggggtgcatttgttactcatcgggcccagggacattgcagagtggcctagagcactctcaccccaagcggccttttccaaatgcccaaggatgccttagcatgtgactcctgaagggaaggcaaaggcagaggaatttggctgcttctacggccatgagactgatccctggccactgaaaagctttcctgacaataaaaatgttttgaggcttta

SEQ ID NO: 316583 - DNA, 1188 bp, Homo sapiens
gggccgattccgcgggcctcgcccggcgcttcagccgattcccgcccagctccgggctcatgggcgcggtcagcagggcgggccagggcggcggggcgcgacactgggaggaagtgcgggccgcctgcccgggcgcgttaaggaagttgcccaaaatgaggaagagccgcgggcccggcggctgaggccaccccggcggcggctggagagcgaggaggagcgggtggccccgcgctgcgcccgccctcgcctcacctggcgcaggtaggtgtggccgcgtcccctacccggccgggactttctggtaaggagaggaggttacggggaacgacgcgctgctttcatgccctttcttgttctaccttcatcggccgaggtaaaagtgctgaaaccatgtgaataaaatacaggtgggttccgccagcttcgctcctgaacctacccgcgctcgggatccagaagctgcgccgggagagaggggctcaggcctgggcggaggggacggaggtcagaccgtgcggaaagtgacccgggcaccccagggcgcccaggcccccagggagcgcggaaagtgcggtcgcggcccggccctcgggagacgcgggattgggatcaggcacagcgcgaggaagtcgatcttggagctagaacattttcctttggccatttacacgaatccactggaaaatgccgcagtgtttatcaaagttactcaaagtagaaatgtccagacgtcttatgagcttagacaaatcttttactacaaaaagaaacagcagttgcattcaaacaacaacccttctgaaccactactaaaatttagcataattactcttgtggatacattttcattgtcaagtaatttacttagccaatgaacttggagagcaagaaagttttatgtagtaaaatgtaaatttgagttaagagttaagggtgtttctttttgtctgtttgtctgtttttggcaatgtggctccaaaaccttaagcccacctaaaaactatataaatgcaatccattcttttgttggaatgttcaaggactagaaagacaattggagaagtgagagtttgaatctttttttacgttggaaacagtgttgcaaaatattttttgagttttgcctgacttagcaaagattcagtcgaactcaagtagagttcaaagcattgcagcgtgtagtaa

SEQ ID NO: 316584 - DNA, 488 bp, Homo sapiens
tgagatacaggccaacgtggtcagtcagttgtccagagaaggtaaagaactgtctttgggatgtgtcaaccttgttccctcgagggggtctggtcaaggtggctcagtggggcagttgtccctgggggaaatgatcccctggtcacctctcagtgtccctacagagatgcttaccttggaaacataaccagaaacagcgatgcagcctcatggtttggcaattggtgaatccccagccgacttcgtaaacttttcctagatttagaagcgttttctctgcatgtccatctattcaaaggaatttcctcagacttcactgtcataccttgtattttaaaaatgatcttagctgagtgcagtggcacgcacctgtagtcccagctactcctggcaggaggatcgcttcatcctcactatgatctcactatcgtttgaggctagtttgagaccagcctgggcaacatagtgaggccctgtctcaaaaaaag

SEQ ID NO: 316585 - DNA, 5179 bp, Homo sapiens
gggccgattccgcgggcctcgcccggcgcttcagccgattcccgcccagctccgggctcatgggcgcggtcagcagggcgggccagggcggcggggcgcgacactgggaggaagtgcgggccgcctgcccgggcgcgttaaggaagttgcccaaaatgaggaagagccgcgggcccggcggctgaggccaccccggcggcggctggagagcgaggaggagcgggtggccccgcgctgcgcccgccctcgcctcacctggcgcaggtggacacctgcgcaggtgtgtgccctccggcccctgaagcatggccagcagcggcatggctgacagcgccaaccacctgcccttctttttcggcaacatcacccgggaggaggcagaagattacctggtccaggggggcatgagtgatgggctttatttgctgcgccagagccgcaactacctgggtggcttcgccctgtccgtggcccacgggaggaaggcacaccactacaccatcgagcgggagctgaatggcacctacgccatcgccggtggcaggacccatgccagccccgccgacctctgccactaccactcccaggagtctgatggcctggtctgcctcctcaagaagcccttcaaccggccccaaggggtgcagcccaagactgggccctttgaggatttgaaggaaaacctcatcagggaatatgtgaagcagacatggaacctgcagggtcaggctctggagcaggccatcatcagtcagaagcctcagctggagaagctgatcgctaccacagcccatgaaaaaatgccttggttccatggaaaaatctctcgggaagaatctgagcaaattgtcctgataggatcaaagacaaatggaaagttcctgatccgagccagagacaacaacggctcctacgccctgtgcctgctgcacgaagggaaggtgctgcactatcgcatcgacaaagacaagacagggaagctctccatccccgagggaaagaagttcgacacgctctggcagctagtcgagcattattcttataaagcagatggtttgttaagagttcttactgtcccatgtcaaaaaatcggcacacagggaaatgttaattttggaggccgtccacaacttccaggttcccatcctgcgacttggtcagcgggtggaataatctcaagaatcaaatcatactccttcccaaagcctggccacagaaagtcctcccctgcccaagggaaccggcaagagagtactgtgtcattcaatccgtatgagccagaacttgcaccctgggctgcagacaaaggcccccagagagaagccctacccatggacacagaggtgtacgagagcccctacgcggaccccgaggagatcaggcccaaggaggtttacctggaccgaaagctgctgacgctggaagacaaagaactgggctctggtaattttggaactgtgaaaaagggctactaccaaatgaaaaaagttgtgaaaaccgtggctgtgaaaatactgaaaaacgaggccaatgaccccgctcttaaagatgagttattagcagaagcaaatgtcatgcagcagctggacaacccgtacatcgtgcggatgatcgggatatgcgaggccgagtcctggatgctggttatggagatggcagaacttggtcccctcaataagtatttgcagcagaacagacatgtcaaggataagaacatcatagaactggttcatcaggtttccatgggcatgaagtacttggaggagagcaattttgtgcacagagatctggctgcaagaaatgtgttgctagttacccaacattacgccaagatcagtgatttcggactttccaaagcactgcgtgctgatgaaaactactacaaggcccagacccatggaaagtggcctgtcaagtggtacgctccggaatgcatcaactactacaagttctccagcaaaagcgatgtctggagctttggagtgttgatgtgggaagcattctcctatgggcagaagccatatcgagggatgaaaggaagtgaagtcaccgctatgttagagaaaggagagcggatggggtgccctgcagggtgtccaagagagatgtacgatctcatgaatctgtgctggacatacgatgtggaaaacaggcccggattcgcagcagtggaactgcggctgcgcaattactactatgacgtggtgaactaaccgctcccgcacctgtcggtggctgcctttgatcacaggagcaatcacaggaaaatgtatccagaggaattgattgtcagccacctccctctgccagtcgggagagccaggcttggatggaacatgcccacaacttgtcacccaaagcctgtcccaggactcaccctccacaaagcaaaggcagtcccgggagaaaagacggatggcaggatccaaggggctagctggatttgtttgttttcttgtctgtgtgattttcatacaggttatttttacgatctgtttccaaatccctttcatgtctttccacttctctgggtcccggggtgcatttgttactcatcgggcccagggacattgcagagtggcctagagcactctcaccccaagcggccttttccaaatgcccaaggatgccttagcatgtgactcctgaagggaaggcaaaggcagaggaatttggctgcttctacggccatgagactgatccctggccactgaaaagctttcctgacaataaaaatgttttgaggctttaaaaagaaaatcaagtttgaccagtgcagtttctaagcatgtagccagttaaggaaagaaagaaagaaaaaaaaaaaaggcctggatactgcttttgctgtctctgttatgagatggaagacttacatgtttgtgataaaaggggaccatgagaatgaattggcttggcttactttccccctgaaatcctctctcctgcagactgtcttgaagacctggtgactggtaaataaagccctgcatggaggctgcacagcaggggcaagaggcccatcccccagcatctcactgaggacagcttcaggctgccttcctctgaacgtggtccacaccttcctctcctccacagagagggtgccgccagaatcccctgtcgctttctgtgtctgcaatggggggcagcacagggatcaaagccatctaaagagtttccaaagaaagtattaattcagaacaagccaaagaccctgagcctcaccacaaacaggccttttggagtgtgaatttgagttgaagatacaagatcggagaatgattttctggtcttaactaatcctcatcttcatgtttgatctttaagaagtcatcacccattgatttcagttttgctgtacctcttgaaagttaaagagacatctcagcactttaggaggccgaggcgggtggatcacttgaggtaaggagtttgagactagcctggccaatatggtaaaaccccatctctactaaaaatacaaaaattagccgggcatggtggcatgtgtctgtagtcccagctactcgggaggctgaggcaggagaatcgcttgaacccaggaaacggaggtcgcagtgagccaagatcatgccactgcactccagcttgggcatcacagcgagactctgtcaaaacaaacaaacaaaaaaacaacttaaagaggtaatttagccatcattcttatgccagcagatataaataaacttggacccatctggtcttcagctaaacctgagacattttaaagtgcatggacagccatggacagcaggccctcctctaacaggggatgcaaggcatggagaaagacaatcagtacccaagctcagccacagaagacaggagtcactcatataacttgtgtttagaagtttttggtagccacgcacactttctgaaatcacactatctggtggtttaatcatatttttaaagacagaatccctgagtgctgagcagattctcaaaacacatttagaatccctgaaattagaaagatcaatgacaaaatatctgtcagccaggccacaaacaggtgtaaaattatgaaaggagtggttggatgtgccaagtttggtaaagtggtgactgcatctgagaaagaggctgtgaggctgaactcttggtggcttccttctgtaacttccagagggagtcttcaacacaggccccgtgctcgtaggaatacggtagcacctatgtaggaagtgcgtggagttttctgtcttctttctgtgtgatttttggcctttttatcagcacttctcccctcccaggagcctggggatgccaaacatccagaatgtgatgggacaagatgggggcaggggcctcacctccctgcagaggtccggccaggtctccttgtccctggacaatctcctgagcctctctgcttggtggagcaggcacctgtgtgcagaattcccactgtggccagcacgaggaagtcttttctagtgaaaatgtgtcttgtggtcaggaataattatcctttcccctgtagccaccaaggagggcaaatagagaaaggtaacctaattgaaggattggtcatgtgaaaagggctacatttgggaagctgggaaaggcctccaggcttctagagcagctagcttgggctggattctcatacccaggctgccccttggattgttctacccaagcttttccctggggtctgggctcactccataaggtaaggtgccttttaccttatggtccttctttagcaggtaacaaaggagcatcaggggcaggctgccctggtggcatcacactggctagtgaggccgtgaatatcttgtcccccagcagggccgacagtttctatcacagaaaacagtgtgttcagtggtgaaaatcgttgcatgcatgttttcatctgagcgtgtccttctcccatactccctatcagccagccctgcctgtagctgctgtatggtgattgcacttggacatcagtccaatgactgcaagtcggcctggattttcacttgcagaggctacagctgcattgtcaggtctcccagccctgcagagagctccctccactggttagcagtgtgttgtgttttccattcatttcagaagagctacattgtgtcactggacatttttaaaaactgtgatttttaataaaaatttaaaatttgctttgtgatgattttca

SEQ ID NO: 316586 - DNA, 5152 bp, Homo sapiens
gggccgattccgcgggcctcgcccggcgcttcagccgattcccgcccagctccgggctcatgggcgcggtcagcagggcgggccagggcggcggggcgcgacactgggaggaagtgcgggccgcctgcccgggcgcgttaaggaagttgcccaaaatgaggaagagccgcgggcccggcggctgaggccaccccggcggcggctggagagcgaggaggagcgggtggccccgcgctgcgcccgccctcgcctcacctggcgcaggtggacacctgcgcaggtgtgtgccctccggcccctgaagcatggccagcagcggcatggctgacagcgccaaccacctgcccttctttttcggcaacatcacccgggaggaggcagaagattacctggtccaggggggcatgagtgatgggctttatttgctgcgccagagccgcaactacctgggtggcttcgccctgtccgtggcccacgggaggaaggcacaccactacaccatcgagcgggagctgaatggcacctacgccatcgccggtggcaggacccatgccagccccgccgacctctgccactaccactcccaggagtctgatggcctggtctgcctcctcaagaagcccttcaaccggccccaaggggtgcagcccaagactgggccctttgaggatttgaaggaaaacctcatcagggaatatgtgaagcagacatggaacctgcagggtcaggctctggagcaggccatcatcagtcagaagcctcagctggagaagctgatcgctaccacagcccatgaaaaaatgccttggttccatggaaaaatctctcgggaagaatctgagcaaattgtcctgataggatcaaagacaaatggaaagttcctgatccgagccagagacaacaacggctcctacgccctgtgcctgctgcacgaagggaaggtgctgcactatcgcatcgacaaagacaagacagggaagctctccatccccgagggaaagaagttcgacacgctctggcagctagtcgagcattattcttataaagcagatggtttgttaagagttcttactgtcccatgtcaaaaaatcggcacacagggaaatgttaattttggaggccgtccacaacttccaggttcccatcctgcgacttggtcagcgggtggaataatctcaagaatcaaatcatactccttcccaaagcctggccacagaaagtcctcccctgcccaagggaaccggcaagagagtactgtgtcattcaatccgtatgagccagaacttgcaccctgggctgcagacaaaggcccccagagagaagccctacccatggacacagaggtgtacgagagcccctacgcggaccccgaggagatcaggcccaaggaggtttacctggaccgaaagctgctgacgctggaagacaaagaactgggctctggtaattttggaactgtgaaaaagggctactaccaaatgaaaaaagttgtgaaaaccgtggctgtgaaaatactgaaaaacgaggccaatgaccccgctcttaaagatgagttattagcagaagcaaatgtcatgcagcagctggacaacccgtacatcgtgcggatgatcgggatatgcgaggccgagtcctggatgctggttatggagatggcagaacttggtcccctcaataagtatttgcagcagaacagacatgtcaaggataagaacatcatagaactggttcatcaggtttccatgggcatgaagtacttggaggagagcaattttgtgcacagagatctggctgcaagaaatgtgttgctagttacccaacattacgccaagatcagtgatttcggactttccaaagcactgcgtgctgatgaaaactactacaaggcccagacccatggaaagtggcctgtcaagtggtacgctccggaatgcatcaactactacaagttctccagcaaaagcgatgtctggagctttggagtgttgatgtgggaagcattctcctatgggcagaagccatatcgagggatgaaaggaagtgaagtcaccgctatgttagagaaaggagagcggatggggtgccctgcagggtgtccaagagagatgtacgatctcatgaatctgtgctggacatacgatgtggaaaacaggcccggattcgcagcagtggaactgcggctgcgcaattactactatgacgtggtgaactaaccgctcccgcacctgtcggtggctgcctttgatcacaggagcaatcacaggaaaatgtatccagaggaattgattgtcagccacctccctctgccagtcgggagagccaggcttggatggaacatgcccacaacttgtcacccaaagcctgtcccaggactcaccctccacaaagcaaaggcagtcccgggagaaaagacggatggcaggatccaaggggctagctggatttgtttgttttcttgtctgtgtgattttcatacaggttatttttacgatctgtttccaaatccctttcatgtctttccacttctctgggtcccggggtgcatttgttactcatcgggcccagggacattgcagagtggcctagagcactctcaccccaagcggccttttccaaatgcccaaggatgccttagcatgtgactcctgaagggaaggcaaaggcagaggaatttggctgcttctacggccatgagactgatccctggccactgaaaagctttcctgacaataaaaatgttttgaggctttaaaaagaaaatcaagtttgaccagtgcagtttctaagcatgtagccagttaaggaaagaaagaaagaaaaaaaaaaaaggcctggatactgcttttgctgtctctgttatgagatggaagacttacatgtttgtgataaaaggggaccatgagaatgaattggcttggcttactttccccctgaaatcctctctcctgcagactgtcttgaagacctggtgactggtaaataaagccctgcatggaggctgcacagcaggggcaagaggcccatcccccagcatctcactgaggacagcttcaggctgccttcctctgaacgtggtccacaccttcctctcctccacagagagggtgccgccagaatcccctgtcgctttctgtgtctgcaatggggggcagcacagggatcaaagccatctaaagagtttccaaagaaagtattaattcagaacaagccaaagaccctgagcctcaccacaaacaggccttttggagtgtgaatttgagttgaagatacaagatcggagaatgattttctggtcttaactaatcctcatcttcatgtttgatctttaagaagtcatcacccattgatttcagttttgctgtacctcttgaaagttaaagagacatctcagcactttaggaggccgaggcgggtggatcacttgaggtaaggagtttgagactagcctggccaatatggtaaaaccccatctctactaaaaatacaaaaattagccgggcatggtggcatgtgtctgtagtcccagctactcgggaggctgaggcaggagaatcgcttgaacccaggaaacggaggtcgcagtgagccaagatcatgccactgcactccagcttgggcatcacagcgagactctgtcaaaacaaacaaacaaaaaaacaacttaaagaggtaatttagccatcattcttatgccagcagatataaataaacttggacccatctggtcttcagctaaacctgagacattttaaagtgcatggacagccatggacagcaggccctcctctaacaggggatgcaaggcatggagaaagacaatcagtacccaagctcagccacagaagacaggagtcactcatataacttgtgtttagaagtttttggtagccacgcacactttctgaaatcacactatctggtggtttaatcatatttttaaagacagaatccctgagtgctgagcagattctcaaaacacatttagaatccctgaaattagaaagatcaatgacaaaatatctgtcagccaggccacaaacaggtgtaaaattatgaaaggagtggttggatgtgccaagtttggtaaagtggtgactgcatctgagaaagaggctgtgaggctgaactcttggtggcttccttctgtaacttccagagggagtcttcaacacaggccccgtgctcgtaggaatacggtagcacctatgtaggaagtgcgtggagttttctgtcttctttctgtgtgatttttggcctttttatcagcacttctcccctcccaggagcctggggatgccaaacatccagaatgtgatgggacaagatgggggcaggggcctcacctccctgcagaggtccggccaggtctccttgtccctggacaatctcctgagcctctctgcttggtggagcaggcacctgtgtgcagaattcccactgtggccagcacgaggaagtcttttctagtgaaaatgtgtcttgtggtcaggaataattatcctttcccctgtagccaccaaggagggcaaatagagaaaggtaacctaattgaaggattggtcatgtgaaaagggctacatttgggaagctgggaaaggcctccaggcttctagagcagctagcttgggctggattctcatacccaggctgccccttggattgttctacccaagcttttccctggggtctgggctcactccataaggtaaggtgccttttaccttatggtccttctttagcaggtaacaaaggagcatcaggggcaggctgccctggtggcatcacactggctagtgaggccgtgaatatcttgtcccccagcagggccgacagtttctatcacagaaaacagtgtgttcagtggtgaaaatcgttgcatgcatgttttcatctgagcgtgtccttctcccatactccctatcagccagccctgcctgtagctgctgtatggtgattgcacttggacatcttttcacttgcagaggctacagctgcattgtcaggtctcccagccctgcagagagctccctccactggttagcagtgtgttgtgttttccattcatttcagaagagctacattgtgtcactggacatttttaaaaactgtgatttttaataaaaatttaaaatttgctttgtgatgattttca

SEQ ID NO: 316587 - DNA, 4522 bp, Homo sapiens
gggccgattccgcgggcctcgcccggcgcttcagccgattcccgcccagctccgggctcatgggcgcggtcagcagggcgggccagggcggcggggcgcgacactgggaggaagtgcgggccgcctgcccgggcgcgttaaggaagttgcccaaaatgaggaagagccgcgggcccggcggctgaggccaccccggcggcggctggagagcgaggaggagcgggtggccccgcgctgcgcccgccctcgcctcacctggcgcaggtggacacctgcgcaggtgtgtgccctccggcccctgaagcatggccagcagcggcatggctgacagcgccaaccacctgcccttctttttcggcaacatcacccgggaggaggcagaagattacctggtccaggggggcatgagtgatgggctttatttgctgcgccagagccgcaactacctgggtggcttcgccctgtccgtggcccacgggaggaaggcacaccactacaccatcgagcgggagctgaatggcacctacgccatcgccggtggcaggacccatgccagccccgccgacctctgccactaccactcccaggagtctgatggcctggtctgcctcctcaagaagcccttcaaccggccccaaggggtgcagcccaagactgggccctttgaggatttgaaggaaaacctcatcagggaatatgtgaagcagacatggaacctgcagggtcaggctctggagcaggccatcatcagtcagaagcctcagctggagaagctgatcgctaccacagcccatgaaaaaatgccttggttccatggaaaaatctctcgggaagaatctgagcaaattgtcctgataggatcaaagacaaatggaaagttcctgatccgagccagagacaacaacggctcctacgccctgtgcctgctgcacgaagggaaggtgctgcactatcgcatcgacaaagacaagacagggaagctctccatccccgagggaaagaagttcgacacgctctggcagctagtcgagcattattcttataaagcagatggtttgttaagagttcttactgtcccatgtcaaaaaatcggcacacagggaaatgttaattttggaggccgtccacaacttccaggttcccatcctgcgacttggtcagcgggtggaataatctcaagaatcaaatcatactccttcccaaagcctggccacagaaagtcctcccctgcccaagggaaccggcaagagagtactgtgtcattcaatccgtatgagccagaacttgcaccctgggctgcagacaaaggcccccagagagaagccctacccatggacacagaggtgtacgagagcccctacgcggaccccgaggagatcaggcccaaggaggtttacctggaccgaaagctgctgacgctggaagacaaagaactgggctctggtaattttggaactgtgaaaaagggctactaccaaatgaaaaaagttgtgaaaaccgtggctgtgaaaatactgaaaaacgaggccaatgaccccgctcttaaagatgagttattagcagaagcaaatgtcatgcagcagctggacaacccgtacatcgtgcggatgatcgggatatgcgaggccgagtcctggatgctggttatggagatggcagaacttggtcccctcaataagtatttgcagcagaacagacatgtcaaggataagaacatcatagaactggttcatcaggtttccatgggcatgaagtacttggaggagagcaattttgtgcacagagatctggctgcaagaaatgtgttgctagttacccaacattacgccaagatcagtgatttcggactttccaaagcactgcgtgctgatgaaaactactacaaggcccagacccatggaaagtggcctgtcaagtggtacgctccggaatgcatcaactactacaagttctccagcaaaagcgatgtctggagctttggagtgttgatgtgggaagcattctcctatgggcagaagccatatcgagggatgaaaggaagtgaagtcaccgctatgttagagaaaggagagcggatggggtgccctgcagggtgtccaagagagatgtacgatctcatgaatctgtgctggacatacgatgtggaaaacaggcccggattcgcagcagtggaactgcggctgcgcaattactactatgacgtggtgaactaaccgctcccgcacctgtcggtggctgcctttgatcacaggagcaatcacaggaaaatgtatccagaggaattgattgtcagccacctccctctgccagtcgggagagccaggcttggatggaacatgcccacaacttgtcacccaaagcctgtcccaggactcaccctccacaaagcaaaggcagtcccgggagaaaagacggatggcaggatccaaggggctagctggatttgtttgttttcttgtctgtgtgattttcatacaggttatttttacgatctgtttccaaatccctttcatgtctttccacttctctgggtcccggggtgcatttgttactcatcgggcccagggacattgcagagtggcctagagcactctcaccccaagcggccttttccaaatgcccaaggatgccttagcatgtgactcctgaagggaaggcaaaggcagaggaatttggctgcttctacggccatgagactgatccctggccactgaaaagctttcctgacaataaaaatgttttgaggctttaaaaagaaaatcaagtttgaccagtgcagtttctaagcatgtagccagttaaggaaagaaagaaagaaaaaaaaaaaaggcctggatactgcttttgctgtctctgttatgagatggaagacttacatgtttgtgataaaaggggaccatgagaatgaattggcttggcttactttccccctgaaatcctctctcctgcagactgtcttgaagacctggtgactggtaaataaagccctgcatggaggctgcacagcaggggcaagaggcccatcccccagcatctcactgaggacagcttcaggctgccttcctctgaacgtggtccacaccttcctctcctccacagagagggtgccgccagaatcccctgtcgctttctgtgtctgcaatggggggcagcacagggatcaaagccatctaaagagtttccaaagaaagtattaattcagaacaagccaaagaccctgagcctcaccacaaacaggccttttggagtgtgaatttgagttgaagatacaagatcggagaatgattttctggtcttaactaatcctcatcttcatgtttgatctttaagaagtcatcacccattgatttcagttttgctgtacctcttgaaagttaaagagacatctcagcactttaggaggccgaggcgggtggatcacttgaggtaaggagtttgagactagcctggccaatatggtaaaaccccatctctactaaaaatacaaaaattagccgggcatggtggcatgtgtctgtagtcccagctactcgggaggctgaggcaggagaatcgcttgaacccaggaaacggaggtcgcagtgagccaagatcatgccactgcactccagcttgggcatcacagcgagactctgtcaaaacaaacaaacaaaaaaacaacttaaagaggtaatttagccatcattcttatgccagcagatataaataaacttggacccatctggtcttcagctaaacctgagacattttaaagtgcatggacagccatggacagcaggccctcctctaacaggggatgcaaggcatggagaaagacaatcagtacccaagctcagccacagaagacaggagtcactcatataacttgtgtttagaagtttttggtagccacgcacactttctgaaatcacactatctggtggtttaatcatatttttaaagacagaatccctgagtgctgagcagattctcaaaacacatttagaatccctgaaattagaaagatcaatgacaaaatatctgtcagccaggccacaaacaggtgtaaaattatgaaaggagtggttggatgtgccaagtttggtaaagtggtgactgcatctgagaaagaggctgtgaggctgaactcttggtggcttccttctgtaacttccagagggagtcttcaacacaggccccgtgctcgtaggaatacggtagcacctatgtaggaagtgcgtggagttttctgtcttctttctgtgtgatttttggcctttttatcagcacttctcccctcccaggagcctggggatgccaaacatccagaatgtgatgggacaagatgggggcaggggcctcacctccctgcagaggtccggccaggtctccttgtccctggacaatctcctgagctccctccactggttagcagtgtgttgtgttttccattcatttcagaagagctacattgtgtcactggacatttttaaaaactgtgatttttaataaaaatttaaaatttgctttgtgatgattttca

SEQ ID NO: 316588 - DNA, 5325 bp, Homo sapiens
gggccgattccgcgggcctcgcccggcgcttcagccgattcccgcccagctccgggctcatgggcgcggtcagcagggcgggccagggcggcggggcgcgacactgggaggaagtgcgggccgcctgcccgggcgcgttaaggaagttgcccaaaatgaggaagagccgcgggcccggcggctgaggccaccccggcggcggctggagagcgaggaggagcgggtggccccgcgctgcgcccgccctcgcctcacctggcgcaggtaggtgtggccgcgtcccctacccggccgggactttctggtaaggagaggaggttacggggaacgacgcgctgctttcatgccctttcttgttctaccttcatcggccgaggtaaaagtgctgaaaccatgtgaataaaatacaggtggacacctgcgcaggtgtgtgccctccggcccctgaagcatggccagcagcggcatggctgacagcgccaaccacctgcccttctttttcggcaacatcacccgggaggaggcagaagattacctggtccaggggggcatgagtgatgggctttatttgctgcgccagagccgcaactacctgggtggcttcgccctgtccgtggcccacgggaggaaggcacaccactacaccatcgagcgggagctgaatggcacctacgccatcgccggtggcaggacccatgccagccccgccgacctctgccactaccactcccaggagtctgatggcctggtctgcctcctcaagaagcccttcaaccggccccaaggggtgcagcccaagactgggccctttgaggatttgaaggaaaacctcatcagggaatatgtgaagcagacatggaacctgcagggtcaggctctggagcaggccatcatcagtcagaagcctcagctggagaagctgatcgctaccacagcccatgaaaaaatgccttggttccatggaaaaatctctcgggaagaatctgagcaaattgtcctgataggatcaaagacaaatggaaagttcctgatccgagccagagacaacaacggctcctacgccctgtgcctgctgcacgaagggaaggtgctgcactatcgcatcgacaaagacaagacagggaagctctccatccccgagggaaagaagttcgacacgctctggcagctagtcgagcattattcttataaagcagatggtttgttaagagttcttactgtcccatgtcaaaaaatcggcacacagggaaatgttaattttggaggccgtccacaacttccaggttcccatcctgcgacttggtcagcgggtggaataatctcaagaatcaaatcatactccttcccaaagcctggccacagaaagtcctcccctgcccaagggaaccggcaagagagtactgtgtcattcaatccgtatgagccagaacttgcaccctgggctgcagacaaaggcccccagagagaagccctacccatggacacagaggtgtacgagagcccctacgcggaccccgaggagatcaggcccaaggaggtttacctggaccgaaagctgctgacgctggaagacaaagaactgggctctggtaattttggaactgtgaaaaagggctactaccaaatgaaaaaagttgtgaaaaccgtggctgtgaaaatactgaaaaacgaggccaatgaccccgctcttaaagatgagttattagcagaagcaaatgtcatgcagcagctggacaacccgtacatcgtgcggatgatcgggatatgcgaggccgagtcctggatgctggttatggagatggcagaacttggtcccctcaataagtatttgcagcagaacagacatgtcaaggataagaacatcatagaactggttcatcaggtttccatgggcatgaagtacttggaggagagcaattttgtgcacagagatctggctgcaagaaatgtgttgctagttacccaacattacgccaagatcagtgatttcggactttccaaagcactgcgtgctgatgaaaactactacaaggcccagacccatggaaagtggcctgtcaagtggtacgctccggaatgcatcaactactacaagttctccagcaaaagcgatgtctggagctttggagtgttgatgtgggaagcattctcctatgggcagaagccatatcgagggatgaaaggaagtgaagtcaccgctatgttagagaaaggagagcggatggggtgccctgcagggtgtccaagagagatgtacgatctcatgaatctgtgctggacatacgatgtggaaaacaggcccggattcgcagcagtggaactgcggctgcgcaattactactatgacgtggtgaactaaccgctcccgcacctgtcggtggctgcctttgatcacaggagcaatcacaggaaaatgtatccagaggaattgattgtcagccacctccctctgccagtcgggagagccaggcttggatggaacatgcccacaacttgtcacccaaagcctgtcccaggactcaccctccacaaagcaaaggcagtcccgggagaaaagacggatggcaggatccaaggggctagctggatttgtttgttttcttgtctgtgtgattttcatacaggttatttttacgatctgtttccaaatccctttcatgtctttccacttctctgggtcccggggtgcatttgttactcatcgggcccagggacattgcagagtggcctagagcactctcaccccaagcggccttttccaaatgcccaaggatgccttagcatgtgactcctgaagggaaggcaaaggcagaggaatttggctgcttctacggccatgagactgatccctggccactgaaaagctttcctgacaataaaaatgttttgaggctttaaaaagaaaatcaagtttgaccagtgcagtttctaagcatgtagccagttaaggaaagaaagaaagaaaaaaaaaaaaggcctggatactgcttttgctgtctctgttatgagatggaagacttacatgtttgtgataaaaggggaccatgagaatgaattggcttggcttactttccccctgaaatcctctctcctgcagactgtcttgaagacctggtgactggtaaataaagccctgcatggaggctgcacagcaggggcaagaggcccatcccccagcatctcactgaggacagcttcaggctgccttcctctgaacgtggtccacaccttcctctcctccacagagagggtgccgccagaatcccctgtcgctttctgtgtctgcaatggggggcagcacagggatcaaagccatctaaagagtttccaaagaaagtattaattcagaacaagccaaagaccctgagcctcaccacaaacaggccttttggagtgtgaatttgagttgaagatacaagatcggagaatgattttctggtcttaactaatcctcatcttcatgtttgatctttaagaagtcatcacccattgatttcagttttgctgtacctcttgaaagttaaagagacatctcagcactttaggaggccgaggcgggtggatcacttgaggtaaggagtttgagactagcctggccaatatggtaaaaccccatctctactaaaaatacaaaaattagccgggcatggtggcatgtgtctgtagtcccagctactcgggaggctgaggcaggagaatcgcttgaacccaggaaacggaggtcgcagtgagccaagatcatgccactgcactccagcttgggcatcacagcgagactctgtcaaaacaaacaaacaaaaaaacaacttaaagaggtaatttagccatcattcttatgccagcagatataaataaacttggacccatctggtcttcagctaaacctgagacattttaaagtgcatggacagccatggacagcaggccctcctctaacaggggatgcaaggcatggagaaagacaatcagtacccaagctcagccacagaagacaggagtcactcatataacttgtgtttagaagtttttggtagccacgcacactttctgaaatcacactatctggtggtttaatcatatttttaaagacagaatccctgagtgctgagcagattctcaaaacacatttagaatccctgaaattagaaagatcaatgacaaaatatctgtcagccaggccacaaacaggtgtaaaattatgaaaggagtggttggatgtgccaagtttggtaaagtggtgactgcatctgagaaagaggctgtgaggctgaactcttggtggcttccttctgtaacttccagagggagtcttcaacacaggccccgtgctcgtaggaatacggtagcacctatgtaggaagtgcgtggagttttctgtcttctttctgtgtgatttttggcctttttatcagcacttctcccctcccaggagcctggggatgccaaacatccagaatgtgatgggacaagatgggggcaggggcctcacctccctgcagaggtccggccaggtctccttgtccctggacaatctcctgagcctctctgcttggtggagcaggcacctgtgtgcagaattcccactgtggccagcacgaggaagtcttttctagtgaaaatgtgtcttgtggtcaggaataattatcctttcccctgtagccaccaaggagggcaaatagagaaaggtaacctaattgaaggattggtcatgtgaaaagggctacatttgggaagctgggaaaggcctccaggcttctagagcagctagcttgggctggattctcatacccaggctgccccttggattgttctacccaagcttttccctggggtctgggctcactccataaggtaaggtgccttttaccttatggtccttctttagcaggtaacaaaggagcatcaggggcaggctgccctggtggcatcacactggctagtgaggccgtgaatatcttgtcccccagcagggccgacagtttctatcacagaaaacagtgtgttcagtggtgaaaatcgttgcatgcatgttttcatctgagcgtgtccttctcccatactccctatcagccagccctgcctgtagctgctgtatggtgattgcacttggacatcagtccaatgactgcaagtcggcctggattttcacttgcagaggctacagctgcattgtcaggtctcccagccctgcagagagctccctccactggttagcagtgtgttgtgttttccattcatttcagaagagctacattgtgtcactggacatttttaaaaactgtgatttttaataaaaatttaaaatttgctttgtgatgattttca

SEQ ID NO: 316589 - DNA, 5291 bp, Homo sapiens
gggccgattccgcgggcctcgcccggcgcttcagccgattcccgcccagctccgggctcatgggcgcggtcagcagggcgggccagggcggcggggcgcgacactgggaggaagtgcgggccgcctgcccgggcgcgttaaggaagttgcccaaaatgaggaagagccgcgggcccggcggctgaggccaccccggcggcggctggagagcgaggaggagcgggtggccccgcgctgcgcccgccctcgcctcacctggcgcaggtaggtgtggccgcgtcccctacccggccgggactttctggtaaggagaggaggttacggggaacgacgcgctgctttcatgccctttcttgttctaccttcatcggccgaggtggacacctgcgcaggtgtgtgccctccggcccctgaagcatggccagcagcggcatggctgacagcgccaaccacctgcccttctttttcggcaacatcacccgggaggaggcagaagattacctggtccaggggggcatgagtgatgggctttatttgctgcgccagagccgcaactacctgggtggcttcgccctgtccgtggcccacgggaggaaggcacaccactacaccatcgagcgggagctgaatggcacctacgccatcgccggtggcaggacccatgccagccccgccgacctctgccactaccactcccaggagtctgatggcctggtctgcctcctcaagaagcccttcaaccggccccaaggggtgcagcccaagactgggccctttgaggatttgaaggaaaacctcatcagggaatatgtgaagcagacatggaacctgcagggtcaggctctggagcaggccatcatcagtcagaagcctcagctggagaagctgatcgctaccacagcccatgaaaaaatgccttggttccatggaaaaatctctcgggaagaatctgagcaaattgtcctgataggatcaaagacaaatggaaagttcctgatccgagccagagacaacaacggctcctacgccctgtgcctgctgcacgaagggaaggtgctgcactatcgcatcgacaaagacaagacagggaagctctccatccccgagggaaagaagttcgacacgctctggcagctagtcgagcattattcttataaagcagatggtttgttaagagttcttactgtcccatgtcaaaaaatcggcacacagggaaatgttaattttggaggccgtccacaacttccaggttcccatcctgcgacttggtcagcgggtggaataatctcaagaatcaaatcatactccttcccaaagcctggccacagaaagtcctcccctgcccaagggaaccggcaagagagtactgtgtcattcaatccgtatgagccagaacttgcaccctgggctgcagacaaaggcccccagagagaagccctacccatggacacagaggtgtacgagagcccctacgcggaccccgaggagatcaggcccaaggaggtttacctggaccgaaagctgctgacgctggaagacaaagaactgggctctggtaattttggaactgtgaaaaagggctactaccaaatgaaaaaagttgtgaaaaccgtggctgtgaaaatactgaaaaacgaggccaatgaccccgctcttaaagatgagttattagcagaagcaaatgtcatgcagcagctggacaacccgtacatcgtgcggatgatcgggatatgcgaggccgagtcctggatgctggttatggagatggcagaacttggtcccctcaataagtatttgcagcagaacagacatgtcaaggataagaacatcatagaactggttcatcaggtttccatgggcatgaagtacttggaggagagcaattttgtgcacagagatctggctgcaagaaatgtgttgctagttacccaacattacgccaagatcagtgatttcggactttccaaagcactgcgtgctgatgaaaactactacaaggcccagacccatggaaagtggcctgtcaagtggtacgctccggaatgcatcaactactacaagttctccagcaaaagcgatgtctggagctttggagtgttgatgtgggaagcattctcctatgggcagaagccatatcgagggatgaaaggaagtgaagtcaccgctatgttagagaaaggagagcggatggggtgccctgcagggtgtccaagagagatgtacgatctcatgaatctgtgctggacatacgatgtggaaaacaggcccggattcgcagcagtggaactgcggctgcgcaattactactatgacgtggtgaactaaccgctcccgcacctgtcggtggctgcctttgatcacaggagcaatcacaggaaaatgtatccagaggaattgattgtcagccacctccctctgccagtcgggagagccaggcttggatggaacatgcccacaacttgtcacccaaagcctgtcccaggactcaccctccacaaagcaaaggcagtcccgggagaaaagacggatggcaggatccaaggggctagctggatttgtttgttttcttgtctgtgtgattttcatacaggttatttttacgatctgtttccaaatccctttcatgtctttccacttctctgggtcccggggtgcatttgttactcatcgggcccagggacattgcagagtggcctagagcactctcaccccaagcggccttttccaaatgcccaaggatgccttagcatgtgactcctgaagggaaggcaaaggcagaggaatttggctgcttctacggccatgagactgatccctggccactgaaaagctttcctgacaataaaaatgttttgaggctttaaaaagaaaatcaagtttgaccagtgcagtttctaagcatgtagccagttaaggaaagaaagaaagaaaaaaaaaaaaggcctggatactgcttttgctgtctctgttatgagatggaagacttacatgtttgtgataaaaggggaccatgagaatgaattggcttggcttactttccccctgaaatcctctctcctgcagactgtcttgaagacctggtgactggtaaataaagccctgcatggaggctgcacagcaggggcaagaggcccatcccccagcatctcactgaggacagcttcaggctgccttcctctgaacgtggtccacaccttcctctcctccacagagagggtgccgccagaatcccctgtcgctttctgtgtctgcaatggggggcagcacagggatcaaagccatctaaagagtttccaaagaaagtattaattcagaacaagccaaagaccctgagcctcaccacaaacaggccttttggagtgtgaatttgagttgaagatacaagatcggagaatgattttctggtcttaactaatcctcatcttcatgtttgatctttaagaagtcatcacccattgatttcagttttgctgtacctcttgaaagttaaagagacatctcagcactttaggaggccgaggcgggtggatcacttgaggtaaggagtttgagactagcctggccaatatggtaaaaccccatctctactaaaaatacaaaaattagccgggcatggtggcatgtgtctgtagtcccagctactcgggaggctgaggcaggagaatcgcttgaacccaggaaacggaggtcgcagtgagccaagatcatgccactgcactccagcttgggcatcacagcgagactctgtcaaaacaaacaaacaaaaaaacaacttaaagaggtaatttagccatcattcttatgccagcagatataaataaacttggacccatctggtcttcagctaaacctgagacattttaaagtgcatggacagccatggacagcaggccctcctctaacaggggatgcaaggcatggagaaagacaatcagtacccaagctcagccacagaagacaggagtcactcatataacttgtgtttagaagtttttggtagccacgcacactttctgaaatcacactatctggtggtttaatcatatttttaaagacagaatccctgagtgctgagcagattctcaaaacacatttagaatccctgaaattagaaagatcaatgacaaaatatctgtcagccaggccacaaacaggtgtaaaattatgaaaggagtggttggatgtgccaagtttggtaaagtggtgactgcatctgagaaagaggctgtgaggctgaactcttggtggcttccttctgtaacttccagagggagtcttcaacacaggccccgtgctcgtaggaatacggtagcacctatgtaggaagtgcgtggagttttctgtcttctttctgtgtgatttttggcctttttatcagcacttctcccctcccaggagcctggggatgccaaacatccagaatgtgatgggacaagatgggggcaggggcctcacctccctgcagaggtccggccaggtctccttgtccctggacaatctcctgagcctctctgcttggtggagcaggcacctgtgtgcagaattcccactgtggccagcacgaggaagtcttttctagtgaaaatgtgtcttgtggtcaggaataattatcctttcccctgtagccaccaaggagggcaaatagagaaaggtaacctaattgaaggattggtcatgtgaaaagggctacatttgggaagctgggaaaggcctccaggcttctagagcagctagcttgggctggattctcatacccaggctgccccttggattgttctacccaagcttttccctggggtctgggctcactccataaggtaaggtgccttttaccttatggtccttctttagcaggtaacaaaggagcatcaggggcaggctgccctggtggcatcacactggctagtgaggccgtgaatatcttgtcccccagcagggccgacagtttctatcacagaaaacagtgtgttcagtggtgaaaatcgttgcatgcatgttttcatctgagcgtgtccttctcccatactccctatcagccagccctgcctgtagctgctgtatggtgattgcacttggacatcagtccaatgactgcaagtcggcctggattttcacttgcagaggctacagctgcattgtcaggtctcccagccctgcagagagctccctccactggttagcagtgtgttgtgttttccattcatttcagaagagctacattgtgtcactggacatttttaaaaactgtgatttttaataaaaatttaaaatttgctttgtgatgattttca

SEQ ID NO: 316590 - DNA, 4997 bp, Homo sapiens
gcctgtcttgtgctttctctctgtttcagctgttttccttttaagatactcctctcagatttgtgtgcttcttcccttcccacattctatactgcccagcgcctgggattccagatctgcgtttgaatccaggaaagggaggtggacacctgcgcaggtgtgtgccctccggcccctgaagcatggccagcagcggcatggctgacagcgccaaccacctgcccttctttttcggcaacatcacccgggaggaggcagaagattacctggtccaggggggcatgagtgatgggctttatttgctgcgccagagccgcaactacctgggtggcttcgccctgtccgtggcccacgggaggaaggcacaccactacaccatcgagcgggagctgaatggcacctacgccatcgccggtggcaggacccatgccagccccgccgacctctgccactaccactcccaggagtctgatggcctggtctgcctcctcaagaagcccttcaaccggccccaaggggtgcagcccaagactgggccctttgaggatttgaaggaaaacctcatcagggaatatgtgaagcagacatggaacctgcagggtcaggctctggagcaggccatcatcagtcagaagcctcagctggagaagctgatcgctaccacagcccatgaaaaaatgccttggttccatggaaaaatctctcgggaagaatctgagcaaattgtcctgataggatcaaagacaaatggaaagttcctgatccgagccagagacaacaacggctcctacgccctgtgcctgctgcacgaagggaaggtgctgcactatcgcatcgacaaagacaagacagggaagctctccatccccgagggaaagaagttcgacacgctctggcagctagtcgagcattattcttataaagcagatggtttgttaagagttcttactgtcccatgtcaaaaaatcggcacacagggaaatgttaattttggaggccgtccacaacttccaggttcccatcctgcgacttggtcagcgggtggaataatctcaagaatcaaatcatactccttcccaaagcctggccacagaaagtcctcccctgcccaagggaaccggcaagagagtactgtgtcattcaatccgtatgagccagaacttgcaccctgggctgcagacaaaggcccccagagagaagccctacccatggacacagaggtgtacgagagcccctacgcggaccccgaggagatcaggcccaaggaggtttacctggaccgaaagctgctgacgctggaagacaaagaactgggctctggtaattttggaactgtgaaaaagggctactaccaaatgaaaaaagttgtgaaaaccgtggctgtgaaaatactgaaaaacgaggccaatgaccccgctcttaaagatgagttattagcagaagcaaatgtcatgcagcagctggacaacccgtacatcgtgcggatgatcgggatatgcgaggccgagtcctggatgctggttatggagatggcagaacttggtcccctcaataagtatttgcagcagaacagacatgtcaaggataagaacatcatagaactggttcatcaggtttccatgggcatgaagtacttggaggagagcaattttgtgcacagagatctggctgcaagaaatgtgttgctagttacccaacattacgccaagatcagtgatttcggactttccaaagcactgcgtgctgatgaaaactactacaaggcccagacccatggaaagtggcctgtcaagtggtacgctccggaatgcatcaactactacaagttctccagcaaaagcgatgtctggagctttggagtgttgatgtgggaagcattctcctatgggcagaagccatatcgagggatgaaaggaagtgaagtcaccgctatgttagagaaaggagagcggatggggtgccctgcagggtgtccaagagagatgtacgatctcatgaatctgtgctggacatacgatgtggaaaacaggcccggattcgcagcagtggaactgcggctgcgcaattactactatgacgtggtgaactaaccgctcccgcacctgtcggtggctgcctttgatcacaggagcaatcacaggaaaatgtatccagaggaattgattgtcagccacctccctctgccagtcgggagagccaggcttggatggaacatgcccacaacttgtcacccaaagcctgtcccaggactcaccctccacaaagcaaaggcagtccctgtgtgattttcatacaggttatttttacgatctgtttccaaatccctttcatgtctttccacttctctgggtcccggggtgcatttgttactcatcgggcccagggacattgcagagtggcctagagcactctcaccccaagcggccttttccaaatgcccaaggatgccttagcatgtgactcctgaagggaaggcaaaggcagaggaatttggctgcttctacggccatgagactgatccctggccactgaaaagctttcctgacaataaaaatgttttgaggctttaaaaagaaaatcaagtttgaccagtgcagtttctaagcatgtagccagttaaggaaagaaagaaagaaaaaaaaaaaaggcctggatactgcttttgctgtctctgttatgagatggaagacttacatgtttgtgataaaaggggaccatgagaatgaattggcttggcttactttccccctgaaatcctctctcctgcagactgtcttgaagacctggtgactggtaaataaagccctgcatggaggctgcacagcaggggcaagaggcccatcccccagcatctcactgaggacagcttcaggctgccttcctctgaacgtggtccacaccttcctctcctccacagagagggtgccgccagaatcccctgtcgctttctgtgtctgcaatggggggcagcacagggatcaaagccatctaaagagtttccaaagaaagtattaattcagaacaagccaaagaccctgagcctcaccacaaacaggccttttggagtgtgaatttgagttgaagatacaagatcggagaatgattttctggtcttaactaatcctcatcttcatgtttgatctttaagaagtcatcacccattgatttcagttttgctgtacctcttgaaagttaaagagacatctcagcactttaggaggccgaggcgggtggatcacttgaggtaaggagtttgagactagcctggccaatatggtaaaaccccatctctactaaaaatacaaaaattagccgggcatggtggcatgtgtctgtagtcccagctactcgggaggctgaggcaggagaatcgcttgaacccaggaaacggaggtcgcagtgagccaagatcatgccactgcactccagcttgggcatcacagcgagactctgtcaaaacaaacaaacaaaaaaacaacttaaagaggtaatttagccatcattcttatgccagcagatataaataaacttggacccatctggtcttcagctaaacctgagacattttaaagtgcatggacagccatggacagcaggccctcctctaacaggggatgcaaggcatggagaaagacaatcagtacccaagctcagccacagaagacaggagtcactcatataacttgtgtttagaagtttttggtagccacgcacactttctgaaatcacactatctggtggtttaatcatatttttaaagacagaatccctgagtgctgagcagattctcaaaacacatttagaatccctgaaattagaaagatcaatgacaaaatatctgtcagccaggccacaaacaggtgtaaaattatgaaaggagtggttggatgtgccaagtttggtaaagtggtgactgcatctgagaaagaggctgtgaggctgaactcttggtggcttccttctgtaacttccagagggagtcttcaacacaggccccgtgctcgtaggaatacggtagcacctatgtaggaagtgcgtggagttttctgtcttctttctgtgtgatttttggcctttttatcagcacttctcccctcccaggagcctggggatgccaaacatccagaatgtgatgggacaagatgggggcaggggcctcacctccctgcagaggtccggccaggtctccttgtccctggacaatctcctgagcctctctgcttggtggagcaggcacctgtgtgcagaattcccactgtggccagcacgaggaagtcttttctagtgaaaatgtgtcttgtggtcaggaataattatcctttcccctgtagccaccaaggagggcaaatagagaaaggtaacctaattgaaggattggtcatgtgaaaagggctacatttgggaagctgggaaaggcctccaggcttctagagcagctagcttgggctggattctcatacccaggctgccccttggattgttctacccaagcttttccctggggtctgggctcactccataaggtaaggtgccttttaccttatggtccttctttagcaggtaacaaaggagcatcaggggcaggctgccctggtggcatcacactggctagtgaggccgtgaatatcttgtcccccagcagggccgacagtttctatcacagaaaacagtgtgttcagtggtgaaaatcgttgcatgcatgttttcatctgagcgtgtccttctcccatactccctatcagccagccctgcctgtagctgctgtatggtgattgcacttggacatcagtccaatgactgcaagtcggcctggattttcacttgcagaggctacagctgcattgtcaggtctcccagccctgcagagagctccctccactggttagcagtgtgttgtgttttccattcatttcagaagagctacattgtgtcactggacatttttaaaaactgtgatttttaataaaaatttaaaatttgctttgtgatgattttca

SEQ ID NO: 316591 - DNA, 3375 bp, Homo sapiens
tgctgggattacaggcatgaaccaatgtgcccggcccacaattttattcttaatggaatttctccctctgctttgcttttaggcccagacccatggaaagtggcctgtcaagtggtacgctccggaatgcatcaactactacaagttctccagcaaaagcgatgtctggagctttggagtgttgatgtgggaagcattctcctatgggcagaagccatatcgagggatgaaaggaagtgaagtcaccgctatgttagagaaaggagagcggatggggtgccctgcagggtgtccaagagagatgtacgatctcatgaatctgtgctggacatacgatgtggaaaacaggcccggattcgcagcagtggaactgcggctgcgcaattactactatgacgtggtgaactaaccgctcccgcacctgtcggtggctgcctttgatcacaggagcaatcacaggaaaatgtatccagaggaattgattgtcagccacctccctctgccagtcgggagagccaggcttggatggaacatgcccacaacttgtcacccaaagcctgtcccaggactcaccctccacaaagcaaaggcagtcccgggagaaaagacggatggcaggatccaaggggctagctggatttgtttgttttcttgtctgtgtgattttcatacaggttatttttacgatctgtttccaaatccctttcatgtctttccacttctctgggtcccggggtgcatttgttactcatcgggcccagggacattgcagagtggcctagagcactctcaccccaagcggccttttccaaatgcccaaggatgccttagcatgtgactcctgaagggaaggcaaaggcagaggaatttggctgcttctacggccatgagactgatccctggccactgaaaagctttcctgacaataaaaatgttttgaggctttaaaaagaaaatcaagtttgaccagtgcagtttctaagcatgtagccagttaaggaaagaaagaaagaaaaaaaaaaaaggcctggatactgcttttgctgtctctgttatgagatggaagacttacatgtttgtgataaaaggggaccatgagaatgaattggcttggcttactttccccctgaaatcctctctcctgcagactgtcttgaagacctggtgactggtaaataaagccctgcatggaggctgcacagcaggggcaagaggcccatcccccagcatctcactgaggacagcttcaggctgccttcctctgaacgtggtccacaccttcctctcctccacagagagggtgccgccagaatcccctgtcgctttctgtgtctgcaatggggggcagcacagggatcaaagccatctaaagagtttccaaagaaagtattaattcagaacaagccaaagaccctgagcctcaccacaaacaggccttttggagtgtgaatttgagttgaagatacaagatcggagaatgattttctggtcttaactaatcctcatcttcatgtttgatctttaagaagtcatcacccattgatttcagttttgctgtacctcttgaaagttaaagagacatctcagcactttaggaggccgaggcgggtggatcacttgaggtaaggagtttgagactagcctggccaatatggtaaaaccccatctctactaaaaatacaaaaattagccgggcatggtggcatgtgtctgtagtcccagctactcgggaggctgaggcaggagaatcgcttgaacccaggaaacggaggtcgcagtgagccaagatcatgccactgcactccagcttgggcatcacagcgagactctgtcaaaacaaacaaacaaaaaaacaacttaaagaggtaatttagccatcattcttatgccagcagatataaataaacttggacccatctggtcttcagctaaacctgagacattttaaagtgcatggacagccatggacagcaggccctcctctaacaggggatgcaaggcatggagaaagacaatcagtacccaagctcagccacagaagacaggagtcactcatataacttgtgtttagaagtttttggtagccacgcacactttctgaaatcacactatctggtggtttaatcatatttttaaagacagaatccctgagtgctgagcagattctcaaaacacatttagaatccctgaaattagaaagatcaatgacaaaatatctgtcagccaggccacaaacaggtgtaaaattatgaaaggagtggttggatgtgccaagtttggtaaagtggtgactgcatctgagaaagaggctgtgaggctgaactcttggtggcttccttctgtaacttccagagggagtcttcaacacaggccccgtgctcgtaggaatacggtagcacctatgtaggaagtgcgtggagttttctgtcttctttctgtgtgatttttggcctttttatcagcacttctcccctcccaggagcctggggatgccaaacatccagaatgtgatgggacaagatgggggcaggggcctcacctccctgcagaggtccggccaggtctccttgtccctggacaatctcctgagcctctctgcttggtggagcaggcacctgtgtgcagaattcccactgtggccagcacgaggaagtcttttctagtgaaaatgtgtcttgtggtcaggaataattatcctttcccctgtagccaccaaggagggcaaatagagaaaggtaacctaattgaaggattggtcatgtgaaaagggctacatttgggaagctgggaaaggcctccaggcttctagagcagctagcttgggctggattctcatacccaggctgccccttggattgttctacccaagcttttccctggggtctgggctcactccataaggtaaggtgccttttaccttatggtccttctttagcaggtaacaaaggagcatcaggggcaggctgccctggtggcatcacactggctagtgaggccgtgaatatcttgtcccccagcagggccgacagtttctatcacagaaaacagtgtgttcagtggtgaaaatcgttgcatgcatgttttcatctgagcgtgtccttctcccatactccctatcagccagccctgcctgtagctgctgtatggtgattgcacttggacatcagtccaatgactgcaagtcggcctggattttcacttgcagaggctacagctgcattgtcaggtctcccagccctgcagagagctccctccactggttagcagtgtgttgtgttttccattcatttcagaagagctacattgtgtcactggacatttttaaaaactgtgatttttaataaaaatttaaaatttgctttgtgatgattttca

SEQ ID NO: 316592 - DNA, 2546 bp, Homo sapiens
gcctgtcttgtgctttctctctgtttcagctgttttccttttaagatactcctctcagatttgtgtgcttcttcccttcccacattctatactgcccagcgcctgggattccagatctgcgtttgaatccaggaaagggaggtggacacctgcgcaggtgtgtgccctccggcccctgaagcatggccagcagcggcatggctgacagcgccaaccacctgcccttctttttcggcaacatcacccgggaggaggcagaagattacctggtccaggggggcatgagtgatgggctttatttgctgcgccagagccgcaactacctgggtggcttcgccctgtccgtggcccacgggaggaaggcacaccactacaccatcgagcgggagctgaatggcacctacgccatcgccggtggcaggacccatgccagccccgccgacctctgccactaccactcccaggagtctgatggcctggtctgcctcctcaagaagcccttcaaccggccccaaggggtgcagcccaagactgggccctttgaggatttgaaggaaaacctcatcagggaatatgtgaagcagacatggaacctgcagggtcaggctctggagcaggccatcatcagtcagaagcctcagctggagaagctgatcgctaccacagcccatgaaaaaatgccttggttccatggaaaaatctctcgggaagaatctgagcaaattgtcctgataggatcaaagacaaatggaaagttcctgatccgagccagagacaacaacggctcctacgccctgtgcctgctgcacgaagggaaggtgctgcactatcgcatcgacaaagacaagacagggaagctctccatccccgagggaaagaagttcgacacgctctggcagctagtcgagcattattcttataaagcagatggtttgttaagagttcttactgtcccatgtcaaaaaatcggcacacagggaaatgttaattttggaggccgtccacaacttccaggttcccatcctgcgacttggtcagcgggtggaataatctcaagaatcaaatcatactccttcccaaagcctggccacagaaagtcctcccctgcccaagggaaccggcaagagagtactgtgtcattcaatccgtatgagccagaacttgcaccctgggctgcagacaaaggcccccagagagaagccctacccatggacacagaggtgtacgagagcccctacgcggaccccgaggagatcaggcccaaggaggtttacctggaccgaaagctgctgacgctggaagacaaagaactgggctctggtaattttggaactgtgaaaaagggctactaccaaatgaaaaaagttgtgaaaaccgtggctgtgaaaatactgaaaaacgaggccaatgaccccgctcttaaagatgagttattagcagaagcaaatgtcatgcagcagctggacaacccgtacatcgtgcggatgatcgggatatgcgaggccgagtcctggatgctggttatggagatggcagaacttggtcccctcaataagtatttgcagcagaacagacatgtcaaggataagaacatcatagaactggttcatcaggtttccatgggcatgaagtacttggaggagagcaattttgtgcacagagatctggctgcaagaaatgtgttgctagttacccaacattacgccaagatcagtgatttcggactttccaaagcactgcgtgctgatgaaaactactacaaggcccagacccatggaaagtggcctgtcaagtggtacgctccggaatgcatcaactactacaagttctccagcaaaagcgatgtctggagctttggagtgttgatgtgggaagcattctcctatgggcagaagccatatcgagggatgaaaggaagtgaagtcaccgctatgttagagaaaggagagcggatggggtgccctgcagggtgtccaagagagatgtacgatctcatgaatctgtgctggacatacgatgtggaaaacaggcccggattcgcagcagtggaactgcggctgcgcaattactactatgacgtggtgaactaaccgctcccgcacctgtcggtggctgcctttgatcacaggagcaatcacaggaaaatgtatccagaggaattgattgtcagccacctccctctgccagtcgggagagccaggcttggatggaacatgcccacaacttgtcacccaaagcctgtcccaggactcaccctccacaaagcaaaggcagtccctactccctatcagccagccctgcctgtagctgctgtatggtgattgcacttggacatcagtccaatgactgcaagtcggcctggattttcacttgcagaggctacagctgcattgtcaggtctcccagccctgcagagagctccctccactggttagcagtgtgttgtgttttccattcatttcagaagagctacattgtgtcactggacatttttaaaaactgtgatttttaataaaaatttaaaatttgctttgtgatgattttca

SEQ ID NO: 316593 - DNA, 535 bp, Homo sapiens
tgaccctgggaagaggccatgcattgccatttgacaacatgcatgctggcctgttctaaagacatttctaaccaaagctatcacttgtgacccagtgtttattttgcccagtctaactctaaaatgaacactctttttgggcaccgagggatgtaatatttaaagaaaatgtgattcagccccatattctccttttaatggcaaattataggttgcatagcacattctgtggttatccaactaaaattaaaatactgcagtttttttactcaaactacccccttgatctcagactttacttctattttacatgaaacaagatgccaacaggaaagatgttaaggaaaagttcctgggagtagcatccatgagtggtgagtgcaggtttgaagacttcagccttaggcccacagtcattagagggtctgtctgaatcctgggttctgtttgctatcctcagtggttcagtgtaaatctaaattgtagaaggttctgagatacaggccaacgtggtcagtcagttgtccagagaagg

SEQ ID NO: 316594 - DNA, 220 bp, Homo sapiens
gagggggttagtggtgcgattatagaagcaaatttaagtagcatgtcgtggaagggatcctgtatttgttttctgaaacatttactgttcctctttgccgttgtggtttctagacttggtcagcgggtggaataatctcaagaatcaaatcatactccttcccaaagcctggccacagaaaggtgctaaagcaacccctgcttgctgtccaactaagtgg

SEQ ID NO: 316595 - DNA, 525 bp, Homo sapiens
cgagagcccctacgcggaccccgaggagatcaggcccaaggaggtttacctggaccgaaagctgctgacgctggaagacaaagaactgggctctggtaattttggaactgtgaaaaagggctactaccaaatgaaaaagtaagttgctatgttccaccagcctcaccctcacatgagctcaggttctagacatgactgagaataacaaaatgtaacctggcatgactaaaccctttttttattaatgctaccattcttgttaatttctggtactattataatgaaagcgtccattacctttaatggcaaaaactgcaattacttttgcaccaacctaatagtacatgcaccttatggaaaattaggaaatagaaacaagcagaaacataagaaaataaaaacatcaaattggcatggtggctcatgcctgtaatcttagcaatttgggaggctgggataggaggattgtttgaggcctggagcttgagaccagcctgggcaacatagcaagaccctgtctctaca

SEQ ID NO: 316596 - DNA, 472 bp, Homo sapiens
cgattctactgcctcagcctcccaagtagctgggattacaggcatgtgccaccacacctggctaatttttgtatttttagtagagatggggtttcaccatgctggccaggctggtctcgaactcctgacctcaagtgaaccatcctccttggcctcccaaaatactgggattataagcgtgagccaccgtgcccggccatgttatttttatttatacacttgaaagtacttaagtaatgtgtaaaggtctttctggttttatttactgaatgaatgagtgaataagttttgatcctgttttaccatgccaggactcgagatagattggaaatgccttctgcatcattttcatttttcctcggtatggtttactctgctttgctctccatgtggcagggtcaggctctggagcaggccatcatcagtcagaagcctcagctggagaagctgatcgctaccacagcccatgaaa

SEQ ID NO: 316597 - DNA, 2628 bp, Homo sapiens
gcctgtcttgtgctttctctctgtttcagctgttttccttttaagatactcctctcagatttgtgtgcttcttcccttcccacattctatactgcccagcgcctgggattccagatctgcgtttgaatccaggaaagggaggtggacacctgcgcaggtgtgtgccctccggcccctgaagcatggccagcagcggcatggctgacagcgccaaccacctgcccttctttttcggcaacatcacccgggaggaggcagaagattacctggtccaggggggcatgagtgatgggctttatttgctgcgccagagccgcaactacctgggtggcttcgccctgtccgtggcccacgggaggaaggcacaccactacaccatcgagcgggagctgaatggcacctacgccatcgccggtggcaggacccatgccagccccgccgacctctgccactaccactcccaggagtctgatggcctggtctgcctcctcaagaagcccttcaaccggccccaaggggtgcagcccaagactgggccctttgaggatttgaaggaaaacctcatcagggaatatgtgaagcagacatggaacctgcagggtcaggctctggagcaggccatcatcagtcagaagcctcagctggagaagctgatcgctaccacagcccatgaaaaaatgccttggttccatggaaaaatctctcgggaagaatctgagcaaattgtcctgataggatcaaagacaaatggaaagttcctgatccgagccagagacaacaacggctcctacgccctgtgcctgctgcacgaagggaaggtgctgcactatcgcatcgacaaagacaagacagggaagctctccatccccgagggaaagaagttcgacacgctctggcagctagtcgagcattattcttataaagcagatggtttgttaagagttcttactgtcccatgtcaaaaaatcggcacacagggaaatgttaattttggaggccgtccacaacttccaggttcccatcctgcgacttggtcagcgggtggaataatctcaagaatcaaatcatactccttcccaaagcctggccacagaaagtcctcccctgcccaagggaaccggcaagagagtactgtgtcattcaatccgtatgagccagaacttgcaccctgggctgcagacaaaggcccccagagagaagccctacccatggacacagaggtgtacgagagcccctacgcggaccccgaggagatcaggcccaaggaggtttacctggaccgaaagctgctgacgctggaagacaaagaactgggctctggtaattttggaactgtgaaaaagggctactaccaaatgaaaaaagttgtgaaaaccgtggctgtgaaaatactgaaaaacgaggccaatgaccccgctcttaaagatgagttattagcagaagcaaatgtcatgcagcagctggacaacccgtacatcgtgcggatgatcgggatatgcgaggccgagtcctggatgctggttatggagatggcagaacttggtcccctcaataagtatttgcagcagaacagacatgtcaaggataagaacatcatagaactggttcatcaggtttccatgggcatgaagtacttggaggagagcaattttgtgcacagagatctggctgcaagaaatgtgttgctagttacccaacattacgccaagatcagtgatttcggactttccaaagcactgcgtgctgatgaaaactactacaaggcccagacccatggaaagtggcctgtcaagtggtacgctccggaatgcatcaactactacaagttctccagcaaaagcgatgtctggagctttggagtgttgatgtgggaagcattctcctatgggcagaagccatatcgagggatgaaaggaagtgaagtcaccgctatgttagagaaaggagagcggatggggtgccctgcagggtgtccaagagagatgtacgatctcatgaatctgtgctggacatacgatgtggaaaacaggcccggattcgcagcagtggaactgcggctgcgcaattactactatgacgtggtgaactaaccgctcccgcacctgtcggtggctgcctttgatcacaggagcaatcacaggaaaatgtatccagaggaattgattgtcagccacctccctctgccagtcgggagagccaggcttggatggaacatgcccacaacttgtcacccaaagcctgtcccaggactcaccctccacaaagcaaaggcagtcccgggagaaaagacggatggcaggatccaaggggctagctggatttgtttgttttcttgtctgtgtgattttcatacaggttatttttacgatctgtttccaaatccctttcatgtctttccacttctctgggtcccggggtgcatttgttactcatcgggcccagggacattgcagagtggcctagagcactctcaccccaagcggccttttccaaatgcccaaggatgccttagcatgtgactcctgaagggaaggcaaaggcagaggaatttggctgcttctacggccatgagactgatccctggccactgaaaagctttcctgacaataaaaatgttttgaggcttta

SEQ ID NO: 316598 - DNA, 5125 bp, Homo sapiens
gggccgattccgcgggcctcgcccggcgcttcagccgattcccgcccagctccgggctcatgggcgcggtcagcagggcgggccagggcggcggggcgcgacactgggaggaagtgcgggccgcctgcccgggcgcgttaaggaagttgcccaaaatgaggaagagccgcgggcccggcggctgaggccaccccggcggcggctggagagcgaggaggagcgggtggccccgcgctgcgcccgccctcgcctcacctggcgcaggtggacacctgcgcaggtgtgtgccctccggcccctgaagcatggccagcagcggcatggctgacagcgccaaccacctgcccttctttttcggcaacatcacccgggaggaggcagaagattacctggtccaggggggcatgagtgatgggctttatttgctgcgccagagccgcaactacctgggtggcttcgccctgtccgtggcccacgggaggaaggcacaccactacaccatcgagcgggagctgaatggcacctacgccatcgccggtggcaggacccatgccagccccgccgacctctgccactaccactcccaggagtctgatggcctggtctgcctcctcaagaagcccttcaaccggccccaaggggtgcagcccaagactgggccctttgaggatttgaaggaaaacctcatcagggaatatgtgaagcagacatggaacctgcagggtcaggctctggagcaggccatcatcagtcagaagcctcagctggagaagctgatcgctaccacagcccatgaaaaaatgccttggttccatggaaaaatctctcgggaagaatctgagcaaattgtcctgataggatcaaagacaaatggaaagttcctgatccgagccagagacaacaacggctcctacgccctgtgcctgctgcacgaagggaaggtgctgcactatcgcatcgacaaagacaagacagggaagctctccatccccgagggaaagaagttcgacacgctctggcagctagtcgagcattattcttataaagcagatggtttgttaagagttcttactgtcccatgtcaaaaaatcggcacacagggaaatgttaattttggaggccgtccacaacttccaggttcccatcctgcgacttggtcagcgggtggaataatctcaagaatcaaatcatactccttcccaaagcctggccacagaaagtcctcccctgcccaagggaaccggcaagagagtactgtgtcattcaatccgtatgagccagaacttgcaccctgggctgcagacaaaggcccccagagagaagccctacccatggacacagaggtgtacgagagcccctacgcggaccccgaggagatcaggcccaaggaggtttacctggaccgaaagctgctgacgctggaagacaaagaactgggctctggtaattttggaactgtgaaaaagggctactaccaaatgaaaaaagttgtgaaaaccgtggctgtgaaaatactgaaaaacgaggccaatgaccccgctcttaaagatgagttattagcagaagcaaatgtcatgcagcagctggacaacccgtacatcgtgcggatgatcgggatatgcgaggccgagtcctggatgctggttatggagatggcagaacttggtcccctcaataagtatttgcagcagaacagacatgtcaaggataagaacatcatagaactggttcatcaggtttccatgggcatgaagtacttggaggagagcaattttgtgcacagagatctggctgcaagaaatgtgttgctagttacccaacattacgccaagatcagtgatttcggactttccaaagcactgcgtgctgatgaaaactactacaaggcccagacccatggaaagtggcctgtcaagtggtacgctccggaatgcatcaactactacaagttctccagcaaaagcgatgtctggagctttggagtgttgatgtgggaagcattctcctatgggcagaagccatatcgagggatgaaaggaagtgaagtcaccgctatgttagagaaaggagagcggatggggtgccctgcagggtgtccaagagagatgtacgatctcatgaatctgtgctggacatacgatgtggaaaacaggcccggattcgcagcagtggaactgcggctgcgcaattactactatgacgtggtgaactaaccgctcccgcacctgtcggtggctgcctttgatcacaggagcaatcacaggaaaatgtatccagaggaattgattgtcagccacctccctctgccagtcgggagagccaggcttggatggaacatgcccacaacttgtcacccaaagcctgtcccaggactcaccctccacaaagcaaaggcagtcccgggagaaaagacggatggcaggatccaaggggctagctggatttgtttgttttcttgtctgtgtgattttcatacaggttatttttacgatctgtttccaaatccctttcatgtctttccacttctctgggtcccggggtgcatttgttactcatcgggcccagggacattgcagagtggcctagagcactctcaccccaagcggccttttccaaatgcccaaggatgccttagcatgtgactcctgaagggaaggcaaaggcagaggaatttggctgcttctacggccatgagactgatccctggccactgaaaagctttcctgacaataaaaatgttttgaggctttaaaaagaaaatcaagtttgaccagtgcagtttctaagcatgtagccagttaaggaaagaaagaaagaaaaaaaaaaaaggcctggatactgcttttgctgtctctgttatgagatggaagacttacatgtttgtgattctcctgcagactgtcttgaagacctggtgactggtaaataaagccctgcatggaggctgcacagcaggggcaagaggcccatcccccagcatctcactgaggacagcttcaggctgccttcctctgaacgtggtccacaccttcctctcctccacagagagggtgccgccagaatcccctgtcgctttctgtgtctgcaatggggggcagcacagggatcaaagccatctaaagagtttccaaagaaagtattaattcagaacaagccaaagaccctgagcctcaccacaaacaggccttttggagtgtgaatttgagttgaagatacaagatcggagaatgattttctggtcttaactaatcctcatcttcatgtttgatctttaagaagtcatcacccattgatttcagttttgctgtacctcttgaaagttaaagagacatctcagcactttaggaggccgaggcgggtggatcacttgaggtaaggagtttgagactagcctggccaatatggtaaaaccccatctctactaaaaatacaaaaattagccgggcatggtggcatgtgtctgtagtcccagctactcgggaggctgaggcaggagaatcgcttgaacccaggaaacggaggtcgcagtgagccaagatcatgccactgcactccagcttgggcatcacagcgagactctgtcaaaacaaacaaacaaaaaaacaacttaaagaggtaatttagccatcattcttatgccagcagatataaataaacttggacccatctggtcttcagctaaacctgagacattttaaagtgcatggacagccatggacagcaggccctcctctaacaggggatgcaaggcatggagaaagacaatcagtacccaagctcagccacagaagacaggagtcactcatataacttgtgtttagaagtttttggtagccacgcacactttctgaaatcacactatctggtggtttaatcatatttttaaagacagaatccctgagtgctgagcagattctcaaaacacatttagaatccctgaaattagaaagatcaatgacaaaatatctgtcagccaggccacaaacaggtgtaaaattatgaaaggagtggttggatgtgccaagtttggtaaagtggtgactgcatctgagaaagaggctgtgaggctgaactcttggtggcttccttctgtaacttccagagggagtcttcaacacaggccccgtgctcgtaggaatacggtagcacctatgtaggaagtgcgtggagttttctgtcttctttctgtgtgatttttggcctttttatcagcacttctcccctcccaggagcctggggatgccaaacatccagaatgtgatgggacaagatgggggcaggggcctcacctccctgcagaggtccggccaggtctccttgtccctggacaatctcctgagcctctctgcttggtggagcaggcacctgtgtgcagaattcccactgtggccagcacgaggaagtcttttctagtgaaaatgtgtcttgtggtcaggaataattatcctttcccctgtagccaccaaggagggcaaatagagaaaggtaacctaattgaaggattggtcatgtgaaaagggctacatttgggaagctgggaaaggcctccaggcttctagagcagctagcttgggctggattctcatacccaggctgccccttggattgttctacccaagcttttccctggggtctgggctcactccataaggtaaggtgccttttaccttatggtccttctttagcaggtaacaaaggagcatcaggggcaggctgccctggtggcatcacactggctagtgaggccgtgaatatcttgtcccccagcagggccgacagtttctatcacagaaaacagtgtgttcagtggtgaaaatcgttgcatgcatgttttcatctgagcgtgtccttctcccatactccctatcagccagccctgcctgtagctgctgtatggtgattgcacttggacatcagtccaatgactgcaagtcggcctggattttcacttgcagaggctacagctgcattgtcaggtctcccagccctgcagagagctccctccactggttagcagtgtgttgtgttttccattcatttcagaagagctacattgtgtcactggacatttttaaaaactgtgatttttaataaaaatttaaaatttgctttgtgatgattttca

SEQ ID NO: 316599 - DNA, 5056 bp, Homo sapiens
gcctgtcttgtgctttctctctgtttcagctgttttccttttaagatactcctctcagatttgtgtgcttcttcccttcccacattctatactgcccagcgcctgggattccagatctgcgtttgaatccaggaaagggaggtggacacctgcgcaggtgtgtgccctccggcccctgaagcatggccagcagcggcatggctgacagcgccaaccacctgcccttctttttcggcaacatcacccgggaggaggcagaagattacctggtccaggggggcatgagtgatgggctttatttgctgcgccagagccgcaactacctgggtggcttcgccctgtccgtggcccacgggaggaaggcacaccactacaccatcgagcgggagctgaatggcacctacgccatcgccggtggcaggacccatgccagccccgccgacctctgccactaccactcccaggagtctgatggcctggtctgcctcctcaagaagcccttcaaccggccccaaggggtgcagcccaagactgggccctttgaggatttgaaggaaaacctcatcagggaatatgtgaagcagacatggaacctgcagggtcaggctctggagcaggccatcatcagtcagaagcctcagctggagaagctgatcgctaccacagcccatgaaaaaatgccttggttccatggaaaaatctctcgggaagaatctgagcaaattgtcctgataggatcaaagacaaatggaaagttcctgatccgagccagagacaacaacggctcctacgccctgtgcctgctgcacgaagggaaggtgctgcactatcgcatcgacaaagacaagacagggaagctctccatccccgagggaaagaagttcgacacgctctggcagctagtcgagcattattcttataaagcagatggtttgttaagagttcttactgtcccatgtcaaaaaatcggcacacagggaaatgttaattttggaggccgtccacaacttccaggttcccatcctgcgacttggtcagcgggtggaataatctcaagaatcaaatcatactccttcccaaagcctggccacagaaagtcctcccctgcccaagggaaccggcaagagagtactgtgtcattcaatccgtatgagccagaacttgcaccctgggctgcagacaaaggcccccagagagaagccctacccatggacacagaggtgtacgagagcccctacgcggaccccgaggagatcaggcccaaggaggtttacctggaccgaaagctgctgacgctggaagacaaagaactgggctctggtaattttggaactgtgaaaaagggctactaccaaatgaaaaaagttgtgaaaaccgtggctgtgaaaatactgaaaaacgaggccaatgaccccgctcttaaagatgagttattagcagaagcaaatgtcatgcagcagctggacaacccgtacatcgtgcggatgatcgggatatgcgaggccgagtcctggatgctggttatggagatggcagaacttggtcccctcaataagtatttgcagcagaacagacatgtcaaggataagaacatcatagaactggttcatcaggtttccatgggcatgaagtacttggaggagagcaattttgtgcacagagatctggctgcaagaaatgtgttgctagttacccaacattacgccaagatcagtgatttcggactttccaaagcactgcgtgctgatgaaaactactacaaggcccagacccatggaaagtggcctgtcaagtggtacgctccggaatgcatcaactactacaagttctccagcaaaagcgatgtctggagctttggagtgttgatgtgggaagcattctcctatgggcagaagccatatcgagggatgaaaggaagtgaagtcaccgctatgttagagaaaggagagcggatggggtgccctgcagggtgtccaagagagatgtacgatctcatgaatctgtgctggacatacgatgtggaaaacaggcccggattcgcagcagtggaactgcggctgcgcaattactactatgacgtggtgaactaaccgctcccgcacctgtcggtggctgcctttgatcacaggagcaatcacaggaaaatgtatccagaggaattgattgtcagccacctccctctgccagtcgggagagccaggcttggatggaacatgcccacaacttgtcacccaaagcctgtcccaggactcaccctccacaaagcaaaggcagtcccgggagaaaagacggatggcaggatccaaggggctagctggatttgtttgttttcttgtctgtgtgattttcatacaggttatttttacgatctgtttccaaatccctttcatgtctttccacttctctgggtcccggggtgcatttgttactcatcgggcccagggacattgcagagtggcctagagcactctcaccccaagcggccttttccaaatgcccaaggatgccttagcatgtgactcctgaagggaaggcaaaggcagaggaatttggctgcttctacggccatgagactgatccctggccactgaaaagctttcctgacaataaaaatgttttgaggctttaaaaagaaaatcaagtttgaccagtgcagtttctaagcatgtagccagttaaggaaagaaagaaagaaaaaaaaaaaaggcctggatactgcttttgctgtctctgttatgagatggaagacttacatgtttgtgataaaaggggaccatgagaatgaattggcttggcttactttccccctgaaatcctctctcctgcagactgtcttgaagacctggtgactggtaaataaagccctgcatggaggctgcacagcaggggcaagaggcccatcccccagcatctcactgaggacagcttcaggctgccttcctctgaacgtggtccacaccttcctctcctccacagagagggtgccgccagaatcccctgtcgctttctgtgtctgcaatggggggcagcacagggatcaaagccatctaaagagtttccaaagaaagtattaattcagaacaagccaaagaccctgagcctcaccacaaacaggccttttggagtgtgaatttgagttgaagatacaagatcggagaatgattttctggtcttaactaatcctcatcttcatgtttgatctttaagaagtcatcacccattgatttcagttttgctgtacctcttgaaagttaaagagacatctcagcactttaggaggccgaggcgggtggatcacttgaggtaaggagtttgagactagcctggccaatatggtaaaaccccatctctactaaaaatacaaaaattagccgggcatggtggcatgtgtctgtagtcccagctactcgggaggctgaggcaggagaatcgcttgaacccaggaaacggaggtcgcagtgagccaagatcatgccactgcactccagcttgggcatcacagcgagactctgtcaaaacaaacaaacaaaaaaacaacttaaagaggtaatttagccatcattcttatgccagcagatataaataaacttggacccatctggtcttcagctaaacctgagacattttaaagtgcatggacagccatggacagcaggccctcctctaacaggggatgcaaggcatggagaaagacaatcagtacccaagctcagccacagaagacaggagtcactcatataacttgtgtttagaagtttttggtagccacgcacactttctgaaatcacactatctggtggtttaatcatatttttaaagacagaatccctgagtgctgagcagattctcaaaacacatttagaatccctgaaattagaaagatcaatgacaaaatatctgtcagccaggccacaaacaggtgtaaaattatgaaaggagtggttggatgtgccaagtttggtaaagtggtgactgcatctgagaaagaggctgtgaggctgaactcttggtggcttccttctgtaacttccagagggagtcttcaacacaggccccgtgctcgtaggaatacggtagcacctatgtaggaagtgcgtggagttttctgtcttctttctgtgtgatttttggcctttttatcagcacttctcccctcccaggagcctggggatgccaaacatccagaatgtgatgggacaagatgggggcaggggcctcacctccctgcagaggtccggccaggtctccttgtccctggacaatctcctgagcctctctgcttggtggagcaggcacctgtgtgcagaattcccactgtggccagcacgaggaagtcttttctagtgaaaatgtgtcttgtggtcaggaataattatcctttcccctgtagccaccaaggagggcaaatagagaaaggtaacctaattgaaggattggtcatgtgaaaagggctacatttgggaagctgggaaaggcctccaggcttctagagcagctagcttgggctggattctcatacccaggctgccccttggattgttctacccaagcttttccctggggtctgggctcactccataaggtaaggtgccttttaccttatggtccttctttagcaggtaacaaaggagcatcaggggcaggctgccctggtggcatcacactggctagtgaggccgtgaatatcttgtcccccagcagggccgacagtttctatcacagaaaacagtgtgttcagtggtgaaaatcgttgcatgcatgttttcatctgagcgtgtccttctcccatactccctatcagccagccctgcctgtagctgctgtatggtgattgcacttggacatcagtccaatgactgcaagtcggcctggattttcacttgcagaggctacagctgcattgtcaggtctcccagccctgcagagagctccctccactggttagcagtgtgttgtgttttccattcatttcagaagagctacattgtgtcactggacatttttaaaaactgtgatttttaataaaaatttaaaatttgctttgtgatgattttca

SEQ ID NO: 316600 - DNA, 5222 bp, Homo sapiens
gggccgattccgcgggcctcgcccggcgcttcagccgattcccgcccagctccgggctcatgggcgcggtcagcagggcgggccagggcggcggggcgcgacactgggaggaagtgcgggccgcctgcccgggcgcgttaaggaagttgcccaaaatgaggaagagccgcgggcccggcggctgaggccaccccggcggcggctggagagcgaggaggagcgggtggccccgcgctgcgcccgccctcgcctcacctggcgcaggtaggtgtggccgcgtcccctacccggccgggactttctggtaaggagaggaggttacggggaacgacgcgctgctttcatgccctttcttgttctaccttcatcggccgaggtggacacctgcgcaggtgtgtgccctccggcccctgaagcatggccagcagcggcatggctgacagcgccaaccacctgcccttctttttcggcaacatcacccgggaggaggcagaagattacctggtccaggggggcatgagtgatgggctttatttgctgcgccagagccgcaactacctgggtggcttcgccctgtccgtggcccacgggaggaaggcacaccactacaccatcgagcgggagctgaatggcacctacgccatcgccggtggcaggacccatgccagccccgccgacctctgccactaccactcccaggagtctgatggcctggtctgcctcctcaagaagcccttcaaccggccccaaggggtgcagcccaagactgggccctttgaggatttgaaggaaaacctcatcagggaatatgtgaagcagacatggaacctgcagggtcaggctctggagcaggccatcatcagtcagaagcctcagctggagaagctgatcgctaccacagcccatgaaaaaatgccttggttccatggaaaaatctctcgggaagaatctgagcaaattgtcctgataggatcaaagacaaatggaaagttcctgatccgagccagagacaacaacggctcctacgccctgtgcctgctgcacgaagggaaggtgctgcactatcgcatcgacaaagacaagacagggaagctctccatccccgagggaaagaagttcgacacgctctggcagctagtcgagcattattcttataaagcagatggtttgttaagagttcttactgtcccatgtcaaaaaatcggcacacagggaaatgttaattttggaggccgtccacaacttccaggttcccatcctgcgtcctcccctgcccaagggaaccggcaagagagtactgtgtcattcaatccgtatgagccagaacttgcaccctgggctgcagacaaaggcccccagagagaagccctacccatggacacagaggtgtacgagagcccctacgcggaccccgaggagatcaggcccaaggaggtttacctggaccgaaagctgctgacgctggaagacaaagaactgggctctggtaattttggaactgtgaaaaagggctactaccaaatgaaaaaagttgtgaaaaccgtggctgtgaaaatactgaaaaacgaggccaatgaccccgctcttaaagatgagttattagcagaagcaaatgtcatgcagcagctggacaacccgtacatcgtgcggatgatcgggatatgcgaggccgagtcctggatgctggttatggagatggcagaacttggtcccctcaataagtatttgcagcagaacagacatgtcaaggataagaacatcatagaactggttcatcaggtttccatgggcatgaagtacttggaggagagcaattttgtgcacagagatctggctgcaagaaatgtgttgctagttacccaacattacgccaagatcagtgatttcggactttccaaagcactgcgtgctgatgaaaactactacaaggcccagacccatggaaagtggcctgtcaagtggtacgctccggaatgcatcaactactacaagttctccagcaaaagcgatgtctggagctttggagtgttgatgtgggaagcattctcctatgggcagaagccatatcgagggatgaaaggaagtgaagtcaccgctatgttagagaaaggagagcggatggggtgccctgcagggtgtccaagagagatgtacgatctcatgaatctgtgctggacatacgatgtggaaaacaggcccggattcgcagcagtggaactgcggctgcgcaattactactatgacgtggtgaactaaccgctcccgcacctgtcggtggctgcctttgatcacaggagcaatcacaggaaaatgtatccagaggaattgattgtcagccacctccctctgccagtcgggagagccaggcttggatggaacatgcccacaacttgtcacccaaagcctgtcccaggactcaccctccacaaagcaaaggcagtcccgggagaaaagacggatggcaggatccaaggggctagctggatttgtttgttttcttgtctgtgtgattttcatacaggttatttttacgatctgtttccaaatccctttcatgtctttccacttctctgggtcccggggtgcatttgttactcatcgggcccagggacattgcagagtggcctagagcactctcaccccaagcggccttttccaaatgcccaaggatgccttagcatgtgactcctgaagggaaggcaaaggcagaggaatttggctgcttctacggccatgagactgatccctggccactgaaaagctttcctgacaataaaaatgttttgaggctttaaaaagaaaatcaagtttgaccagtgcagtttctaagcatgtagccagttaaggaaagaaagaaagaaaaaaaaaaaaggcctggatactgcttttgctgtctctgttatgagatggaagacttacatgtttgtgataaaaggggaccatgagaatgaattggcttggcttactttccccctgaaatcctctctcctgcagactgtcttgaagacctggtgactggtaaataaagccctgcatggaggctgcacagcaggggcaagaggcccatcccccagcatctcactgaggacagcttcaggctgccttcctctgaacgtggtccacaccttcctctcctccacagagagggtgccgccagaatcccctgtcgctttctgtgtctgcaatggggggcagcacagggatcaaagccatctaaagagtttccaaagaaagtattaattcagaacaagccaaagaccctgagcctcaccacaaacaggccttttggagtgtgaatttgagttgaagatacaagatcggagaatgattttctggtcttaactaatcctcatcttcatgtttgatctttaagaagtcatcacccattgatttcagttttgctgtacctcttgaaagttaaagagacatctcagcactttaggaggccgaggcgggtggatcacttgaggtaaggagtttgagactagcctggccaatatggtaaaaccccatctctactaaaaatacaaaaattagccgggcatggtggcatgtgtctgtagtcccagctactcgggaggctgaggcaggagaatcgcttgaacccaggaaacggaggtcgcagtgagccaagatcatgccactgcactccagcttgggcatcacagcgagactctgtcaaaacaaacaaacaaaaaaacaacttaaagaggtaatttagccatcattcttatgccagcagatataaataaacttggacccatctggtcttcagctaaacctgagacattttaaagtgcatggacagccatggacagcaggccctcctctaacaggggatgcaaggcatggagaaagacaatcagtacccaagctcagccacagaagacaggagtcactcatataacttgtgtttagaagtttttggtagccacgcacactttctgaaatcacactatctggtggtttaatcatatttttaaagacagaatccctgagtgctgagcagattctcaaaacacatttagaatccctgaaattagaaagatcaatgacaaaatatctgtcagccaggccacaaacaggtgtaaaattatgaaaggagtggttggatgtgccaagtttggtaaagtggtgactgcatctgagaaagaggctgtgaggctgaactcttggtggcttccttctgtaacttccagagggagtcttcaacacaggccccgtgctcgtaggaatacggtagcacctatgtaggaagtgcgtggagttttctgtcttctttctgtgtgatttttggcctttttatcagcacttctcccctcccaggagcctggggatgccaaacatccagaatgtgatgggacaagatgggggcaggggcctcacctccctgcagaggtccggccaggtctccttgtccctggacaatctcctgagcctctctgcttggtggagcaggcacctgtgtgcagaattcccactgtggccagcacgaggaagtcttttctagtgaaaatgtgtcttgtggtcaggaataattatcctttcccctgtagccaccaaggagggcaaatagagaaaggtaacctaattgaaggattggtcatgtgaaaagggctacatttgggaagctgggaaaggcctccaggcttctagagcagctagcttgggctggattctcatacccaggctgccccttggattgttctacccaagcttttccctggggtctgggctcactccataaggtaaggtgccttttaccttatggtccttctttagcaggtaacaaaggagcatcaggggcaggctgccctggtggcatcacactggctagtgaggccgtgaatatcttgtcccccagcagggccgacagtttctatcacagaaaacagtgtgttcagtggtgaaaatcgttgcatgcatgttttcatctgagcgtgtccttctcccatactccctatcagccagccctgcctgtagctgctgtatggtgattgcacttggacatcagtccaatgactgcaagtcggcctggattttcacttgcagaggctacagctgcattgtcaggtctcccagccctgcagagagctccctccactggttagcagtgtgttgtgttttccattcatttcagaagagctacattgtgtcactggacatttttaaaaactgtgatttttaataaaaatttaaaatttgctttgtgatgattttca

SEQ ID NO: 316601 - DNA, 1133 bp, Homo sapiens
gggccgattccgcgggcctcgcccggcgcttcagccgattcccgcccagctccgggctcatgggcgcggtcagcagggcgggccagggcggcggggcgcgacactgggaggaagtgcgggccgcctgcccgggcgcgttaaggaagttgcccaaaatgaggaagagccgcgggcccggcggctgaggccaccccggcggcggctggagagcgaggaggagcgggtggccccgcgctgcgcccgccctcgcctcacctggcgcaggtaggtgtggccgcgtcccctacccggccgggactttctggtaaggagaggaggttacggggaacgacgcgctgctttcatgccctttcttgttctaccttcatcggccgaggtaaaagtgctgaaaccatgtgaataaaatacaggtggacacctgcgcaggtgtgtgccctccggcccctgaagcatggccagcagcggcatggctgacagcgccaaccacctgcccttctttttcggcaacatcacccgggaggaggcagaagattacctggtccaggggggcatgagtgatgggctttatttgctgcgccagagccgcaactacctgggtggcttcgccctgtccgtggcccacgggaggaaggcacaccactacaccatcgagcgggagctgaatggcacctacgccatcgccggtggcaggacccatgccagccccgccgacctctgccactaccactcccaggagtctgatggcctggtctgcctcctcaagaagcccttcaaccggccccaaggggtgcagcccaagactgggccctttgaggatttgaaggaaaacctcatcagggaatatgtgaagcagacatggaacctgcagggtcaggctctggagcaggccatcatcagtcagaagcctcagctggagaagctgatcgctaccacagcccatgaaaaaatgccttggttccatggaaaaatctctcgggaagaatctgagcaaattgtcctgataggatcaaagacaaatggaaagttcctgtgagtatcgtgccttccccctcacctcctgccaccaggcctgtgtggacaattgggaataattcagcttccttgtgactggccccacatgaccctgggaagag

SEQ ID NO: 316602 - DNA, 1330 bp, Homo sapiens
cgctcccctcttccggaagtcgcgccggtgcgcgccggactcctcccaccagcggcgacgtcaaactcagctcctaccacttctctgtctctgccgaccggcgcagggagggctgccttttccttacagtacgccttgaggcttccgggccgctgaagtttacgagcgagggcagtgcagttactcagtgtgccggcctcggacgcacgtgagtagagtttgagaagacagaggctggctcccggcaggccacgcccgcagaggcctttccccctctccacaacttgtgttctacttggttccgccgagacccacgacggttccgcccccttcttcctagtcattgatgttgttgttcttgtcagtgccgcagccccgaccgccgggagctcgaacccgagccggggccgcccgggtggcgcggtggcggcggctgcggctgcagcagctgcgacggctgcgggggctgctccgggtactgcgggggcggccgggagccggcagccggcggcggggccggatggctctgtgcgggcaggcggcgggcgctgcgtcgctgcccagcgagctgatcgtgcacatcttctcttttctgccggcgcccgaccggctgcgggcctcgggcctcctgctcgcactggcgtgagtgcctcttctatccggccctgtggccccagctccgcatctgcctccgcgtctcgcccgcggagcagcctcggctggaattcctcatgcgcaagtgcggctggttcgtgcgagagctgcgtgttgaattcgccgccgagaactatctgagcggcggtgggcccaggggacggaggtggcgcggacaccgggactggaggggaggaagtcgaggccctgcagctctcagctcgttggctggaagtgctgcgcacctacttggagctggtgctttgcgtgctggtcagcatccggaacaacaggaaccttcagaagtttagtctttttggagacataagtgttctacaacagcaaggaagtttgtcaaatacatacctcagcaaggtggaccctgatggcaaaaaaattaaacagcaactgaaatggctgtcctgtgggtttatgctggaaatagtaaccccaacatcactgtcatctctctctaatgctgttgccaacaccatggagcacctcagtttactggacaataatattcctggtaacagcactcttattactgcagttgaactggagcgatttgtgaatctgcactcacttgccttggatttttgtgactttacagctgagatggcaagagtcttaactgatagcaaccatgtgcctttgcaacgactgtctcttctgg

SEQ ID NO: 316603 - DNA, 3088 bp, Homo sapiens
cgctcccctcttccggaagtcgcgccggtgcgcgccggactcctcccaccagcggcgacgtcaaactcagctcctaccacttctctgtctctgccgaccggcgcagggagggctgccttttccttacagtacgccttgaggcttccgggccgctgaagtttacgagcgagggcagtgcagttactcagtgtgccggcctcggacgcacgtgagtagagtttgagaagacagaggctggctcccggcaggccacgcccgcagaggcctttccccctctccacaacttgtgttctacttggttccgccgagacccacgacggttccgcccccttcttcctagtcattgatgttgttgttcttgtcagtgccgcagccccgaccgccgggagctcgaacccgagccggggccgcccgggtggcgcggtggcggcggctgcggctgcagcagctgcgacggctgcgggggctgctccgggtactgcgggggcggccgggagccggcagccggcggcggggccggatggctctgtgcgggcaggcggcgggcgctgcgtcgctgcccagcgagctgatcgtgcacatcttctcttttctgccggcgcccgaccggctgcgggcctcgggcctcctgctcgcactggcgtgagtgcctcttctatccggccctgtggccccagctccgcatctgcctccgcgtctcgcccgcggagcagcctcggctggaattcctcatgcgcaagtgcggctggttcgtgcgagagctgcgtgttgaattcgccgccgagaactatctgagcggcggtgggcccaggggacggaggtggcgcggacaccgggactggaggggaggaagtcgaggccctgcagctctcagctcgttggctggaagtgctgcgcacctacttggagctggtgctttgcgtgctggtcagcatccggaacaacaggttacacggtgtgggcacacaacctcattgccattgctcgtcttcggggctctgatctgaaagtgcttgaagtcaccgaagaaagcattgattttgaccaaggtgaactggccgaccaggatgtagatccagtgcataaccttattgagcaggtatccctgggcctgggtcaaccttggcatgcagtcatggacatcgaatcactcagtgtcttcactgaaccaaatcgtcatttttacagagagatgcaaagcttcagtgaagacatttagcttttttttaatgtagaattcctgtggttacatatgcaagtagggtcctattatgtttttttttcagtagtgtgaattaatccttttgtgctgtgtttaatcagtattagctttatagaattatatatgtatattctacttcttgatcaaagaacgtagtcgggtattggtttagaagttcaaagtgacaatgtatagggctttcacggttaatggacttgttaccaaaccttaaggatatacagccgaagattgtctgaggttgctggctaactttatttttcactgagttactctgcctttttgacgtttttattctttgtgtgtcagagttcagagctcaggagccaaaatatttttatacatatatagatatatatccatagcctggtagatttatatgcaatgcactgcatccatgcattctgatagcatttcattaattttgatttcaaatggaagataaataatatcccaaatgaattatctgtaacagaaaagccaagactttaactttcattacatatctaatagttgatatcaccagttaccattttgaattttgtatagtactaggttagaacattgcttaatccttttaaaaaaaatgcatttacgtaaacacgaatactgaaattgttggattttttaactatatctgacataattttattcatcaattacattacacattcatttagcccagatttcaaatagtgggggaagaaagaaactgtatttcagagtaaaatctcctaaaggaaataaaaacacagagttgtaaatacacatgcttgcaaaaacattagtcgtgaaatccctagcaacaagtcactggatttttctctgtcagcacgcgtgtcagctgccaaagaatagacttaatgaagaagtgcccacatgctggcaggggccggcccactctggccagccagatactgctagattgtaatatttaaggtcgaatttcgacctgtggtacacagctgtgctgtggctcagtcagcaacctcagaactctgaaaaaacaaaacaaaaaaaaaaaaaaaagaaaaaaaaaaaaaacatgcacctgtttcactgtgaatagtgaatgtaaaggaaagaaaggaaaaactgaaagcttgttctatcacaggtatgagctgctatgatacatgaagaacattccatgaagtatgttttaaaaccttgttatatctgagaggctttaaaagcctattaactgtttcagggcaaccgcggtacagacgtggtctctgtgagacttccacctgaccccagttttaagtggtacgaatgttgtgcatttaatgttaaaggacagtctgcaataataaagtaagtagccaacctgggtgcccagcagtgctgagacctggctgctctattgtaagctttggaaacacaatttatgcaacagatgtccagatatgattctatttatggaaaaaagtttatatgtgttttacaaatggttttaccatcttatattaaaatgaccttttgacaggtgtgcactgttttgtctccagtgagcacataccatgcggattttatatgtacatcagtagtgtgaatccactggcacagtgtgtgtaaatgccagatgtggtgagattttatcttataaatgtgatcagataaaataactcctgacagaaactgtaaggaaaccagctgaatgtttgacctgatgactgatgttgtatggtttatgttaaatgtatattcttttaatcaatgaataaagcattaaaaatgatcattgtaatatattttattgtatatgaagcatgactacttttagtgttaaataaactgcaataatccttatattgtgtataataatgtgttagtattctggtt

SEQ ID NO: 316604 - DNA, 869 bp, Homo sapiens
cacaggttgcaagcctcgcacggttgactttagagggttccccccgttagagcggtttgtaaaaaaataataccagaaaaaccaaacggaaaaaaaaacatgcacctgtttcactgtgaatagtgaatgtaaaggaaagaaaggaaaaactgaaagcttgttctatcacaggtatgagctgctatgatacatgaagaacattccatgaagtatgttttaaaaccttgttatatctgagaggctttaaaagcctattaactgtttcagggcaaccgcggtacagacgtggtctctgtgagacttccacctgaccccagttttaagtggtacgaatgttgtgcatttaatgttaaaggacagtctgcaataataaagtaagtagccaacctgggtgcccagcagtgctgagacctggctgctctattgtaagctttggaaacacaatttatgcaacagatgtccagatatgattctatttatggaaaaaagtttatatgtgttttacaaatggttttaccatcttatattaaaatgaccttttgacaggtgtgcactgttttgtctccagtgagcacataccatgcggattttatatgtacatcagtagtgtgaatccactggcacagtgtgtgtaaatgccagatgtggtgagattttatcttataaatgtgatcagataaaataactcctgacagaaactgtaaggaaaccagctgaatgtttgacctgatgactgatgttgtatggtttatgttaaatgtatattcttttaatcaatgaataaagcattaaaaatgatcattgtaatatattttattgtatatgaagcatgactacttttagtgttaaataaactgcaataatcctta

SEQ ID NO: 316605 - DNA, 324 bp, Homo sapiens
tacagtgttgtcttttgtttatttttcaggttacacggtgtgggcacacaacctcattgccattgctcgtcttcggggctctgatctgaaagtgcttgaagtcaccgaagaaagcattgattttgaccaaggtgaactggccgaccaggatgtagatccagtgcataaccttattgagcaggtatccctgggcctgggtcaaccttggcatgcagtcatggacatcgaatcactcagtgtcttcactgaaccaaatcgtcatttttacagagagatgcaaagcttcagtgaagacatttagcttttttttaatgtagaattcct

SEQ ID NO: 316606 - DNA, 1369 bp, Homo sapiens
cgctcccctcttccggaagtcgcgccggtgcgcgccggactcctcccaccagcggcgacgtcaaactcagctcctaccacttctctgtctctgccgaccggcgcagggagggctgccttttccttacagtacgccttgaggcttccgggccgctgaagtttacgagcgagggcagtgcagttactcagtgtgccggcctcggacgcacgtgagtagagtttgagaagacagaggctggctcccggcaggccacgcccgcagaggcctttccccctctccacaacttgtgttctacttggttccgccgagacccacgacggttccgcccccttcttcctagtcattgatgttgttgttcttgtcagtgccgcagccccgaccgccgggagctcgaacccgagccggggccgcccgggtggcgcggtggcggcggctgcggctgcagcagctgcgacggctgcgggggctgctccgggtactgcgggggcggccgggagccggcagccggcggcggggccggatggctctgtgcgggcaggcggcgggcgctgcgtcgctgcccagcgagctgatcgtgcacatcttctcttttctgccggcgcccgaccggctgcgggcctcgggcctcctgctcgcactggcgtgagtgcctcttctatccggccctgtggccccagctccgcatctgcctccgcgtctcgcccgcggagcagcctcggctggaattcctcatgcgcaagtgcggctggttcgtgcgagagctgcgtgttgaattcgccgccgagaactatctgagcggcggtgggcccaggggacggaggtggcgcggacaccgggactggaggggaggaagtcgaggccctgcagctctcagctcgttggctggaagtgctgcgcacctacttggagctggtgctttgcgtgctggtcagcatccggaacaacaggaaccttcagaagtttagtctttttggagacataagtgttctacaacagcaaggaagtttgtcaaatacatacctcagcaaggtggaccctgatggcaaaaaaattaaacaaattcagcaactgtttgaagaaatcctgagtaatagtaggcaactgaaatggctgtcctgtgggtttatgctggaaatagtaaccccaacatcactgtcatctctctctaatgctgttgccaacaccatggagcacctcagtttactggacaataatattcctggtaacagcactcttattactgcagttgaactggagcgatttgtgaatctgcactcacttgccttggatttttgtgactttacagctgagatggcaagagtcttaactgatagcaaccatgtgcctttgcaacgactgtctcttctgg

SEQ ID NO: 316607 - DNA, 3055 bp, Homo sapiens
cgctcccctcttccggaagtcgcgccggtgcgcgccggactcctcccaccagcggcgacgtcaaactcagctcctaccacttctctgtctctgccgaccggcgcagggagggctgccttttccttacagtacgccttgaggcttccgggccgctgaagtttacgagcgagggcagtgcagttactcagtgtgccggcctcggacgcacgtgagtagagtttgagaagacagaggctggctcccggcaggccacgcccgcagaggcctttccccctctccacaacttgtgttctacttggttccgccgagacccacgacggttccgcccccttcttcctagtcattgatgttgttgttcttgtcagtgccgcagccccgaccgccgggagctcgaacccgagccggggccgcccgggtggcgcggtggcggcggctgcggctgcagcagctgcgacggctgcgggggctgctccgggtactgcgggggcggccgggagccggcagccggcggcggggccggatggctctgtgcgggcaggcggcgggcgctgcgtcgctgcccagcgagctgatcgtgcacatcttctcttttctgccggcgcccgaccggctgcgggcctcgggcctcctgctcgcactggcgtgagtgcctcttctatccggccctgtggccccagctccgcatctgcctccgcgtctcgcccgcggagcagcctcggctggaattcctcatgcgcaagtgcggctggttcgtgcgagagctgcgtgttgaattcgccgccgagaactatctgagcggcggtgggcccaggggacggaggtggcgcggacaccgggactggaggggaggaagtcgaggccctgcagctctcagctcgttggctggaagtgctgcgcacctacttggagctggtgctttgcgtgctggtcagcatccggaacaacaggttacacggtgtgggcacacaacctcattgccattgctcgtcttcggggctctgatctgaaagtgcttgaagtcaccgaagaaagcattgattttgaccaaggtgaactggccgaccaggatgtagatccagtgcataaccttattgagcaggtatccctgggcctgggtcaaccttggcatgcagtcatggacatcgaatcactcagtgtcttcactgaaccaaatcgtcatttttacagagagatgcaaagcttcagtgaagacatttagcttttttttaatgtagaattcctgtggttacatatgcaagtagggtcctattatgtttttttttcagtagtgtgaattaatccttttgtgctgtgtttaatcagtattagctttatagaattatatatgtatattctacttcttgatcaaagaacgtagtcgggtattggtttagaagttcaaagtgacaatgtatagggctttcacggttaatggacttgttaccaaaccttaaggatatacagccgaagattgtctgaggttgctggctaactttatttttcactgagttactctgcctttttgacgtttttattctttgtgtgtcagagttcagagctcaggagccaaaatatttttatacatatatagatatatatccatagcctggtagatttatatgcaatgcactgcatccatgcattctgatagcatttcattaattttgatttcaaatggaagataaataatatcccaaatgaattatctgtaacagaaaagccaagactttaactttcattacatatctaatagttgatatcaccagttaccattttgaattttgtatagtactaggttagaacattgcttaatccttttaaaaaaaatgcatttacgtaaacacgaatactgaaattgttggattttttaactatatctgacataattttattcatcaattacattacacattcatttagcccagatttcaaatagtgggggaagaaagaaactgtatttcagagtaaaatctcctaaaggaaataaaaacacagagttgtaaatacacatgcttgcaaaaacattagtcgtgaaatccctagcaacaagtcactggatttttctctgtcagcacgcgtgtcagctgccaaagaatagacttaatgaagaagtgcccacatgctggcaggggccggcccactctggccagccagatactgctagattgtaatatttaaggtcgaatttcgacctgtggtacacagctgtgctgtggctcagtcagcaacctcagaactctgaaaaaacaaaacaaaaaaaaaaaaaaaagaaaaaaaaaaaaaacatgcacctgtttcactgtgaatagtgaatgtaaaggaaagaaaggaaaaactgaaagcttgttctatcacaggtatgagctgctatgatacatgaagaacattccatgaagtatgttttaaaaccttgttatatctgagaggctttaaaagcctattaactgtttcagggcaaccgcggtacagacgtggtctctgtgagacttccacctgaccccagttttaagtggtacgaatgttgtgcatttaatgttaaaggacagtctgcaataataaagtaagtagccaacctgggtgcccagcagtgctgagacctggctgctctattgtaagctttggaaacacaatttatgcaacagatgtccagatatgattctatttatggaaaaaagtttatatgtgttttacaaatggttttaccatcttatattaaaatgaccttttgacaggtgtgcactgttttgtctccagtgagcacataccatgcggattttatatgtacatcagtagtgtgaatccactggcacagtgtgtgtaaatgccagatgtggtgagattttatcttataaatgtgatcagataaaataactcctgacagaaactgtaaggaaaccagctgaatgtttgacctgatgactgatgttgtatggtttatgttaaatgtatattcttttaatcaatgaataaagcattaaaaatgatcattgtaatatattttattgtatatgaagcatgactacttttagtgttaaataaactgcaataatcctta

SEQ ID NO: 316608 - DNA, 2321 bp, Homo sapiens
agaggattcattttgatagctatatcacttgtgtttcaggggctattgttgatcttatatccaggcaatatgacaagttcctcactcattttattttaatgaatgatgtgattgacacatctggttttccagatcttagtgacaaccgaaatgaagatccgttggttttattagcatggaggtgcacaaagctctctcttctggcaattcatggttacacggtgtgggcacacaacctcattgccattgctcgtcttcggggctctgatctgaaagtgcttgaagtcaccgaagaaagcattgattttgaccaaggtgaactggccgaccaggatgtagatccagtgcataaccttattgagcaggtatccctgggcctgggtcaaccttggcatgcagtcatggacatcgaatcactcagtgtcttcactgaaccaaatcgtcatttttacagagagatgcaaagcttcagtgaagacatttagcttttttttaatgtagaattcctgtggttacatatgcaagtagggtcctattatgtttttttttcagtagtgtgaattaatccttttgtgctgtgtttaatcagtattagctttatagaattatatatgtatattctacttcttgatcaaagaacgtagtcgggtattggtttagaagttcaaagtgacaatgtatagggctttcacggttaatggacttgttaccaaaccttaaggatatacagccgaagattgtctgaggttgctggctaactttatttttcactgagttactctgcctttttgacgtttttattctttgtgtgtcagagttcagagctcaggagccaaaatatttttatacatatatagatatatatccatagcctggtagatttatatgcaatgcactgcatccatgcattctgatagcatttcattaattttgatttcaaatggaagataaataatatcccaaatgaattatctgtaacagaaaagccaagactttaactttcattacatatctaatagttgatatcaccagttaccattttgaattttgtatagtactaggttagaacattgcttaatccttttaaaaaaaatgcatttacgtaaacacgaatactgaaattgttggattttttaactatatctgacataattttattcatcaattacattacacattcatttagcccagatttcaaatagtgggggaagaaagaaactgtatttcagagtaaaatctcctaaaggaaataaaaacacagagttgtaaatacacatgcttgcaaaaacattagtcgtgaaatccctagcaacaagtcactggatttttctctgtcagcacgcgtgtcagctgccaaagaatagacttaatgaagaagtgcccacatgctggcaggggccggcccactctggccagccagatactgctagattgtaatatttaaggtcgaatttcgacctgtggtacacagctgtgctgtggctcagtcagcaacctcagaactctgaaaaaacaaaacaaaaaaaaaaaaaaaagaaaaaaaaaaaaaacatgcacctgtttcactgtgaatagtgaatgtaaaggaaagaaaggaaaaactgaaagcttgttctatcacaggtatgagctgctatgatacatgaagaacattccatgaagtatgttttaaaaccttgttatatctgagaggctttaaaagcctattaactgtttcagggcaaccgcggtacagacgtggtctctgtgagacttccacctgaccccagttttaagtggtacgaatgttgtgcatttaatgttaaaggacagtctgcaataataaagtaagtagccaacctgggtgcccagcagtgctgagacctggctgctctattgtaagctttggaaacacaatttatgcaacagatgtccagatatgattctatttatggaaaaaagtttatatgtgttttacaaatggttttaccatcttatattaaaatgaccttttgacaggtgtgcactgttttgtctccagtgagcacataccatgcggattttatatgtacatcagtagtgtgaatccactggcacagtgtgtgtaaatgccagatgtggtgagattttatcttataaatgtgatcagataaaataactcctgacagaaactgtaaggaaaccagctgaatgtttgacctgatgactgatgttgtatggtttatgttaaatgtatattcttttaatcaatgaataaagcattaaaaatgatcattgtaatatattttattgtatatgaagcatgactacttttagtgttaaataaactgcaataatcctta

SEQ ID NO: 316609 - DNA, 2382 bp, Homo sapiens
cgctcccctcttccggaagtcgcgccggtgcgcgccggactcctcccaccagcggcgacgtcaaactcagctcctaccacttctctgtctctgccgaccggcgcagggagggctgccttttccttacagtacgccttgaggcttccgggccgctgaagtttacgagcgagggcagtgcagttactcagtgtgccggcctcggacgcacgtgagtagagtttgagaagacagaggctggctcccggcaggccacgcccgcagaggcctttccccctctccacaacttgtgttctacttggttccgccgagacccacgacggttccgcccccttcttcctagtcattgatgttgttgttcttgtcagtgccgcagccccgaccgccgggagctcgaacccgagccggggccgcccgggtggcgcggtggcggcggctgcggctgcagcagctgcgacggctgcgggggctgctccgggtactgcgggggcggccgggagccggcagccggcggcggggccggatggctctgtgcgggcaggcggcgggcgctgcgtcgctgcccagcgagctgatcgtgcacatcttctcttttctgccggcgcccgaccggctgcgggcctcgggcctcctgctcgcactggcgtgagtgcctcttctatccggccctgtggccccagctccgcatctgcctccgcgtctcgcccgcggagcagcctcggctggaattcctcatgcgcaagtgcggctggttcgtgcgagagctgcgtgttgaattcgccgccgagaactatctgagcggcggtgggcccaggggacggaggtggcgcggacaccgggactggaggggaggaagtcgaggccctgcagctctcagctcgttggctggaagtgctgcgcacctacttggagctggtgctttgcgtgctggtcagcatccggaacaacaggttacacggtgtgggcacacaacctcattgccattgctcgtcttcggggctctgatctgaaagtgcttgaagtcaccgaagaaagcattgattttgaccaaggtgaactggccgaccaggatgtagatccagtgcataaccttattgagcaggtatccctgggcctgggtcaaccttggcatgcagtcatggacatcgaatcactcagtgtcttcactgaaccaaatcgtcatttttacagagagatgcaaagcttcagtgaagacatttagcttttttttaatgtagaattcctgtggttacatatgcaagtagggtcctattatgtttttttttcagtagtgtgaattaatccttttgtgctgtgtttaatcagtattagctttatagaattatatatgtatattctacttcttgatcaaagaacgtagtcgggtattggtttagaagttcaaagtgacaatgtatagggctttcacggttaatggacttgttaccaaaccttaaggatatacagccgaagattgtctgaggttgctggctaactttatttttcactgagttactctgcctttttgacgtttttattctttgtgtgtcagagttcagagctcaggagccaaaatatttttatacatatatagatatatatccatagcctggtagatttatatgcaatgcactgcatccatgcattctgatagcatttcattaattttgatttcaaatggaagataaataatatcccaaatgaattatctgtaacagaaaagccaagactttaactttcattacatatctaatagttgatatcaccagttaccattttgaattttgtatagtactaggttagaacattgcttaatccttttaaaaaaaatgcatttacgtaaacacgaatactgaaattgttggattttttaactatatctgacataattttattcatcaattacattacacattcatttagcccagatttcaaatagtgggggaagaaagaaactgtatttcagagtaaaatctcctaaaggaaataaaaacacagagttgtaaatacacatgcttgcaaaaacattagtcgtgaaatccctagcaacaagtcactggatttttctctgtcagcacgcgtgtcagctgccaaagaatagacttaatgaagaagtgcccacatgctggcaggggccggcccactctggccagccagatactgctagattgtaatatttaaggtcgaatttcgacctgtggtacacagctgtgctgtggctcagtcagcaacctcagaactctgaaaaaacaaaacaaaaaaaaaaaaaaaagaaaaaatatgtgcccctgtgtttctcatgggtgaacttaggtcagggttaagggaaaaaaagagaataatacattgaatgctggttccatactcacagagtgttttgaacct

SEQ ID NO: 316610 - DNA, 3278 bp, Homo sapiens
  misc_feature (2)..(2): n is a, c, g, or t
anttggctggggctaggcttccggggctctgcagtcctcggcgtgtgctggcagcttcggagcccaccgagccgggcggctaggatgatgaaccggacgacccccgaccaggagctggcgccagcgtcggagcccgtgtgggagcggccgtggtcggtggaggagatccgcaggagcagccagagctggtcgctggcggccgacgcgggcctactacagtttctacaggaattctcacagcaaactatctctaggacccatgaaatcaagaaacaagtggacggactaattcgggaaaccaaagccacagattgtcgcctgcataatgtcttcaatgacttccttatgctctctaatacccagttcattgagaataaggctctgtaggcagtgatcgtggcagtattgtggacactgaggaagagaaagaagaggaggagtcagatgaagattttgcccatcatagtgacaatgaacaaaaccggcacaccacacaaatgagtgatgaggaagaggatgatgatggctgtgaccttttcgctgactctgagaaggaggaggaagatattgaggacattgaagaaaatactagacctaaaagaagcagacctacatcgtttgcagatgagctggctgcccgcatcaagggggatgccgtgggtcgagtggacgaggagccgacaaccttaccctcaggagaagcaaaacctcggaagacactcaaagagaagaaggaaaggagaactccttcagacgatgaagaggataacttattcgcaccccccaagctgaccgacgaggacttctcgccatttggctctggaggtggcctgttcagtgggggcaaggggctctttgatgatgaggacgaggagagtgacctcttcacggaagccccccaggatcggcaagctggagcctctgttaaggaggagtcttcatcatccaaacctggaaagaaaatcccagcaggagctgtttctgtatttttaggagacacggatgtgtttggtgctgcctccgttccatcaatgaaggagccacagaagcctgagcagcccactccaaggaaaagcccctatggtccccctcccactggcctctttgatgatgatgatggtgatgatgatgacgactttttctcggcaccccacagcaaaccttctaaaacaggcaaagtccaatccactgccgatatctttggtgacgaagaaggagatctgttcaaagaaaaagccgtagcatcgccagaagccactgtgagtcagacagatgaaaataaagcaagagcagaaaaaaaggttaccttatcttccagcaaaaatctcaagccctcatcagaaacaaagactcaaaaaggcttattttcagatgaggaggactctgaggatttgttttcttctcaaagtgcgagtaagttaaaaggtgcgtctctgctgcctggcaagctccccacgttggtttccctgtttgatgatgaagatgaagaggataatctttttgggggtacagctgctaagaagcagacattgtgtctacaagctcagagagaagagaaagcaaaagcctccgagctctccaaaaagaaagcatctgccctgttgttcagcagtgatgaggaggaccagtggaatattcctgcttcacagacccacttagcatctgacagcaggtctaaaggagaacccagggattctgggaccctccagagccaggaggccaaggctgtgaaaaagaccagtctctttgaggaagacgaagaagatgatctttttgccattgccaaggacagccaaaagaagacccagagagtgtcactcctctttgaagacgatgttgatagcggaggctctctgtttggctctcctcccacatctgttcctcctgcaacaaagaaaaaagagactgtctctgaggcaccacctttgctgttcagcgatgaagaagagaaggaggcacaacttggagtgaagtctgtggataagaaggttgagagtgccaaggagtcattaaaatttgggagaactgatgtggctgagtcagaaaaggaaggacttttgactagatctgctcaggaaacagtcaagcattctgatttattttcttcatcatccccatgggacaaaggaaccaagcctagaaccaaaactgttcttagcttgtttgatgaggaagaggataaaatggaagatcaaaacattatccaggctccacagaaagaagtaggaaagggccgcgatcctgatgcccaccccaagagcacaggtgtcttccaggatgaagagctgcttttcagccacaagctccaaaaggacaatgacccagatgttgacctttttgctggcaccaaaaaaaccaagctgttagagccaagtgttgggagcctgtttggggatgatgaagatgatgatcttttcagctctgccaagtcccagcctttggtacaagagaaaaagagagtagtgaaaaaagaccactctgttgactctttcaaaaaccagaaacatcctgaatccattcaaggtagtaaagaaaaaggcatatggaagccggaaacacctcaggactcatcaggtctcgctccatttaaaaccaaagaaccatccactcggatcgggaagatacaagcaaatttagcgatcaacccagcggccttgctgcccacagcggcttcccagatctctgaagtaaagcctgttttgccagaattggcttttccttcatctgaacacagaaggagccacggtctggaaagtgtgcctgtccttcccgggagtggggaggccggtgtgagttttgatcttccagctcaggcagacaccttacacagtgcaaacaagagccgtgtcaagatgagagggaagcgtagaccgcagacccgtgcagctaggcggctggctgctcaggagtccagcgagactgaggacatgagcgtccccagaggacccattgcacagtgggctgatggcgccatttccccaaatggccatcggccacagctcagagcagccagtggagaagacagcactgaggaggccctggcagctgccgctgcaccttgggaaggtggtcctgtgcctggagtggacagaagcccctttgcaaagtctctgggtcattccagaggggaggctgacctttttgattctggggacatcttttccacgggcactggatctcagtctgtggagagaacaaaacccaaggcaaagtttggcaaactgtggcccccccactgtcatattttgttaataaaattttattggaacacaaccaca

SEQ ID NO: 316611 - DNA, 453 bp, Homo sapiens
tagtgcaatctcagctcactgcaacactgtttcctgggttcaagtgattctcctgcctcagccgcccgagtagctaggatgacagttacccgccaccatgtcccgctaatttttttggatttttagtagagacggggtttcaccacgttggtcaggctggtctcaaactcctgacctcaagtgatccacccgccttggcttcccaaagtgctaggattacaggcgtgagccatggtgcccggccttaccttgacatctttacctaggatttgacttttaaaaaaatcagtgaaaaaaagaattttttttttaacttttagtcctgctgtgtttcttattctccactttcgttatgtagcttgtttgggatagtcagatggaacagggtatcaggtggcacatgtaagtttgttttcaactgaaatgtttgacagcctattcctttcatgatgt

SEQ ID NO: 316612 - DNA, 4674 bp, Homo sapiens
  misc_feature (2)..(2): n is a, c, g, or t
anttggctggggctaggcttccggggctctgcagtcctcggcgtgtgctggcagcttcggagcccaccgagccgggcggctaggatgatgaaccggacgacccccgaccaggagctggcgccagcgtcggagcccgtgtgggagcggccgtggtcggtggaggagatccgcaggagcagccagagctggtcgctggcggccgacgcgggcctactacagtttctacaggaattctcacagcaaactatctctaggacccatgaaatcaagaaacaagtggacggactaattcgggaaaccaaagccacagattgtcgcctgcataatgtcttcaatgacttccttatgctctctaatacccagttcattgagaatcgtgtatatgatgaagaagtggaggagccagtactcaaggctgaggcagaaaaaacagagcaggagaagacacgagagcagaaagaagtagatctcattcctaaagtccaggaggctgtgaactatggcttacaagtattggacagtgcctttgagcaacttgatatcaaagcaggaaactcagactccgaggaagatgatgctaatgggcgggtggaactgatccttgaaccaaaggatctatacattgatcgtcctttaccatatctcattgggtcaaagctgttcatggaacaagaagatgtaggtcttggagagctgtccagtgaagaaggctctgtaggcagtgatcgtggcagtattgtggacactgaggaagagaaagaagaggaggagtcagatgaagattttgcccatcatagtgacaatgaacaaaaccggcacaccacacaaatgagtgatgaggaagaggatgatgatggctgtgaccttttcgctgactctgagaaggaggaggaagatattgaggacattgaagaaaatactagacctaaaagaagcagacctacatcgtttgcagatgagctggctgcccgcatcaagggggatgccgtgggtcgagtggacgaggagccgacaaccttaccctcaggagaagcaaaacctcggaagacactcaaagagaagaaggaaaggagaactccttcagacgatgaagaggataacttattcgcaccccccaagctgaccgacgaggacttctcgccatttggctctggaggtggcctgttcagtgggggcaaggggctctttgatgatgaggacgaggagagtgacctcttcacggaagccccccaggatcggcaagctggagcctctgttaaggaggagtcttcatcatccaaacctggaaagaaaatcccagcaggagctgtttctgtatttttaggagacacggatgtgtttggtgctgcctccgttccatcaatgaaggagccacagaagcctgagcagcccactccaaggaaaagcccctatggtccccctcccactggcctctttgatgatgatgatggtgatgatgatgacgactttttctcggcaccccacagcaaaccttctaaaacaggcaaagtccaatccactgccgatatctttggtgacgaagaaggagatctgttcaaagaaaaagccgtagcatcgccagaagccactgtgagtcagacagatgaaaataaagcaagagcagaaaaaaaggttaccttatcttccagcaaaaatctcaagccctcatcagaaacaaagactcaaaaaggcttattttcagatgaggaggactctgaggatttgttttcttctcaaagtgcgagtaagttaaaaggtgcgtctctgctgcctggcaagctccccacgttggtttccctgtttgatgatgaagatgaagaggataatctttttgggggtacagctgctaagaagcagacattgtgtctacaagctcagagagaagagaaagcaaaagcctccgagctctccaaaaagaaagcatctgccctgttgttcagcagtgatgaggaggaccagtggaatattcctgcttcacagacccacttagcatctgacagcaggtctaaaggagaacccagggattctgggaccctccagagccaggaggccaaggctgtgaaaaagaccagtctctttgaggaagacgaagaagatgatctttttgccattgccaaggacagccaaaagaagacccagagagtgtcactcctctttgaagacgatgttgatagcggaggctctctgtttggctctcctcccacatctgttcctcctgcaacaaagaaaaaagagactgtctctgaggcaccacctttgctgttcagcgatgaagaagagaaggaggcacaacttggagtgaagtctgtggataagaaggttgagagtgccaaggagtcattaaaatttgggagaactgatgtggctgagtcagaaaaggaaggacttttgactagatctgctcaggaaacagtcaagcattctgatttattttcttcatcatccccatgggacaaaggaaccaagcctagaaccaaaactgttcttagcttgtttgatgaggaagaggataaaatggaagatcaaaacattatccaggctccacagaaagaagtaggaaagggccgcgatcctgatgcccaccccaagagcacaggtgtcttccaggatgaagagctgcttttcagccacaagctccaaaaggacaatgacccagatgttgacctttttgctggcaccaaaaaaaccaagctgttagagccaagtgttgggagcctgtttggggatgatgaagatgatgatcttttcagctctgccaagtcccagcctttggtacaagagaaaaagagagtagtgaaaaaagaccactctgttgactctttcaaaaaccagaaacatcctgaatccattcaaggtagtaaagaaaaaggcatatggaagccggaaacacctcaggactcatcaggtctcgctccatttaaaaccaaagaaccatccactcggatcgggaagatacaagcaaatttagcgatcaacccagcggccttgctgcccacagcggcttcccagatctctgaagtaaagcctgttttgccagaattggcttttccttcatctgaacacagaaggagccacggtctggaaagtgtgcctgtccttcccgggagtggggaggccggtgtgagttttgatcttccagctcaggcagacaccttacacagtgcaaacaagagccgtgtcaagatgagagggaagcgtagaccgcagacccgtgcagctaggcggctggctgctcaggagtccagcgagactgaggacatgagcgtccccagaggacccattgcacagtgggctgatggcgccatttccccaaatggccatcggccacagctcagagcagccagtggagaagacagcactgaggaggccctggcagctgccgctgcaccttgggaaggtggtcctgtgcctggagtggacagaagcccctttgcaaagtctctgggtcattccagaggggaggctgacctttttgattctggggacatcttttccacgggcactggatctcagtctgtggagagaacaaaacccaaggcaaagatagcagagaatcctgccaacccaccagtgggtggtaaagcaaagagccccatgtttcctgctctaggtgaggccagcagtgatgatgatctctttcagtctgctaaaccaaaaccagcaaagaaaacaaatccctttcctctcctggaagatgaggatgacctctttacagatcagaaagtcaagaagaatgagacaaaatccaatagtcagcaggatgtcatattaacaacacaagatatttttgaggatgatatatttgctacggaagcaattaaaccctctcagaaaaccagagagaaggagaaaacattggaatctaatttatttgatgataacattgatatctttgctgacttaactgtaaaaccaaaagaaaagtccaaaaagaaagtggaagccaagtctatatttgatgatgatatggatgacatcttctcctctggtatccaggctaagacaaccaaaccaaaaagccgatctgcacaggccgcacctgaaccaagatttgaacacaaggtgtccaacatctttgatgatcccctgaatgcctttggaggccagtagagcacacagggtatccacatgttaccctgcagctacattgttgagttagtgatgatgttgtatatgctgatggtcttaactggattacaaaaagcaaatactagaacagctagctcatcgttcacccaatgtacttggtatttttctgcactggtttaatcatgcttaatactacaaaacaaaaataaatatttcacagtggttggtttgttttgtttttaaaccacagtttgatttagttagccttgctggggccataatatgcttcagggtgtgtaaaagaagaaatctctttgtggctttcatgggcagggaatcccagagatagcaaatgccacctgaccagaagtctttgttatatggatgggaaccctaacttagggcctgggcaggggaaagagaaagaaggtgagagattatacttcatgagtcttagcaatatgggagcaggttttcactgaattctgagggtgcctctgcatgtcctccaaggcaaagtttggcaaactgtggcccccccactgtcatattttgttaataaaattttattggaacacaaccaca

SEQ ID NO: 316613 - DNA, 4567 bp, Homo sapiens
ttctaacactcaaaggtgaaaggaaatgggttcttttttgatgtgacatgcagaatagttacatgtaacattgatactactgtatgtttattttttaaaatagctactacagtttctacaggaattctcacagcaaactatctctaggacccatgaaatcaagaaacaagtggacggactaattcgggaaaccaaagccacagattgtcgcctgcataatgtcttcaatgacttccttatgctctctaatacccagttcattgagaatcgtgtatatgatgaagaagtggaggagccagtactcaaggctgaggcagaaaaaacagagcaggagaagacacgagagcagaaagaagtagatctcattcctaaagtccaggaggctgtgaactatggcttacaagtattggacagtgcctttgagcaacttgatatcaaagcaggaaactcagactccgaggaagatgatgctaatgggcgggtggaactgatccttgaaccaaaggatctatacattgatcgtcctttaccatatctcattgggtcaaagctgttcatggaacaagaagatgtaggtcttggagagctgtccagtgaagaaggctctgtaggcagtgatcgtggcagtattgtggacactgaggaagagaaagaagaggaggagtcagatgaagattttgcccatcatagtgacaatgaacaaaaccggcacaccacacaaatgagtgatgaggaagaggatgatgatggctgtgaccttttcgctgactctgagaaggaggaggaagatattgaggacattgaagaaaatactagacctaaaagaagcagacctacatcgtttgcagatgagctggctgcccgcatcaagggggatgccgtgggtcgagtggacgaggagccgacaaccttaccctcaggagaagcaaaacctcggaagacactcaaagagaagaaggaaaggagaactccttcagacgatgaagaggataacttattcgcaccccccaagctgaccgacgaggacttctcgccatttggctctggaggtggcctgttcagtgggggcaaggggctctttgatgatgaggacgaggagagtgacctcttcacggaagccccccaggatcggcaagctggagcctctgttaaggaggagtcttcatcatccaaacctggaaagaaaatcccagcaggagctgtttctgtatttttaggagacacggatgtgtttggtgctgcctccgttccatcaatgaaggagccacagaagcctgagcagcccactccaaggaaaagcccctatggtccccctcccactggcctctttgatgatgatgatggtgatgatgatgacgactttttctcggcaccccacagcaaaccttctaaaacaggcaaagtccaatccactgccgatatctttggtgacgaagaaggagatctgttcaaagaaaaagccgtagcatcgccagaagccactgtgagtcagacagatgaaaataaagcaagagcagaaaaaaaggttaccttatcttccagcaaaaatctcaagccctcatcagaaacaaagactcaaaaaggcttattttcagatgaggaggactctgaggatttgttttcttctcaaagtgcgagtaagttaaaaggtgcgtctctgctgcctggcaagctccccacgttggtttccctgtttgatgatgaagatgaagaggataatctttttgggggtacagctgctaagaagcagacattgtgtctacaagctcagagagaagagaaagcaaaagcctccgagctctccaaaaagaaagcatctgccctgttgttcagcagtgatgaggaggaccagtggaatattcctgcttcacagacccacttagcatctgacagcaggtctaaaggagaacccagggattctgggaccctccagagccaggaggccaaggctgtgaaaaagaccagtctctttgaggaagacgaagaagatgatctttttgccattgccaaggacagccaaaagaagacccagagagtgtcactcctctttgaagacgatgttgatagcggaggctctctgtttggctctcctcccacatctgttcctcctgcaacaaagaaaaaagagactgtctctgaggcaccacctttgctgttcagcgatgaagaagagaaggaggcacaacttggagtgaagtctgtggataagaaggttgagagtgccaaggagtcattaaaatttgggagaactgatgtggctgagtcagaaaaggaaggacttttgactagatctgctcaggaaacagtcaagcattctgatttattttcttcatcatccccatgggacaaaggaaccaagcctagaaccaaaactgttcttagcttgtttgatgaggaagaggataaaatggaagatcaaaacattatccaggctccacagaaagaagtaggaaagggccgcgatcctgatgcccaccccaagagcacaggtgtcttccaggatgaagagctgcttttcagccacaagctccaaaaggacaatgacccagatgttgacctttttgctggcaccaaaaaaaccaagctgttagagccaagtgttgggagcctgtttggggatgatgaagatgatgatcttttcagctctgccaagtcccagcctttggtacaagagaaaaagagagtagtgaaaaaagaccactctgttgactctttcaaaaaccagaaacatcctgaatccattcaaggtagtaaagaaaaaggcatatggaagccggaaacacctcaggactcatcaggtctcgctccatttaaaaccaaagaaccatccactcggatcgggaagatacaagcaaatttagcgatcaacccagcggccttgctgcccacagcggcttcccagatctctgaagtaaagcctgttttgccagaattggcttttccttcatctgaacacagaaggagccacggtctggaaagtgtgcctgtccttcccgggagtggggaggccggtgtgagttttgatcttccagctcaggcagacaccttacacagtgcaaacaagagccgtgtcaagatgagagggaagcgtagaccgcagacccgtgcagctaggcggctggctgctcaggagtccagcgagactgaggacatgagcgtccccagaggacccattgcacagtgggctgatggcgccatttccccaaatggccatcggccacagctcagagcagccagtggagaagacagcactgaggaggccctggcagctgccgctgcaccttgggaaggtggtcctgtgcctggagtggacagaagcccctttgcaaagtctctgggtcattccagaggggaggctgacctttttgattctggggacatcttttccacgggcactggatctcagtctgtggagagaacaaaacccaaggcaaagatagcagagaatcctgccaacccaccagtgggtggtaaagcaaagagccccatgtttcctgctctaggtgaggccagcagtgatgatgatctctttcagtctgctaaaccaaaaccagcaaagaaaacaaatccctttcctctcctggaagatgaggatgacctctttacagatcagaaagtcaagaagaatgagacaaaatccaatagtcagcaggatgtcatattaacaacacaagatatttttgaggatgatatatttgctacggaagcaattaaaccctctcagaaaaccagagagaaggagaaaacattggaatctaatttatttgatgataacattgatatctttgctgacttaactgtaaaaccaaaagaaaagtccaaaaagaaagtggaagccaagtctatatttgatgatgatatggatgacatcttctcctctggtatccaggctaagacaaccaaaccaaaaagccgatctgcacaggccgcacctgaaccaagatttgaacacaaggtgtccaacatctttgatgatcccctgaatgcctttggaggccagtagagcacacagggtatccacatgttaccctgcagctacattgttgagttagtgatgatgttgtatatgctgatggtcttaactggattacaaaaagcaaatactagaacagctagctcatcgttcacccaatgtacttggtatttttctgcactggtttaatcatgcttaatactacaaaacaaaaataaatatttcacagtggttggtttgttttgtttttaaaccacagtttgatttagttagccttgctggggccataatatgcttcagggtgtgtaaaagaagaaatctctttgtggctttcatgggcagggaatcccagagatagcaaatgccacctgaccagaagtctttgttatatggatgggaaccctaacttagggcctgggcaggggaaagagaaagaaggtgagagattatacttcatgagtcttagcaatatgggagcaggttttcactgaattctgagggtgcctctgcatgtcctccaaggcaaagtttggcaaactgtggcccccccactgtcatattttgttaataaaattttattggaacacaaccaca

SEQ ID NO: 316614 - DNA, 4473 bp, Homo sapiens
ttctaacactcaaaggtgaaaggaaatgggttcttttttgatgtgacatgcagaatagttacatgtaacattgatactactgtatgtttattttttaaaatagctactacagtttctacaggaattctcacagcaaactatctctaggacccatgaaatcaagaaacaagtggacggactaattcgggaaaccaaagccacagattgtcgcctgcataatgtcttcaatgacttccttatgctctctaatacccagttcattgagaatcgtgtatatgatgaagaagtggaggagccagtactcaaggctgaggcagaaaaaacagagcaggagaagacacgagagcagaaagaagtagatctcattcctaaagtccaggaggctgtgaactatggcttacaagtattggacagtgcctttgagcaacttgatatcaaagcaggaaactcagactccgaggaagatgatgctaatgggcgggtggaactgatccttgaaccaaagaaggctctgtaggcagtgatcgtggcagtattgtggacactgaggaagagaaagaagaggaggagtcagatgaagattttgcccatcatagtgacaatgaacaaaaccggcacaccacacaaatgagtgatgaggaagaggatgatgatggctgtgaccttttcgctgactctgagaaggaggaggaagatattgaggacattgaagaaaatactagacctaaaagaagcagacctacatcgtttgcagatgagctggctgcccgcatcaagggggatgccgtgggtcgagtggacgaggagccgacaaccttaccctcaggagaagcaaaacctcggaagacactcaaagagaagaaggaaaggagaactccttcagacgatgaagaggataacttattcgcaccccccaagctgaccgacgaggacttctcgccatttggctctggaggtggcctgttcagtgggggcaaggggctctttgatgatgaggacgaggagagtgacctcttcacggaagccccccaggatcggcaagctggagcctctgttaaggaggagtcttcatcatccaaacctggaaagaaaatcccagcaggagctgtttctgtatttttaggagacacggatgtgtttggtgctgcctccgttccatcaatgaaggagccacagaagcctgagcagcccactccaaggaaaagcccctatggtccccctcccactggcctctttgatgatgatgatggtgatgatgatgacgactttttctcggcaccccacagcaaaccttctaaaacaggcaaagtccaatccactgccgatatctttggtgacgaagaaggagatctgttcaaagaaaaagccgtagcatcgccagaagccactgtgagtcagacagatgaaaataaagcaagagcagaaaaaaaggttaccttatcttccagcaaaaatctcaagccctcatcagaaacaaagactcaaaaaggcttattttcagatgaggaggactctgaggatttgttttcttctcaaagtgcgagtaagttaaaaggtgcgtctctgctgcctggcaagctccccacgttggtttccctgtttgatgatgaagatgaagaggataatctttttgggggtacagctgctaagaagcagacattgtgtctacaagctcagagagaagagaaagcaaaagcctccgagctctccaaaaagaaagcatctgccctgttgttcagcagtgatgaggaggaccagtggaatattcctgcttcacagacccacttagcatctgacagcaggtctaaaggagaacccagggattctgggaccctccagagccaggaggccaaggctgtgaaaaagaccagtctctttgaggaagacgaagaagatgatctttttgccattgccaaggacagccaaaagaagacccagagagtgtcactcctctttgaagacgatgttgatagcggaggctctctgtttggctctcctcccacatctgttcctcctgcaacaaagaaaaaagagactgtctctgaggcaccacctttgctgttcagcgatgaagaagagaaggaggcacaacttggagtgaagtctgtggataagaaggttgagagtgccaaggagtcattaaaatttgggagaactgatgtggctgagtcagaaaaggaaggacttttgactagatctgctcaggaaacagtcaagcattctgatttattttcttcatcatccccatgggacaaaggaaccaagcctagaaccaaaactgttcttagcttgtttgatgaggaagaggataaaatggaagatcaaaacattatccaggctccacagaaagaagtaggaaagggccgcgatcctgatgcccaccccaagagcacaggtgtcttccaggatgaagagctgcttttcagccacaagctccaaaaggacaatgacccagatgttgacctttttgctggcaccaaaaaaaccaagctgttagagccaagtgttgggagcctgtttggggatgatgaagatgatgatcttttcagctctgccaagtcccagcctttggtacaagagaaaaagagagtagtgaaaaaagaccactctgttgactctttcaaaaaccagaaacatcctgaatccattcaaggtagtaaagaaaaaggcatatggaagccggaaacacctcaggactcatcaggtctcgctccatttaaaaccaaagaaccatccactcggatcgggaagatacaagcaaatttagcgatcaacccagcggccttgctgcccacagcggcttcccagatctctgaagtaaagcctgttttgccagaattggcttttccttcatctgaacacagaaggagccacggtctggaaagtgtgcctgtccttcccgggagtggggaggccggtgtgagttttgatcttccagctcaggcagacaccttacacagtgcaaacaagagccgtgtcaagatgagagggaagcgtagaccgcagacccgtgcagctaggcggctggctgctcaggagtccagcgagactgaggacatgagcgtccccagaggacccattgcacagtgggctgatggcgccatttccccaaatggccatcggccacagctcagagcagccagtggagaagacagcactgaggaggccctggcagctgccgctgcaccttgggaaggtggtcctgtgcctggagtggacagaagcccctttgcaaagtctctgggtcattccagaggggaggctgacctttttgattctggggacatcttttccacgggcactggatctcagtctgtggagagaacaaaacccaaggcaaagatagcagagaatcctgccaacccaccagtgggtggtaaagcaaagagccccatgtttcctgctctaggtgaggccagcagtgatgatgatctctttcagtctgctaaaccaaaaccagcaaagaaaacaaatccctttcctctcctggaagatgaggatgacctctttacagatcagaaagtcaagaagaatgagacaaaatccaatagtcagcaggatgtcatattaacaacacaagatatttttgaggatgatatatttgctacggaagcaattaaaccctctcagaaaaccagagagaaggagaaaacattggaatctaatttatttgatgataacattgatatctttgctgacttaactgtaaaaccaaaagaaaagtccaaaaagaaagtggaagccaagtctatatttgatgatgatatggatgacatcttctcctctggtatccaggctaagacaaccaaaccaaaaagccgatctgcacaggccgcacctgaaccaagatttgaacacaaggtgtccaacatctttgatgatcccctgaatgcctttggaggccagtagagcacacagggtatccacatgttaccctgcagctacattgttgagttagtgatgatgttgtatatgctgatggtcttaactggattacaaaaagcaaatactagaacagctagctcatcgttcacccaatgtacttggtatttttctgcactggtttaatcatgcttaatactacaaaacaaaaataaatatttcacagtggttggtttgttttgtttttaaaccacagtttgatttagttagccttgctggggccataatatgcttcagggtgtgtaaaagaagaaatctctttgtggctttcatgggcagggaatcccagagatagcaaatgccacctgaccagaagtctttgttatatggatgggaaccctaacttagggcctgggcaggggaaagagaaagaaggtgagagattatacttcatgagtcttagcaatatgggagcaggttttcactgaattctgagggtgcctctgcatgtcctccaaggcaaagtttggcaaactgtggcccccccactgtcatattttgttaataaaattttattggaacacaaccaca

SEQ ID NO: 316615 - DNA, 4611 bp, Homo sapiens
  misc_feature (2)..(2): n is a, c, g, or t
anttggctggggctaggcttccggggctctgcagtcctcggcgtgtgctggcagcttcggagcccaccgagccgggcggctaggatgatgaaccggacgacccccgaccaggagctggcgccagcgtcggagcccgtgtgggagcggccgtggtcggtggaggagatccgcaggagcagccagagctggtcgctggcggccgacgcgggcctactacagtttctacaggaattctcacagcaaactatctctaggacccatgaaatcaagaaacaagtggacggactaattcgggaaaccaaagccacagattgtcgcctgcataatgtcttcaatgacttccttatgctctctaatacccagttcattgagaatcgtgtatatgatgaagaagtggaggagccagtactcaaggctgaggcagaaaaaacagagcaggagaagacacgagagcagaaagaagtagatctcattcctaaagtccaggaggctgtgaactatggcttacaagtattggacagtgcctttgagcaacttgatatcaaagcaggaaactcagactccgaggaagatgatgctaatgggcgggtggaactgatccttgaaccaaaggatctatacattgatcgtcctttaccatatctcattgggtcaaagctgttcatggaacaagaagatgtaggtcttggagagctgtccagtgaagaaggctctgtaggcagtgatcgtggcagtattgtggacactgaggaagagaaagaagaggaggagtcagatgaagattttgcccatcatagtgacaatgaacaaaaccggcacaccacacaaatgagtgatgaggaagaggatgatgatggctgtgaccttttcgctgactctgagaaggaggaggaagatattgaggacattgaagaaaatactagacctaaaagaagcagacctacatcgtttgcagatgagctggctgcccgcatcaagggggatgccgtgggtcgagtggacgaggagccgacaaccttaccctcaggagaagcaaaacctcggaagacactcaaagagaagaaggaaaggagaactccttcagacgatgaagaggataacttattcgcaccccccaagctgaccgacgaggacttctcgccatttggctctggaggtggcctgttcagtgggggcaaggggctctttgatgatgaggacgaggagagtgacctcttcacggaagccccccaggatcggcaagctggagcctctgttaaggaggagtcttcatcatccaaacctggaaagaaaatcccagcaggagctgtttctgtatttttaggagacacggatgtgtttggtgctgcctccgttccatcaatgaaggagccacagaagcctgagcagcccactccaaggaaaagcccctatggtccccctcccactggcctctttgatgatgatgatggtgatgatgatgacgactttttctcggcaccccacagcaaaccttctaaaacaggcaaagtccaatccactgccgatatctttggtgacgaagaaggagatctgttcaaagaaaaagccgtagcatcgccagaagccactgtgagtcagacagatgaaaataaagcaagagcagaaaaaaaggttaccttatcttccagcaaaaatctcaagccctcatcagaaacaaagactcaaaaaggcttattttcagatgaggaggactctgaggatttgttttcttctcaaagtgcgagtaagttaaaaggtgcgtctctgctgcctggcaagctccccacgttggtttccctgtttgatgatgaagatgaagaggataatctttttgggggtacagctgctaagaagcagacattgtgtctacaagctcagagagaagagaaagcaaaagcctccgagctctccaaaaagaaagcatctgccctgttgttcagcagtgatgaggaggaccagtggaatattcctgcttcacagacccacttagcatctgacagcaggtctaaaggagaacccagggattctgggaccctccagagccaggaggccaaggctgtgaaaaagaccagtctctttgaggaagacgaagaagatgatctttttgccattgccaaggacagccaaaagaagacccagagagtgtcactcctctttgaagacgatgttgatagcggaggctctctgtttggctctcctcccacatctgttcctcctgcaacaaagaaaaaagagactgtctctgaggcaccacctttgctgttcagcgatgaagaagagaaggaggcacaacttggagtgaagtctgtggataagaaggttgagagtgccaaggagtcattaaaatttgggagaactgatgtggctgagtcagaaaaggaaggacttttgactagatctgctcaggaaacagtcaagcattctgatttattttcttcatcatccccatgggacaaaggaaccaagcctagaaccaaaactgttcttagcttgtttgatgaggaagaggataaaatggaagatcaaaacattatccaggctccacagaaagaagtaggaaagggccgcgatcctgatgcccaccccaagagcacaggtgtcttccaggatgaagagctgcttttcagccacaagctccaaaaggacaatgacccagatgttgacctttttgctggcaccaaaaaaaccaagctgttagagccaagtgttgggagcctgtttggggatgatgaagatgatgatcttttcagctctgccaagtcccagcctttggtacaagagaaaaagagagtagtgaaaaaagaccactctgttgactctttcaaaaaccagaaacatcctgaatccattcaaggtagtaaagaaaaaggcatatggaagccggaaacacctcaggcaaatttagcgatcaacccagcggccttgctgcccacagcggcttcccagatctctgaagtaaagcctgttttgccagaattggcttttccttcatctgaacacagaaggagccacggtctggaaagtgtgcctgtccttcccgggagtggggaggccggtgtgagttttgatcttccagctcaggcagacaccttacacagtgcaaacaagagccgtgtcaagatgagagggaagcgtagaccgcagacccgtgcagctaggcggctggctgctcaggagtccagcgagactgaggacatgagcgtccccagaggacccattgcacagtgggctgatggcgccatttccccaaatggccatcggccacagctcagagcagccagtggagaagacagcactgaggaggccctggcagctgccgctgcaccttgggaaggtggtcctgtgcctggagtggacagaagcccctttgcaaagtctctgggtcattccagaggggaggctgacctttttgattctggggacatcttttccacgggcactggatctcagtctgtggagagaacaaaacccaaggcaaagatagcagagaatcctgccaacccaccagtgggtggtaaagcaaagagccccatgtttcctgctctaggtgaggccagcagtgatgatgatctctttcagtctgctaaaccaaaaccagcaaagaaaacaaatccctttcctctcctggaagatgaggatgacctctttacagatcagaaagtcaagaagaatgagacaaaatccaatagtcagcaggatgtcatattaacaacacaagatatttttgaggatgatatatttgctacggaagcaattaaaccctctcagaaaaccagagagaaggagaaaacattggaatctaatttatttgatgataacattgatatctttgctgacttaactgtaaaaccaaaagaaaagtccaaaaagaaagtggaagccaagtctatatttgatgatgatatggatgacatcttctcctctggtatccaggctaagacaaccaaaccaaaaagccgatctgcacaggccgcacctgaaccaagatttgaacacaaggtgtccaacatctttgatgatcccctgaatgcctttggaggccagtagagcacacagggtatccacatgttaccctgcagctacattgttgagttagtgatgatgttgtatatgctgatggtcttaactggattacaaaaagcaaatactagaacagctagctcatcgttcacccaatgtacttggtatttttctgcactggtttaatcatgcttaatactacaaaacaaaaataaatatttcacagtggttggtttgttttgtttttaaaccacagtttgatttagttagccttgctggggccataatatgcttcagggtgtgtaaaagaagaaatctctttgtggctttcatgggcagggaatcccagagatagcaaatgccacctgaccagaagtctttgttatatggatgggaaccctaacttagggcctgggcaggggaaagagaaagaaggtgagagattatacttcatgagtcttagcaatatgggagcaggttttcactgaattctgagggtgcctctgcatgtcctccaaggcaaagtttggcaaactgtggcccccccactgtcatattttgttaataaaattttattggaacacaaccaca

SEQ ID NO: 316616 - DNA, 4248 bp, Homo sapiens
  misc_feature (2)..(2): n is a, c, g, or t
anttggctggggctaggcttccggggctctgcagtcctcggcgtgtgctggcagcttcggagcccaccgagccgggcggctaggatgatgaaccggacgacccccgaccaggagctggcgccagcgtcggagcccgtgtgggagcggccgtggtcggtggaggagatccgcaggagcagccagagctggtcgctggcggccgacgcgggcctactacagtttctacaggaattctcacagcaaactatctctaggacccatgaaatcaagaaacaagtggacggactaattcgggaaaccaaagccacagattgtcgcctgcataatgtcttcaatgacttccttatgctctctaatacccagttcattgagaatcgtgtatatgatgaagaagtggaggagccagtactcaaggctgaggcagaaaaaacagagcaggagaagacacgagagcagaaagaagtagatctcattcctaaagtccaggaggctgtgaactatggcttacaagtattggacagtgcctttgagcaacttgatatcaaagcaggaaactcagactccgaggaagatgatgctaatgggcgggtggaactgatccttgaaccaaaggatctatacattgatcgtcctttaccatatctcattgggtcaaagctgttcatggaacaagaagatgtaggtcttggagagctgtccagtgaagaaggctctgtaggcagtgatcgtggcagtattgtggacactgaggaagagaaagaagaggaggagtcagatgaagattttgcccatcatagtgacaatgaacaaaaccggcacaccacacaaatgagtgatgaggaagaggatgatgatggctgtgaccttttcgctgactctgagaaggaggaggaagatattgaggacattgaagaaaatactagacctaaaagaagcagacctacatcgtttgcagatgagctggctgcccgcatcaagggggatgccgtgggtcgagtggacgaggagccgacaaccttaccctcaggagaagcaaaacctcggaagacactcaaagagaagaaggaaaggagaactccttcagacgatgaagaggataacttattcgcaccccccaagctgaccgacgaggacttctcgccatttggctctggaggtggcctgttcagtgggggcaaggggctctttgatgatgaggacgaggagagtgacctcttcacggaagccccccaggatcggcaagctggagcctctgttaaggaggagtcttcatcatccaaacctggaaagaaaatcccagcaggagctgtttctgtatttttaggagacacggatgtgtttggtgctgcctccgttccatcaatgaaggagccacagaagcctgagcagcccactccaaggaaaagcccctatggtccccctcccactggcctctttgatgatgatgatggtgatgatgatgacgactttttctcggcaccccacagcaaaccttctaaaacaggcaaagtccaatccactgccgatatctttggtgacgaagaaggagatctgttcaaagaaaaagccgtagcatcgccagaagccactgtgagtcagacagatgaaaataaagcaagagcagaaaaaaaggttaccttatcttccagcaaaaatctcaagccctcatcagaaacaaagactcaaaaaggcttattttcagatgaggaggactctgaggatttgttttcttctcaaagtgcgagtaagttaaaaggtgcgtctctgctgcctggcaagctccccacgttggtttccctgtttgatgatgaagatgaagaggataatctttttgggggtacagctgctaagaagcagacattgtgtctacaagctcagagagaagagaaagcaaaagcctccgagctctccaaaaagaaagcatctgccctgttgttcagcagtgatgaggaggaccagtggaatattcctgcttcacagacccacttagcatctgacagcaggtctaaaggagaacccagggattctgggaccctccagagccaggaggccaaggctgtgaaaaagaccagtctctttgaggaagacgaagaagatgatctttttgccattgccaaggacagccaaaagaagacccagagagtgtcactcctctttgaagacgatgttgatagcggaggctctctgtttggctctcctcccacatctgttcctcctgcaacaaagaaaaaagagactgtctctgaggcaccacctttgctgttcagcgatgaagaagagaaggaggcacaacttggagtgaagtctgtggataagaaggttgagagtgccaaggagtcattaaaatttgggagaactgatgtggctgagtcagaaaaggaaggacttttgactagatctgctcaggaaacagtcaagcattctgatttattttcttcatcatccccatgggacaaaggaaccaagcctagaaccaaaactgttcttagcttgtttgatgaggaagaggataaaatggaagatcaaaacattatccaggctccacagaaagaagtaggaaagggccgcgatcctgatgcccaccccaagagcacaggtgtcttccaggatgaagagctgcttttcagccacaagctccaaaaggacaatgacccagatgttgacctttttgctggcaccaaaaaaaccaagctgttagagccaagtgttgggagcctgtttggggatgatgaagatgatgatcttttcagctctgccaagtcccagcctttggtacaagagaaaaagagagtagtgaaaaaagaccactctgttgactctttcaaaaaccagaaacatcctgaatccattcaaggtagtaaagaaaaaggcatatggaagccggaaacacctcaggcaaatttagcgatcaacccagcggccttgctgcccacagcggcttcccagatctctgaagtaaagcctgttttgccagaattggcttttccttcatctgaacacagaaggagccacggtctggaaagtgtgcctgtccttcccgggagtggggaggccggtgtgagttttgatcttccagctcaggcagacaccttacacagtgcaaacaagagccgtgtcaagatgagagggaagcgtagaccgcagacccgtgcagctaggcggctggctgctcaggagtccagcgagactgaggacatgagcgtccccagaggacccattgcacagtgggctgatggcgccatttccccaaatggccatcggccacagctcagagcagccagtggagaagacagcactgaggaggccctggcagctgccgctgcaccttgggaaggtggtcctgtgcctggagtggacagaagcccctttgcaaagtctctgggtcattccagaggggaggctgacctttttgattctggggacatcttttccacgggcactggatctcagtctgtggagagaacaaaacccaaggcaaagatagcagagaatcctgccaacccaccagtgggtggtaaagcaaagagccccatgtttcctgctctaggtgaggccagcagtgatgatgatctctttcagtctgctaaaccaaaaccagcaaagaaaacaaatccctttcctctcctggaagatgaggatgacctctttacagatcagaaagtcaagaagaatgagacaaaatccaatagtcagcaggatgtcatattaacaacacaagatatttttgaggatgatatatttgctacggaagcaattaaaccctctcagaaaaccagagagaaggagaaaacattggaatctaatttatttgatgataacattgatatctttgctgacttaactgtaaaaccaaaagaaaagtccaaaaagaaagtggaagccaagtctatatttgatgatgatatggatgacatcttctcctctggtatccaggctaagacaaccaaaccaaaaagccgatctgcacaggccgcacctgaaccaagatttgaacacaaggtgtccaacatctttgatgatcccctgaatgcctttggaggccagtagagcacacagggtatccacatgttaccctgcagctacattgttgagttagtgatgatgttgtatatgctgatggtcttaactggattacaaaaagcaaatactagaacagctagctcatcgttcacccaatgtacttggtatttttctgcactggtttaatcatgcttaatactacaaaacaaaaataaatatttcacagtg

SEQ ID NO: 316617 - DNA, 4620 bp, Homo sapiens
  misc_feature (2)..(2): n is a, c, g, or t
anttggctggggctaggcttccggggctctgcagtcctcggcgtgtgctggcagcttcggagcccaccgagccgggcggctaggatgatgaaccggacgacccccgaccaggagctggcgccagcgtcggagcccgtgtgggagcggccgtggtcggtggaggagatccgcaggagcagccagagctggtcgctggcggccgacgcgggcctactacagtttctacaggaattctcacagcaaactatctctaggacccatgaaatcaagaaacaagtggacggactaattcgggaaaccaaagccacagattgtcgcctgcataatgtcttcaatgacttccttatgctctctaatacccagttcattgagaatcgtgtatatgatgaagaagtggaggagccagtactcaaggctgaggcagaaaaaacagagcaggagaagacacgagagcagaaagaagtagatctcattcctaaagtccaggaggctgtgaactatggcttacaagtattggacagtgcctttgagcaacttgatatcaaagcaggaaactcagactccgaggaagatgatgctaatgggcgggtggaactgatccttgaaccaaaggatctatacattgatcgtcctttaccatatctcattgggtcaaagctgttcatggaacaagaagatgtaggtcttggagagctgtccagtgaagaaggctctgtaggcagtgatcgtggcagtattgtggacactgaggaagagaaagaagaggaggagtcagatgaagattttgcccatcatagtgacaatgaacaaaaccggcacaccacacaaatgagtgatgaggaagaggatgatgatggctgtgaccttttcgctgactctgagaaggaggaggaagatattgaggacattgaagaaaatactagacctaaaagaagcagacctacatcgtttgcagatgagctggctgcccgcatcaagggggatgccgtgggtcgagtggacgaggagccgacaaccttaccctcaggagaagcaaaacctcggaagacactcaaagagaagaaggaaaggagaactccttcagacgatgaagaggataacttattcgcaccccccaagctgaccgacgaggacttctcgccatttggctctggaggtggcctgttcagtgggggcaaggggctctttgatgatgaggacgaggagagtgacctcttcacggaagccccccaggatcggcaagctggagcctctgttaaggaggagtcttcatcatccaaacctggaaagaaaatcccagcaggagctgtttctgtatttttaggagacacggatgtgtttggtgctgcctccgttccatcaatgaaggagccacagaagcctgagcagcccactccaaggaaaagcccctatggtccccctcccactggcctctttgatgatgatgatggtgatgatgatgacgactttttctcggcaccccacagcaaaccttctaaaacaggcaaagtccaatccactgccgatatctttggtgacgaagaaggagatctgttcaaagaaaaagccgtagcatcgccagaagccactgtgagtcagacagatgaaaataaagcaagagcagaaaaaaaggttaccttatcttccagcaaaaatctcaagccctcatcagaaacaaagactcaaaaaggcttattttcagatgaggaggactctgaggatttgttttcttctcaaagtgcgagtaagttaaaaggtgcgtctctgctgcctggcaagctccccacgttggtttccctgtttgatgatgaagatgaagaggataatctttttgggggtacagctgctaagaagcagacattgtgtctacaagctcagagagaagagaaagcaaaagcctccgagctctccaaaaagaaagcatctgccctgttgttcagcagtgatgaggaggaccagtggaatattcctgcttcacagacccacttagcatctgacagcaggtctaaaggagaacccagggattctgggaccctccagagccaggaggccaaggctgtgaaaaagaccagtctctttgaggaagacgaagaagatgatctttttgccattgccaaggacagccaaaagaagacccagagagtgtcactcctctttgaagacgatgttgatagcggaggctctctgtttggctctcctcccacatctgttcctcctgcaacaaagaaaaaagagactgtctctgaggcaccacctttgctgttcagcgatgaagaagagaaggaggcacaacttggagtgaagtctgtggataagaaggttgagagtgccaaggagtcattaaaatttgggagaactgatgtggctgagtcagaaaaggaaggacttttgactagatctgctcaggaaacagtcaagcattctgatttattttcttcatcatccccatgggacaaaggaaccaagcctagaaccaaaactgttcttagcttgtttgatgaggaagaggataaaatggaagatcaaaacattatccaggctccacagaaagaagtaggaaagggccgcgatcctgatgcccaccccaagagcacaggtgtcttccaggatgaagagctgcttttcagccacaagctccaaaaggacaatgacccagatgttgacctttttgctggcaccaaaaaaaccaagctgttagagccaagtgttgggagcctgtttggggatgatgaagatgatgatcttttcagctctgccaagtcccagcctttggtacaagagaaaaagagagtagtgaaaaaagaccactctgttgactctttcaaaaaccagaaacatcctgaatccattcaaggtagtaaagaaaaaggcatatggaagccggaaacacctcaggactcatcaggtctcgctccatttaaaaccaaagaaccatccactcggatcgggaagatacaagcaaatttagcgatcaacccagcggccttgctgcccacagcggcttcccagatctctgaagtaaagcctgttttgccagaattggcttttccttcatctgaacacagaaggagccacggtctggaaagtgtgcctgtccttcccgggagtggggaggccggtgtgagttttgatcttccagctcaggcagacaccttacacagtgcaaacaagagccgtgtcaagatgagagggaagcgtagaccgcagacccgtgcagctaggcggctggctgctcaggagtccagcgagactgaggacatgagcgtccccagaggacccattgcacagtgggctgatggcgccatttccccaaatggccatcggccacagctcagagcagccagtggagaagacagcactgaggaggccctggcagctgccgctgcaccttgggaaggtggtcctgtgcctggagtggacagaagcccctttgcaaagtctctgggtcattccagaggggaggctgacctttttgattctggggacatcttttccacgggcactggatctcagtctgtggagagaacaaaacccaaggcaaagatagcagagaatcctgccaacccaccagtgggtggtaaagcaaagagccccatgtttcctgctctaggtgaggccagcagtgatgatgatctctttcagtctgctaaaccaaaaccagcaaagaaaacaaatccctttcctctcctggaagatgaggatgacctctttacagatcagaaagtcaagaagaatgagacaaaatccaatagtcagcaggatgtcatattaacaacacaagatatttttgaggatgatatatttgctacggaagcaattaaaccctctcagaaaaccagagagaaggagaaaacattggaatctaatttatttgatgataacattgatatctttgctgacttaactgtaaaaccaaaagaaaagtccaaaaagaaagtggaagccaagtctatatttgatgatgatatggatgacatcttctcctctggtatccaggctaagacaaccaaaccaaaaagccgatctgcacaggccgcacctgaaccaagatttgaacacaaggtgtccaacatctttgatgatcccctgaatgcctttggaggccagtagagcacacagggtatccacatgttaccctgcagctacattgttgagttagtgatgatgttgtatatgctgatggtcttaactggattacaaaaagcaaatactagaacagctagctcatcgttcacccaatgtacttggtatttttctgcactggtttaatcatgcttaatactacaaaacaaaaataaatatttcacagtggttggtttgttttgtttttaaaccacagtttgatttagttagccttgctggggccataatatgcttcagggtgtaaatgccacctgaccagaagtctttgttatatggatgggaaccctaacttagggcctgggcaggggaaagagaaagaaggtgagagattatacttcatgagtcttagcaatatgggagcaggttttcactgaattctgagggtgcctctgcatgtcctccaaggcaaagtttggcaaactgtggcccccccactgtcatattttgttaataaaattttattggaacacaaccaca

SEQ ID NO: 316618 - DNA, 2680 bp, Homo sapiens
  misc_feature (2)..(2): n is a, c, g, or t
  misc_feature (2642)..(2642): n is a, c, g, or t
anttggctggggctaggcttccggggctctgcagtcctcggcgtgtgctggcagcttcggagcccaccgagccgggcggctaggatgatgaaccggacgacccccgaccaggagctggcgccagcgtcggagcccgtgtgggagcggccgtggtcggtggaggagatccgcaggagcagccagagctggtcgctggcggccgacgcgggcctactacagtttctacaggaattctcacagcaaactatctctaggacccatgaaatcaagaaacaagtggacggactaattcgggaaaccaaagccacagattgtcgcctgcataatgtcttcaatgacttccttatgctctctaatacccagttcattgagaatcgtgtatatgatgaagaagtggaggagccagtactcaaggctgaggcagaaaaaacagagcaggagaagacacgagagcagaaagaagtagatctcattcctaaagtccaggaggctgtgaactatggcttacaagtattggacagtgcctttgagcaacttgatatcaaagcaggaaactcagactccgaggaagatgatgctaatgggcgggtggaactgatccttgaaccaaaggatctatacattgatcgtcctttaccatatctcattgggtcaaagctgttcatggaacaagaagatgtaggtcttggagagctgtccagtgaagaaggctctgtaggcagtgatcgtggcagtattgtggacactgaggaagagaaagaagaggaggagtcagatgaagattttgcccatcatagtgacaatgaacaaaaccggcacaccacacaaatgagtgatgaggaagaggatgatgatggctgtgaccttttcgctgactctgagaaggaggaggaagatattgaggacattgaagaaaatactagacctaaaagaagcagacctacatcgtttgcagatgagctggctgcccgcatcaagggggatgccgtgggtcgagtggacgaggagccgacaaccttaccctcaggagaagcaaaacctcggaagacactcaaagagaagaaggaaaggagaactccttcagacgatgaagaggataacttattcgcaccccccaagctgaccgacgaggacttctcgccatttggctctggaggtggcctgttcagtgggggcaaggggctctttgatgatgaggacgaggagagtgacctcttcacggaagccccccaggatcggcaagctggagcctctgttaaggaggagtcttcatcatccaaacctggaaagaaaatcccagcaggagctgtttctgtatttttaggagacacggatgtgtttggtgctgcctccgttccatcaatgaaggagccacagaagcctgagcagcccactccaaggaaaagcccctatggtccccctcccactggcctctttgatgatgatgatggtgatgatgatgacgactttttctcggcaccccacagcaaaccttctaaaacaggcaaagtccaatccactgccgatatctttggtgacgaagaaggagatctgttcaaagaaaaagccgtagcatcgccagaagccactgtgagtcagacagatgaaaataaagcaagagcagaaaaaaaggttaccttatcttccagcaaaaatctcaagccctcatcagaaacaaagactcaaaaaggcttattttcagatgaggaggactctgaggatttgttttcttctcaaagtgcgagtaagttaaaaggtgcgtctctgctgcctggcaagctccccacgttggtttccctgtttgatgatgaagatgaagaggataatctttttgggggtacagctgctaagaagcagacattgtgtctacaagctcagagagaagagaaagcaaaagcctccgagctctccaaaaagaaagcatctgccctgttgttcagcagtgatgaggaggaccagtggaatattcctgcttcacagacccacttagcatctgacagcaggtctaaaggagaacccagggattctgggaccctccagagccaggaggccaaggctgtgaaaaagaccagtctctttgaggaagacgaagaagatgatctttttgccattgccaaggacagccaaaagaagacccagagagtgtcactcctctttgaagacgatgttgatagcggaggctctctgtttggctctcctcccacatctgttcctcctgcaacaaagaaaaaagagactgtctctgaggcaccacctttgctgttcagcgatgaagaagagaaggagaaaacattggaatctaatttatttgatgataacattgatatctttgctgacttaactgtaaaaccaaaagaaaagtccaaaaagaaagtggaagccaagtctatatttgatgatgatatggatgacatcttctcctctggtatccaggctaagacaaccaaaccaaaaagccgatctgcacaggccgcacctgaaccaagattttttgagactccgaaaagctttgtattttctactactatgctcagtgaacatatactgttgtcacaaattgttctttttattttatctcaaggtgctttggattgcagttagttgagatagcattttctccatcaagaaacttgtgtttattnggttttaaaaatgaaagtgttatggcaatgtcttatct

SEQ ID NO: 316619 - DNA, 830 bp, Homo sapiens
  misc_feature (2)..(2): n is a, c, g, or t
anttggctggggctaggcttccggggctctgcagtcctcggcgtgtgctggcagcttcggagcccaccgagccgggcggctaggatgatgaaccggacgacccccgaccaggagctggcgccagcgtcggagcccgtgtgggagcggccgtggtcggtggaggagatccgcaggagcagccagagctggtcgctggcggccgacgcgggcctactacagtttctacaggaattctcacagcaaactatctctaggacccatgaaatcaagaaacaagtggacggactaattcgggaaaccaaagccacagattgtcgcctgcataatgtcttcaatgacttccttatgctctctaatacccagttcattgagaatcgtgtatatgatgaagaagtggaggagccagtactcaaggctgaggcagaaaaaacagagcaggagaagacacgagagcagaaagaagtagatctcattcctaaagtccaggaggctgtgaactatggcttacaagtattggacagtgcctttgagcaacttgatatcaaagcaggaaactcagactccgaggaagatgatgctaatgggcgggtggaactgatccttgaaccaaaggatctatacattgatcgtcctttaccatatctcattgggtcaaagctgttcatggaacaagaagatgtaggtcttggagagctgtccagtgaagaaggctctgtaggcagtgatcgtggcagtattgtggacactgaggaagagaaagaagaggaggtaagggctgtttggtatgaccaggtcacggtgggcagcaagcttaatttaagatgggccta

SEQ ID NO: 316620 - DNA, 130 bp, Homo sapiens
gatcttttcagctctgccaagtcccagcctttggtaccagccttttgttctcaatactgggttgtgtgggaaagattctgggaaaggaaactaacgtccagttagatcattaaggaaaatcctaggagag

SEQ ID NO: 316621 - DNA, 448 bp, Homo sapiens
cgttatgtagcttgtttgggatagtcagatggaacagggtatcaggtggcacatgtaagtttgttttcaactgaaatgtttgacagcctattcctttcatgatgtacaggatctatacattgatcgtcctttaccatatctcattgggtcaaagctgttcatggaacaagaagatgtaggtcttggagagctgtccagtgaaggtacttttcttcaccaaataattttgttccttaacatttcttttttattttaaaataatttcaaattttacattaaagtttcaagaatagttcaaagaactctcatatacccttcacctgggtttaccagttaacatttcaccacatttgttagattgttctctacatatacgtaatattttgtcttgagcctatttgggagacatcatgctcatgccctgttacttctaaatgtttctctgtgt

SEQ ID NO: 316622 - DNA, 390 bp, Homo sapiens
cacatgcagctatgctttctcctggttttttgaattctttgtcatataccttatttcaaccagagtgacctcttcacggaagccccccaggatcggcaagctggagcctctgttaaggagggtaagctggggctgggcagctgcgtctccgtgtgcagagttccaaaactgtctttctcactaggagatggaacaaggttgttcccaagccttgtttctgtgttaagcaggaagctgttgtttttactgtggtccagttgaaagtaattcatcttcactaattcatgtcttggaaaaaacagtaccatctgtaaacccataccacagtcttgcctctttgttaggagagaactcatagaaagtcaaacaagaaaagtaccctagagcaat

SEQ ID NO: 316623 - DNA, 337 bp, Homo sapiens
tgtcctacacacgcacatacatacacttttgtagctgaagaaattgtgctccaagagaaacctgtgtgtgatcataaaatttaatgagtaacaaacacagaaccagaatctaagaggcttgagttctaggttagtgttttagggtactccatgctgttaccagagctgggtctttggtggtttgcttgcatgtgtcttaaaagtacctttctccacccctcttcagcaaccgttcttcttttttctttctaaagatgacatcttctcctctggtatccaggctaagacaaccaaaccaaaaagccgatctgcacaggccgcacctgaaccaagattt

SEQ ID NO: 316624 - DNA, 4580 bp, Homo sapiens
  misc_feature (2)..(2): n is a, c, g, or t
anttggctggggctaggcttccggggctctgcagtcctcggcgtgtgctggcagcttcggagcccaccgagccgggcggctaggatgatgaaccggacgacccccgaccaggagctggcgccagcgtcggagcccgtgtgggagcggccgtggtcggtggaggagatccgcaggagcagccagagctggtcgctggcggccgacgcgggcctactacagtttctacaggaattctcacagcaaactatctctaggacccatgaaatcaagaaacaagtggacggactaattcgggaaaccaaagccacagattgtcgcctgcataatgtcttcaatgacttccttatgctctctaatacccagttcattgagaatcgtgtatatgatgaagaagtggaggagccagtactcaaggctgaggcagaaaaaacagagcaggagaagacacgagagcagaaagaagtagatctcattcctaaagtccaggaggctgtgaactatggcttacaagtattggacagtgcctttgagcaacttgatatcaaagcaggaaactcagactccgaggaagatgatgctaatgggcgggtggaactgatccttgaaccaaagaaggctctgtaggcagtgatcgtggcagtattgtggacactgaggaagagaaagaagaggaggagtcagatgaagattttgcccatcatagtgacaatgaacaaaaccggcacaccacacaaatgagtgatgaggaagaggatgatgatggctgtgaccttttcgctgactctgagaaggaggaggaagatattgaggacattgaagaaaatactagacctaaaagaagcagacctacatcgtttgcagatgagctggctgcccgcatcaagggggatgccgtgggtcgagtggacgaggagccgacaaccttaccctcaggagaagcaaaacctcggaagacactcaaagagaagaaggaaaggagaactccttcagacgatgaagaggataacttattcgcaccccccaagctgaccgacgaggacttctcgccatttggctctggaggtggcctgttcagtgggggcaaggggctctttgatgatgaggacgaggagagtgacctcttcacggaagccccccaggatcggcaagctggagcctctgttaaggaggagtcttcatcatccaaacctggaaagaaaatcccagcaggagctgtttctgtatttttaggagacacggatgtgtttggtgctgcctccgttccatcaatgaaggagccacagaagcctgagcagcccactccaaggaaaagcccctatggtccccctcccactggcctctttgatgatgatgatggtgatgatgatgacgactttttctcggcaccccacagcaaaccttctaaaacaggcaaagtccaatccactgccgatatctttggtgacgaagaaggagatctgttcaaagaaaaagccgtagcatcgccagaagccactgtgagtcagacagatgaaaataaagcaagagcagaaaaaaaggttaccttatcttccagcaaaaatctcaagccctcatcagaaacaaagactcaaaaaggcttattttcagatgaggaggactctgaggatttgttttcttctcaaagtgcgagtaagttaaaaggtgcgtctctgctgcctggcaagctccccacgttggtttccctgtttgatgatgaagatgaagaggataatctttttgggggtacagctgctaagaagcagacattgtgtctacaagctcagagagaagagaaagcaaaagcctccgagctctccaaaaagaaagcatctgccctgttgttcagcagtgatgaggaggaccagtggaatattcctgcttcacagacccacttagcatctgacagcaggtctaaaggagaacccagggattctgggaccctccagagccaggaggccaaggctgtgaaaaagaccagtctctttgaggaagacgaagaagatgatctttttgccattgccaaggacagccaaaagaagacccagagagtgtcactcctctttgaagacgatgttgatagcggaggctctctgtttggctctcctcccacatctgttcctcctgcaacaaagaaaaaagagactgtctctgaggcaccacctttgctgttcagcgatgaagaagagaaggaggcacaacttggagtgaagtctgtggataagaaggttgagagtgccaaggagtcattaaaatttgggagaactgatgtggctgagtcagaaaaggaaggacttttgactagatctgctcaggaaacagtcaagcattctgatttattttcttcatcatccccatgggacaaaggaaccaagcctagaaccaaaactgttcttagcttgtttgatgaggaagaggataaaatggaagatcaaaacattatccaggctccacagaaagaagtaggaaagggccgcgatcctgatgcccaccccaagagcacaggtgtcttccaggatgaagagctgcttttcagccacaagctccaaaaggacaatgacccagatgttgacctttttgctggcaccaaaaaaaccaagctgttagagccaagtgttgggagcctgtttggggatgatgaagatgatgatcttttcagctctgccaagtcccagcctttggtacaagagaaaaagagagtagtgaaaaaagaccactctgttgactctttcaaaaaccagaaacatcctgaatccattcaaggtagtaaagaaaaaggcatatggaagccggaaacacctcaggactcatcaggtctcgctccatttaaaaccaaagaaccatccactcggatcgggaagatacaagcaaatttagcgatcaacccagcggccttgctgcccacagcggcttcccagatctctgaagtaaagcctgttttgccagaattggcttttccttcatctgaacacagaaggagccacggtctggaaagtgtgcctgtccttcccgggagtggggaggccggtgtgagttttgatcttccagctcaggcagacaccttacacagtgcaaacaagagccgtgtcaagatgagagggaagcgtagaccgcagacccgtgcagctaggcggctggctgctcaggagtccagcgagactgaggacatgagcgtccccagaggacccattgcacagtgggctgatggcgccatttccccaaatggccatcggccacagctcagagcagccagtggagaagacagcactgaggaggccctggcagctgccgctgcaccttgggaaggtggtcctgtgcctggagtggacagaagcccctttgcaaagtctctgggtcattccagaggggaggctgacctttttgattctggggacatcttttccacgggcactggatctcagtctgtggagagaacaaaacccaaggcaaagatagcagagaatcctgccaacccaccagtgggtggtaaagcaaagagccccatgtttcctgctctaggtgaggccagcagtgatgatgatctctttcagtctgctaaaccaaaaccagcaaagaaaacaaatccctttcctctcctggaagatgaggatgacctctttacagatcagaaagtcaagaagaatgagacaaaatccaatagtcagcaggatgtcatattaacaacacaagatatttttgaggatgatatatttgctacggaagcaattaaaccctctcagaaaaccagagagaaggagaaaacattggaatctaatttatttgatgataacattgatatctttgctgacttaactgtaaaaccaaaagaaaagtccaaaaagaaagtggaagccaagtctatatttgatgatgatatggatgacatcttctcctctggtatccaggctaagacaaccaaaccaaaaagccgatctgcacaggccgcacctgaaccaagatttgaacacaaggtgtccaacatctttgatgatcccctgaatgcctttggaggccagtagagcacacagggtatccacatgttaccctgcagctacattgttgagttagtgatgatgttgtatatgctgatggtcttaactggattacaaaaagcaaatactagaacagctagctcatcgttcacccaatgtacttggtatttttctgcactggtttaatcatgcttaatactacaaaacaaaaataaatatttcacagtggttggtttgttttgtttttaaaccacagtttgatttagttagccttgctggggccataatatgcttcagggtgtgtaaaagaagaaatctctttgtggctttcatgggcagggaatcccagagatagcaaatgccacctgaccagaagtctttgttatatggatgggaaccctaacttagggcctgggcaggggaaagagaaagaaggtgagagattatacttcatgagtcttagcaatatgggagcaggttttcactgaattctgagggtgcctctgcatgtcctccaaggcaaagtttggcaaactgtggcccccccactgtcatattttgttaataaaattttattggaacacaaccaca

SEQ ID NO: 316625 - DNA, 3484 bp, Homo sapiens
ctgcggtgactctagacgatcccgtatcgcttagtgctccccggatcggcaagctggagcctctgttaaggaggagtcttcatcatccaaacctggaaagaaaatcccagcaggagctgtttctgtatttttaggagacacggatgtgtttggtgctgcctccgttccatcaatgaaggagccacagaagcctgagcagcccactccaaggaaaagcccctatggtccccctcccactggcctctttgatgatgatgatggtgatgatgatgacgactttttctcggcaccccacagcaaaccttctaaaacaggcaaagtccaatccactgccgatatctttggtgacgaagaaggagatctgttcaaagaaaaagccgtagcatcgccagaagccactgtgagtcagacagatgaaaataaagcaagagcagaaaaaaaggttaccttatcttccagcaaaaatctcaagccctcatcagaaacaaagactcaaaaaggcttattttcagatgaggaggactctgaggatttgttttcttctcaaagtgcgagtaagttaaaaggtgcgtctctgctgcctggcaagctccccacgttggtttccctgtttgatgatgaagatgaagaggataatctttttgggggtacagctgctaagaagcagacattgtgtctacaagctcagagagaagagaaagcaaaagcctccgagctctccaaaaagaaagcatctgccctgttgttcagcagtgatgaggaggaccagtggaatattcctgcttcacagacccacttagcatctgacagcaggtctaaaggagaacccagggattctgggaccctccagagccaggaggccaaggctgtgaaaaagaccagtctctttgaggaagacgaagaagatgatctttttgccattgccaaggacagccaaaagaagacccagagagtgtcactcctctttgaagacgatgttgatagcggaggctctctgtttggctctcctcccacatctgttcctcctgcaacaaagaaaaaagagactgtctctgaggcaccacctttgctgttcagcgatgaagaagagaaggaggcacaacttggagtgaagtctgtggataagaaggttgagagtgccaaggagtcattaaaatttgggagaactgatgtggctgagtcagaaaaggaaggacttttgactagatctgctcaggaaacagtcaagcattctgatttattttcttcatcatccccatgggacaaaggaaccaagcctagaaccaaaactgttcttagcttgtttgatgaggaagaggataaaatggaagatcaaaacattatccaggctccacagaaagaagtaggaaagggccgcgatcctgatgcccaccccaagagcacaggtgtcttccaggatgaagagctgcttttcagccacaagctccaaaaggacaatgacccagatgttgacctttttgctggcaccaaaaaaaccaagctgttagagccaagtgttgggagcctgtttggggatgatgaagatgatgatcttttcagctctgccaagtcccagcctttggtacaagagaaaaagagagtagtgaaaaaagaccactctgttgactctttcaaaaaccagaaacatcctgaatccattcaaggtagtaaagaaaaaggcatatggaagccggaaacacctcaggactcatcaggtctcgctccatttaaaaccaaagaaccatccactcggatcgggaagatacaagcaaatttagcgatcaacccagcggccttgctgcccacagcggcttcccagatctctgaagtaaagcctgttttgccagaattggcttttccttcatctgaacacagaaggagccacggtctggaaagtgtgcctgtccttcccgggagtggggaggccggtgtgagttttgatcttccagctcaggcagacaccttacacagtgcaaacaagagccgtgtcaagatgagagggaagcgtagaccgcagacccgtgcagctaggcggctggctgctcaggagtccagcgagactgaggacatgagcgtccccagaggacccattgcacagtgggctgatggcgccatttccccaaatggccatcggccacagctcagagcagccagtggagaagacagcactgaggaggccctggcagctgccgctgcaccttgggaaggtggtcctgtgcctggagtggacagaagcccctttgcaaagtctctgggtcattccagaggggaggctgacctttttgattctggggacatcttttccacgggcactggatctcagtctgtggagagaacaaaacccaaggcaaagatagcagagaatcctgccaacccaccagtgggtggtaaagcaaagagccccatgtttcctgctctaggtgaggccagcagtgatgatgatctctttcagtctgctaaaccaaaaccagcaaagaaaacaaatccctttcctctcctggaagatgaggatgacctctttacagatcagaaagtcaagaagaatgagacaaaatccaatagtcagcaggatgtcatattaacaacacaagatatttttgaggatgatatatttgctacggaagcaattaaaccctctcagaaaaccagagagaaggagaaaacattggaatctaatttatttgatgataacattgatatctttgctgacttaactgtaaaaccaaaagaaaagtccaaaaagaaagtggaagccaagtctatatttgatgatgatatggatgacatcttctcctctggtatccaggctaagacaaccaaaccaaaaagccgatctgcacaggccgcacctgaaccaagatttgaacacaaggtgtccaacatctttgatgatcccctgaatgcctttggaggccagtagagcacacagggtatccacatgttaccctgcagctacattgttgagttagtgatgatgttgtatatgctgatggtcttaactggattacaaaaagcaaatactagaacagctagctcatcgttcacccaatgtacttggtatttttctgcactggtttaatcatgcttaatactacaaaacaaaaataaatatttcacagtggttggtttgttttgtttttaaaccacagtttgatttagttagccttgctggggccataatatgcttcagggtgtgtaaaagaagaaatctctttgtggctttcatgggcagggaatcccagagatagcaaatgccacctgaccagaagtctttgttatatggatgggaaccctaacttagggcctgggcaggggaaagagaaagaaggtgagagattatacttcatgagtcttagcaatatgggagcaggttttcactgaattctgagggtgcctctgcatgtcctccaaggcaaagtttggcaaactgtggcccccccactgtcatattttgttaataaaattttattggaacacaaccaca

SEQ ID NO: 316626 - DNA, 4311 bp, Homo sapiens
  misc_feature (2)..(2): n is a, c, g, or t
anttggctggggctaggcttccggggctctgcagtcctcggcgtgtgctggcagcttcggagcccaccgagccgggcggctaggatgatgaaccggacgacccccgaccaggagctggcgccagcgtcggagcccgtgtgggagcggccgtggtcggtggaggagatccgcaggagcagccagagctggtcgctggcggccgacgcgggcctactacagtttctacaggaattctcacagcaaactatctctaggacccatgaaatcaagaaacaagtggacggactaattcgggaaaccaaagccacagattgtcgcctgcataatgtcttcaatgacttccttatgctctctaatacccagttcattgagaatcgtgtatatgatgaagaagtggaggagccagtactcaaggctgaggcagaaaaaacagagcaggagaagacacgagagcagaaagaagtagatctcattcctaaagtccaggaggctgtgaactatggcttacaagtattggacagtgcctttgagcaacttgatatcaaagcaggaaactcagactccgaggaagatgatgctaatgggcgggtggaactgatccttgaaccaaaggatctatacattgatcgtcctttaccatatctcattgggtcaaagctgttcatggaacaagaagatgtaggtcttggagagctgtccagtgaagaaggctctgtaggcagtgatcgtggcagtattgtggacactgaggaagagaaagaagaggaggagtcagatgaagattttgcccatcatagtgacaatgaacaaaaccggcacaccacacaaatgagtgatgaggaagaggatgatgatggctgtgaccttttcgctgactctgagaaggaggaggaagatattgaggacattgaagaaaatactagacctaaaagaagcagacctacatcgtttgcagatgagctggctgcccgcatcaagggggatgccgtgggtcgagtggacgaggagccgacaaccttaccctcaggagaagcaaaacctcggaagacactcaaagagaagaaggaaaggagaactccttcagacgatgaagaggataacttattcgcaccccccaagctgaccgacgaggacttctcgccatttggctctggaggtggcctgttcagtgggggcaaggggctctttgatgatgaggacgaggagagtgacctcttcacggaagccccccaggatcggcaagctggagcctctgttaaggaggagtcttcatcatccaaacctggaaagaaaatcccagcaggagctgtttctgtatttttaggagacacggatgtgtttggtgctgcctccgttccatcaatgaaggagccacagaagcctgagcagcccactccaaggaaaagcccctatggtccccctcccactggcctctttgatgatgatgatggtgatgatgatgacgactttttctcggcaccccacagcaaaccttctaaaacaggcaaagtccaatccactgccgatatctttggtgacgaagaaggagatctgttcaaagaaaaagccgtagcatcgccagaagccactgtgagtcagacagatgaaaataaagcaagagcagaaaaaaaggttaccttatcttccagcaaaaatctcaagccctcatcagaaacaaagactcaaaaaggcttattttcagatgaggaggactctgaggatttgttttcttctcaaagtgcgagtaagttaaaaggtgcgtctctgctgcctggcaagctccccacgttggtttccctgtttgatgatgaagatgaagaggataatctttttgggggtacagctgctaagaagcagacattgtgtctacaagctcagagagaagagaaagcaaaagcctccgagctctccaaaaagaaagcatctgccctgttgttcagcagtgatgaggaggaccagtggaatattcctgcttcacagacccacttagcatctgacagcaggtctaaaggagaacccagggattctgggaccctccagagccaggaggccaaggctgtgaaaaagaccagtctctttgaggaagacgaagaagatgatctttttgccattgccaaggacagccaaaagaagacccagagagtgtcactcctctttgaagacgatgttgatagcggaggctctctgtttggctctcctcccacatctgttcctcctgcaacaaagaaaaaagagactgtctctgaggcaccacctttgctgttcagcgatgaagaagagaaggaggcacaacttggagtgaagtctgtggataagaaggttgagagtgccaaggagtcattaaaatttgggagaactgatgtggctgagtcagaaaaggaaggacttttgactagatctgctcaggaaacagtcaagcattctgatttattttcttcatcatccccatgggacaaaggaaccaagcctagaaccaaaactgttcttagcttgtttgatgaggaagaggataaaatggaagatcaaaacattatccaggctccacagaaagaagtaggaaagggccgcgatcctgatgcccaccccaagagcacaggtgtcttccaggatgaagagctgcttttcagccacaagctccaaaaggacaatgacccagatgttgacctttttgctggcaccaaaaaaaccaagctgttagagccaagtgttgggagcctgtttggggatgatgaagatgatgatcttttcagctctgccaagtcccagcctttggtacaagagaaaaagagagtagtgaaaaaagaccactctgttgactctttcaaaaaccagaaacatcctgaatccattcaaggtagtaaagaaaaaggcatatggaagccggaaacacctcaggactcatcaggtctcgctccatttaaaaccaaagaaccatccactcggatcgggaagatacaagcaaatttagcgatcaacccagcggccttgctgcccacagcggcttcccagatctctgaagtaaagcctgttttgccagaattggcttttccttcatctgaacacagaaggagccacggtctggaaagtgtgcctgtccttcccgggagtggggaggccggtgtgagttttgatcttccagctcaggcagacaccttacacagtgcaaacaagagccgtgtcaagatgagagggaagcgtagaccgcagacccgtgcagctaggcggctggctgctcaggagtccagcgagactgaggacatgagcgtccccagaggacccattgcacagtgggctgatggcgccatttccccaaatggccatcggccacagctcagagcagccagtggagaagacagcactgaggaggccctggcagctgccgctgcaccttgggaaggtggtcctgtgcctggagtggacagaagcccctttgcaaagtctctgggtcattccagaggggaggctgacctttttgattctggggacatcttttccacgggcactggatctcagtctgtggagagaacaaaacccaaggcaaagatagcagagaatcctgccaacccaccagtgggtggtaaagcaaagagccccatgtttcctgctctaggtgaggccagcagtgatgatgatctctttcagtctgctaaaccaaaaccagcaaagaaaacaaatccctttcctctcctggaagatgaggatgacctctttacagatcagaaagtcaagaagaatgagacaaaatccaatagtcagcaggatgtcatattaacaacacaagatatttttgaggatgatatatttgctacggaagcaattaaaccctctcagaaaaccagagagaaggagaaaacattggaatctaatttatttgatgataacattgatatctttgctgacttaactgtaaaaccaaaagaaaagtccaaaaagaaagtggaagccaagtctatatttgatgatgatatggatgacatcttctcctctggtatccaggctaagacaaccaaaccaaaaagccgatctgcacaggccgcacctgaaccaagatttgaacacaaggtgtccaacatctttgatgatcccctgaatgcctttggaggccagtagagcacacagggtatccacatgttaccctgcagctacattgttgagttagtgatgatgttgtatatgctgatggtcttaactggattacaaaaagcaaatactagaacagctagctcatcgttcacccaatgtacttggtatttttctgcactggtttaatcatgcttaatactacaaaacaaaaataaatatttcacagtg

SEQ ID NO: 316627 - DNA, 3111 bp, Homo sapiens
  misc_feature (2)..(2): n is a, c, g, or t
anttggctggggctaggcttccggggctctgcagtcctcggcgtgtgctggcagcttcggagcccaccgagccgggcggctaggatgatgaaccggacgacccccgaccaggagctggcgccagcgtcggagcccgtgtgggagcggccgtggtcggtggaggagatccgcaggagcagccagagctggtcgctggcggccgacgcgggcctactacagtttctacaggaattctcacagcaaactatctctaggacccatgaaatcaagaaacaagtggacggactaattcgggaaaccaaagccacagattgtcgcctgcataatgtcttcaatgacttccttatgctctctaatacccagttcattgagaatcgtgtatatgatgaagaagtggaggagccagtactcaaggctgaggcagaaaaaacagagcaggagaagacacgagagcagaaagaagtagatctcattcctaaagtccaggaggctgtgaactatggcttacaagtattggacagtgcctttgagcaacttgatatcaaagcaggaaactcagactccgaggaagatgatgctaatgggcgggtggaactgatccttgaaccaaaggatctatacattgatcgtcctttaccatatctcattgggtcaaagctgttcatggaacaagaagatgtaggtcttggagagctgtccagtgaagaaggctctgtaggcagtgatcgtggcagtattgtggacactgaggaagagaaagaagaggaggagtcagatgaagattttgcccatcatagtgacaatgaacaaaaccggcacaccacacaaatgagtgatgaggaagaggatgatgatggctgtgaccttttcgctgactctgagaaggaggaggaagatattgaggacattgaagaaaatactagacctaaaagaagcagacctacatcgtttgcagatgagctggctgcccgcatcaagggggatgccgtgggtcgagtggacgaggagccgacaaccttaccctcaggagaagcaaaacctcggaagacactcaaagagaagaaggaaaggagaactccttcagacgatgaagaggataacttattcgcaccccccaagctgaccgacgaggacttctcgccatttggctctggaggtggcctgttcagtgggggcaaggggctctttgatgatgaggacgaggagagtgacctcttcacggaagccccccaggatcggcaagctggagcctctgttaaggaggagtcttcatcatccaaacctggaaagaaaatcccagcaggagctgtttctgtatttttaggagacacggatgtgtttggtgctgcctccgttccatcaatgaaggagccacagaagcctgagcagcccactccaaggaaaagcccctatggtccccctcccactggcctctttgatgatgatgatggtgatgatgatgacgactttttctcggcaccccacagcaaaccttctaaaacaggcaaagtccaatccactgccgatatctttggtgacgaagaaggagatctgttcaaagaaaaagccgtagcatcgccagaagccactgtgagtcagacagatgaaaataaagcaagagcagaaaaaaaggttaccttatcttccagcaaaaatctcaagccctcatcagaaacaaagactcaaaaaggcttattttcagatgaggaggactctgaggatttgttttcttctcaaagtgcgagtaagttaaaaggtgcgtctctgctgcctggcaagctccccacgttggtttccctgtttgatgatgaagatgaagaggataatctttttgggggtacagctgctaagaagcagacattgtgtctacaagctcagagagaagagaaagcaaaagcctccgagctctccaaaaagaaagcatctgccctgttgttcagcagtgatgaggaggaccagtggaatattcctgcttcacagacccacttagcatctgacagcaggtctaaaggagaacccagggattctgggaccctccagagccaggaggccaaggctgtgaaaaagaccagtctctttgaggaagacgaagaagatgatctttttgccattgccaaggacagccaaaagaagacccagagagtgtcactcctctttgaagacgatgttgatagcggaggctctctgtttggctctcctcccacatctgttcctcctgcaacaaagaaaaaagagactgtctctgaggcaccacctttgctgttcagcgatgaagaagagaaggagaaaacattggaatctaatttatttgatgataacattgatatctttgctgacttaactgtaaaaccaaaagaaaagtccaaaaagaaagtggaagccaagtctatatttgatgatgatatggatgacatcttctcctctggtatccaggctaagacaaccaaaccaaaaagccgatctgcacaggccgcacctgaaccaagatttgaacacaaggtgtccaacatctttgatgatcccctgaatgcctttggaggccagtagagcacacagggtatccacatgttaccctgcagctacattgttgagttagtgatgatgttgtatatgctgatggtcttaactggattacaaaaagcaaatactagaacagctagctcatcgttcacccaatgtacttggtatttttctgcactggtttaatcatgcttaatactacaaaacaaaaataaatatttcacagtggttggtttgttttgtttttaaaccacagtttgatttagttagccttgctggggccataatatgcttcagggtgtgtaaaagaagaaatctctttgtggctttcatgggcagggaatcccagagatagcaaatgccacctgaccagaagtctttgttatatggatgggaaccctaacttagggcctgggcaggggaaagagaaagaaggtgagagattatacttcatgagtcttagcaatatgggagcaggttttcactgaattctgagggtgcctctgcatgtcctccaaggcaaagtttggcaaactgtggcccccccactgtcatattttgttaataaaattttattggaacacaaccaca

SEQ ID NO: 316628 - DNA, 1041 bp, Homo sapiens
  misc_feature (2)..(2): n is a, c, g, or t
anttggctggggctaggcttccggggctctgcagtcctcggcgtgtgctggcagcttcggagcccaccgagccgggcggctaggatgatgaaccggacgacccccgaccaggagctggcgccagcgtcggagcccgtgtgggagcggccgtggtcggtggaggagatccgcaggagcagccagagctggtcgctggcggccgacgcgggcctactacagtttctacaggaattctcacagcaaactatctctaggacccatgaaatcaagaaacaagtggacggactaattcgggaaaccaaagccacagattgtcgcctgcataatgtcttcaatgacttccttatgctctctaatacccagttcattgagaatcgtgtatatgatgaagaagtggaggagccagtactcaaggctgaggcagaaaaaacagagcaggagaagacacgagagcagaaagaagtagatctcattcctaaagtccaggaggctgtgaactatggcttacaagtattggacagtgcctttgagcaacttgatatcaaagcaggaaactcagactccgaggaagatgatgctaatgggcgggtggaactgatccttgaaccaaaggatctatacattgatcgtcctttaccatatctcattgggtcaaagctgttcatggaacaagaagatgtaggtcttggagagctgtccagtgaagaaggctctgtaggcagtgatcgtggcagtattgtggacactgaggaagagaaagaagaggaggagtcagatgaagattttgcccatcatagtgacaatgaacaaaaccggcacaccacacaaatgagtgatgaggaagaggatgatgatggctgtgaccttttcgctgactctgagaaggaggaggaagatattgaggacattgaagaaaatactagacctaaaagaagcagacctacatcgtttgcagatgagctggctgcccgcatcaagggggatgccgtgggtcgagtggacgaggagccgacaagtgagccccagccgcgttgatgggga

SEQ ID NO: 316629 - DNA, 411 bp, Homo sapiens
  misc_feature (2)..(2): n is a, c, g, or t
anttggctggggctaggcttccggggctctgcagtcctcggcgtgtgctggcagcttcggagcccaccgagccgggcggctaggatgatgaaccggacgacccccgaccaggagctggcgccagcgtcggagcccgtgtgggagcggccgtggtcggtggaggagatccgcaggagcagccagagctggtcgctggcggccgacgcgggcgtgagaggcgggccccggggacgcgagagcggcaggggtgacgcttggcttgcgcgcaggagggccggaccgcgactgcccctgcacctggcccgtcccgttgcctgccctcttaggaacacacgccccgtttagcccccgagaatgccaccctggcagtccccggccaccagggagaggggcagacactgaccgtggccc

SEQ ID NO: 316630 - DNA, 3162 bp, Homo sapiens
aaggctaggtacgaggcctgggtggtaccactcgagctgcccccgccctctggacccgagtgactcaggcctttgtttgtccttcctggtagaggcgggttccctccctcggcaagatgccggagtgctgggatggggaacatgacatcgagacaccctacggccttctgcatgtagtgatccggggctcccccaaggggaaccgcccagccatcctcacctaccatgatgtgggcctcaaccacaaactatgcttcaacaccttcttcaacttcgaggacatgcaggagatcaccaagcactttgtggtgtgtcacgtggatgcccctggacaacaggtgggggcgtcgcagtttcctcaggggtaccagttcccctccatggagcagctggctgccatgctccccagcgtggtgcagcatttcgggttcaagtatgtgattggcatcggagtgggcgccggagcctatgtgctggccaagtttgcactcatcttccccgacctggtggaggggctggtgctggtgaacatcgaccccaatggcaaaggctggatagactgggctgccaccaagctctccggcctaactagcactttacccgacacggtgctctcccacctcttcagccaggaggagctggtgaacaacacagagttggtgcagagctaccggcagcagattgggaacgtggtgaaccaggccaacctgcagctcttctggaacatgtacaacagccgcagagacctggacattaaccggcctggaacggtgcccaatgccaagacgctccgctgccccgtgatgctggtggttggggataatgcacccgctgaggacggggtggtggagtgcaactccaaactggacccgaccactacgaccttcctgaagatggcagactctggagggctgccccaggtcacacagccagggaagctgactgaagccttcaaatacttcctgcaaggcatgggctacatgccctcagccagcatgacccgcctggcacgctcccgcactgcatccctcaccagtgccagctcggtggatggcagccgcccacaggcctgcacccactcggagagcagcgaggggctgggccaggtcaaccacaccatggaggtgtcctgttgaagcccttgatcccgctgacgacgcccacgtcgaggccccaccgccatccttgcgccggctcatgttccctttagtttatttttgtgagggcaaaggggaggaaatggggttctgtttgaaaaaaatgaggggatcttagatgctgcagcagaacagtctccaggtgttttaaggggctcagtcctcctcatcccatctcactctccgtggtaacttagccaacttgacccctctcatcccactcccggcggcccaggcacagaagggcagggccatagggagggagattcgctacggatccaggtcattcctgggtgagcccttgggcaggcatgtttggagatgagagaggcttcgagagggtgggtgctgggccacaggggtgcggggccagctcaggcactggcgtgggagccctgggagaccccttcccccaccctccaccaagcacacctgtttctgtctcatagcacatgtgacaatcatctggacaacagccacaagggggcgctcggaccaggcagccactttcctggtgctctctgggcccagctggtgctgtagggccacgcaggcaggggcgtcaaggggtttctctgcccaaggaagacagaacatggagaaccgtcagggcaggaaccccacagactgtcccttccagcccacactctgccacctcctggccctgtcccaattctgagccaaggcctccccgaggcagaagttgcctggtcctctgtccccacagtgacctgactgggggtgagggagaaggaggagagagcccatgtgtggtgtgtgtgcccctgagaacttcgtggtgactgcctttgggagcccgcaggtggccagaggcaggggtagctgagttcctggagaccccttttttgcccccaggttccccagagggcaacgccatcagtagcagtgtggtgtttcaggcagagctctggccaggctgtgccagtgtgtcccggacgcatcactaaggaagagagagtttatttagtcaactggcccaaggcagcgaggcttctacagtcccacaccccatagccgcctgggctggggcttactgggggctgaaggttctggacatgaacaagggtcaggtagaagagaaaggcttcccctacaccccagcctcctgctgtcccctgaagcccaggactgcgttgtatgctttccatccactcaccttaccccatagcatcttgcggcccagaaaccagagccatttgtctcagaccctaaatcaataatcacaaaccccaaaacgggagagagcagtgaaaacatgcagggctgtggacgggggaagggttgtggcgggtgttctgaggctgagaggacacctatatgcgtatttcctctacacacatcaccccccttctataatcttaagccatgactagcctggtggcgtgttagtttctgcccagttctaccccctcatgtgcttcttctgaatactgaatgtgactgtttgaaagctggtagaattcatccctcttactgtagataacactgcaaatcttggaattttgttttttgctgtttccagatgtatctataaatatctatacattatatgtgtgtgtgtgtgtgtgtgtgtgtgtacatcgggtcctcccatgtgtggtgttcttctggaggttgtctctttggtcaaggtgaacttttaatgtttattattttcttctccgcacaaagtaaagagcctaattttgtgtattctggtggctgctgtcatgagatgataaaatgtaaaacaaaactctagtcaacgtagaaagagttaactgtgctgaaaaactaataaagaacctaagaagaattccagtgtggtgatgccatgcccatcatgggaggcttttggagaaacagaatgtttgggcaggggctgctggtgctgcttgggttttgggttgagggtgctaggagaggatggtctccacccatctttctatttccagtacacgtcacattattttaccggtgagatgagaatgtcacaaacattaaa

SEQ ID NO: 316631 - DNA, 3252 bp, Homo sapiens
tcctggctgcccgcacctgcacccgcgcgtcggcggcgccgaagccccgctccccgcctgcgcgtctgtctcgtccgcatctccgcggcctcctgctccacgacgtgaccatggccgggctgcaggagctgcgattccctgaggagaagccgctgctccggggccaggacgccaccgagctggagagctccgatgccttcctcttggctgcagacacagactggaaggaacatgacatcgagacaccctacggccttctgcatgtagtgatccggggctcccccaaggggaaccgcccagccatcctcacctaccatgatgtgggcctcaaccacaaactatgcttcaacaccttcttcaacttcgaggacatgcaggagatcaccaagcactttgtggtgtgtcacgtggatgcccctggacaacaggtgggggcgtcgcagtttcctcaggggtaccagttcccctccatggagcagctggctgccatgctccccagcgtggtgcagcatttcgggttcaagtatgtgattggcatcggagtgggcgccggagcctatgtgctggccaagtttgcactcatcttccccgacctggtggaggggctggtgctggtgaacatcgaccccaatggcaaaggctggatagactgggctgccaccaagctctccggcctaactagcactttacccgacacggtgctctcccacctcttcagccaggaggagctggtgaacaacacagagttggtgcagagctaccggcagcagattgggaacgtggtgaaccaggccaacctgcagctcttctggaacatgtacaacagccgcagagacctggacattaaccggcctggaacggtgcccaatgccaagacgctccgctgccccgtgatgctggtggttggggataatgcacccgctgaggacggggtggtggagtgcaactccaaactggacccgaccactacgaccttcctgaagatggcagactctggagggctgccccaggtcacacagccagggaagctgactgaagccttcaaatacttcctgcaaggcatgggctacatgccctcagccagcatgacccgcctggcacgctcccgcactgcatccctcaccagtgccagctcggtggatggcagccgcccacaggcctgcacccactcggagagcagcgaggggctgggccaggtcaaccacaccatggaggtgtcctgttgaagcccttgatcccgctgacgacgcccacgtcgaggccccaccgccatccttgcgccggctcatgttccctttagtttatttttgtgagggcaaaggggaggaaatggggttctgtttgaaaaaaatgaggggatcttagatgctgcagcagaacagtctccaggtgttttaaggggctcagtcctcctcatcccatctcactctccgtggtaacttagccaacttgacccctctcatcccactcccggcggcccaggcacagaagggcagggccatagggagggagattcgctacggatccaggtcattcctgggtgagcccttgggcaggcatgtttggagatgagagaggcttcgagagggtgggtgctgggccacaggggtgcggggccagctcaggcactggcgtgggagccctgggagaccccttcccccaccctccaccaagcacacctgtttctgtctcatagcacatgtgacaatcatctggacaacagccacaagggggcgctcggaccaggcagccactttcctggtgctctctgggcccagctggtgctgtagggccacgcaggcaggggcgtcaaggggtttctctgcccaaggaagacagaacatggagaaccgtcagggcaggaaccccacagactgtcccttccagcccacactctgccacctcctggccctgtcccaattctgagccaaggcctccccgaggcagaagttgcctggtcctctgtccccacagtgacctgactgggggtgagggagaaggaggagagagcccatgtgtggtgtgtgtgcccctgagaacttcgtggtgactgcctttgggagcccgcaggtggccagaggcaggggtagctgagttcctggagaccccttttttgcccccaggttccccagagggcaacgccatcagtagcagtgtggtgtttcaggcagagctctggccaggctgtgccagtgtgtcccggacgcatcactaaggaagagagagtttatttagtcaactggcccaaggcagcgaggcttctacagtcccacaccccatagccgcctgggctggggcttactgggggctgaaggttctggacatgaacaagggtcaggtagaagagaaaggcttcccctacaccccagcctcctgctgtcccctgaagcccaggactgcgttgtatgctttccatccactcaccttaccccatagcatcttgcggcccagaaaccagagccatttgtctcagaccctaaatcaataatcacaaaccccaaaacgggagagagcagtgaaaacatgcagggctgtggacgggggaagggttgtggcgggtgttctgaggctgagaggacacctatatgcgtatttcctctacacacatcaccccccttctataatcttaagccatgactagcctggtggcgtgttagtttctgcccagttctaccccctcatgtgcttcttctgaatactgaatgtgactgtttgaaagctggtagaattcatccctcttactgtagataacactgcaaatcttggaattttgttttttgctgtttccagatgtatctataaatatctatacattatatgtgtgtgtgtgtgtgtgtgtgtgtgtacatcgggtcctcccatgtgtggtgttcttctggaggttgtctctttggtcaaggtgaacttttaatgtttattattttcttctccgcacaaagtaaagagcctaattttgtgtattctggtggctgctgtcatgagatgataaaatgtaaaacaaaactctagtcaacgtagaaagagttaactgtgctgaaaaactaataaagaacctaagaagaattccagtgtggtgatgccatgcccatcatgggaggcttttggagaaacagaatgtttgggcaggggctgctggtgctgcttgggttttgggttgagggtgctaggagaggatggtctccacccatctttctatttccagtacacgtcacattattttaccggtgagatgagaatgtcacaaacattaaa

SEQ ID NO: 316632 - DNA, 2978 bp, Homo sapiens
aaggctaggtacgaggcctgggtggtaccactcgagctgcccccgccctctggacccgagtgactcaggcctttgtttgtccttcctggtagaggcgggttccctccctcggcaagatgccggagtgctgggatggggaacatgacatcgagacaccctacggccttctgcatgtagtgatccggggctcccccaaggggaaccgcccagccatcctcacctaccatgatgtgggcctcaaccacaaactatgcttcaacaccttcttcaacttcgaggacatgcaggagatcaccaagcactttgtggtgtgtcacgtggatgcccctggacaacaggtgggggcgtcgcagtttcctcaggggtaccagttcccctccatggagcagctggctgccatgctccccagcgtggtgcagcatttcgggttcaagtatgtgattggcatcggagtgggcgccggagcctatgtgctggccaagtttgcactcatcttccccgacctggtggaggggctggtgctggtgaacatcgaccccaatggcaaaggctggatagactgggctgccaccaagctctccggcctaactagcactttacccgacacggtgctctcccacctcttcagccaggaggagctggtgaacaacacagagttggtgcagagctaccggcagcagattgggaacgtggtgaaccaggccaacctgcagctcttctggaacatgtacaacagccgcagagacctggacattaaccggcctggaacggtgcccaatgccaagacgctccgctgccccgtgatgctggtggttggggataatgcacccgctgaggacggggtggtggagtgcaactccaaactggacccgaccactacgaccttcctgaagatggcagactctggagggctgccccaggtcacacagccagggaagctgactgaagccttcaaatacttcctgcaaggcatgggctacatgccctcagccagcatgacccgcctggcacgctcccgcactgcatccctcaccagtgccagctcggtggatggcagccgcccacaggcctgcacccactcggagagcagcgaggggctgggccaggtcaaccacaccatggaggtgtcctgttgaagcccttgatcccgctgacgacgcccacgtcgaggccccaccgccatccttgcgccggctcatgttccctttagtttatttttgtgagggcaaaggggaggaaatggggttctgtttgaaaaaaatgaggggatcttagatgctgcagcagaacagtctccaggtgttttaaggggctcagtcctcctcatcccatctcactctccgtggtaacttagccaacttgacccctctcatcccactcccggcggcccaggcacagaagggcagggccatagggagggagattcgctacggatccaggtcattcctgggtgagcccttgggcaggcatgtttggagatgagagaggcttcgagagggtgggtgctgggccacaggggtgcggggccagctcaggcactggcgtgggagccctgggagaccccttcccccaccctccaccaagcacacctgtttctgtctcatagcacatgtgacaatcatctggacaacagccacaagggggcgctcggaccaggcagccactttcctggtgctctctgggcccagctggtgctgtagggccacgcaggcaggggcgtcaaggggtttctctgcccaaggaagacagaacatggagaaccgtcagggcaggaaccccacagactgtcccttccagcccacactctgccacctcctggccctgtcccaattctgagccaaggcctccccgaggcagaagttgcctggtcctctgtccccacagtgacctgactgggggtgagggagaaggaggagagagcccatgtgtggtgtgtgtgcccctgagaacttcgtggtgactgcctttgggagcccgcaggtggccagaggcaggggtagctgagttcctggagaccccttttttgcccccaggttccccagagggcaacgccatcagtagcagtgtggtgtttcaggcagagctctggccaggctgtgccagtgtgtcccggacgcatcactaaggaagagagagtttatttagtcaactggcccaaggcagcgaggcttctacagtcccacaccccatagccgcctgggctggggcttactgggggctgaaggttctggacatgaacaagggtcaggtagaagagaaaggcttcccctacaccccagcctcctgctgtcccctgaagcccaggactgcgttgtatgctttccatccactcaccttaccccatagcatcttgcggcccagaaaccagagccatttgtctcagaccctaaatcaataatcacaaaccccaaaacgggagagagcagtgaaaacatgcagggctgtggacgggggaagggttgtggcgggtgttctgaggctgagaggacacctatatgcgtatttcctctacacacatcaccccccttctataatcttaagccatgactagcctggtggcgtgttagtttctgcccagttctaccccctcatgtgcttcttctgaatactgaatgtgactgtttgaaagctggtagaattcatccctcttactgtagataacactgcaaatcttggaattttgttttttgctgtttccagatgtatctataaatatctatacattatatgtgtgtgtgtgtgtgtgtgtgtgtgtacatcgggtcctcccatgtgtggtgttcttctggaggttgtctctttggtcaaggtgaacttttaatgtttattattttcttctccgcacaaagtaaagagcctaattttgtgtattctggtggctgctgtcatgagatgataaaatgtaaaacaaaactctagtcaacgtagaaagagttaactgtgctgaaaaactaataaagaacctaagaagaattcca

SEQ ID NO: 316633 - DNA, 3196 bp, Homo sapiens
agcggacggagccgaccatctcccactcgagctgcccccgccctctggacccgagtgactcaggcctttgtttgtccttcctggtagaggcgggttccctccctcggcaagatgccggagtgctgggatggggaacatgacatcgagacaccctacggccttctgcatgtagtgatccggggctcccccaaggggaaccgcccagccatcctcacctaccatgatgtgggcctcaaccacaaactatgcttcaacaccttcttcaacttcgaggacatgcaggagatcaccaagcactttgtggtgtgtcacgtggatgcccctggacaacaggtgggggcgtcgcagtttcctcaggggtaccagttcccctccatggagcagctggctgccatgctccccagcgtggtgcagcatttcgggttcaagtatgtgattggcatcggagtgggcgccggagcctatgtgctggccaagtttgcactcatcttccccgacctggtggaggggctggtgctggtgaacatcgaccccaatggcaaaggctggatagactgggctgccaccaagctctccggcctaactagcactttacccgacacggtgctctcccacctcttcagccaggaggagctggtgaacaacacagagttggtgcagagctaccggcagcagattgggaacgtggtgaaccaggccaacctgcagctcttctggaacatgtacaacagccgcagagacctggacattaaccggcctggaacggtgcccaatgccaagacgctccgctgccccgtgatgctggtggttggggataatgcacccgctgaggacggggtggtggagtgcaactccaaactggacccgaccactacgaccttcctgaagatggcagactctggagggctgccccaggtcacacagccagggaagctgactgaagccttcaaatacttcctgcaaggcatgggctacattgcgtacttgaaggaccgaaggctgagtggaggagcagtgccctcagccagcatgacccgcctggcacgctcccgcactgcatccctcaccagtgccagctcggtggatggcagccgcccacaggcctgcacccactcggagagcagcgaggggctgggccaggtcaaccacaccatggaggtgtcctgttgaagcccttgatcccgctgacgacgcccacgtcgaggccccaccgccatccttgcgccggctcatgttccctttagtttatttttgtgagggcaaaggggaggaaatggggttctgtttgaaaaaaatgaggggatcttagatgctgcagcagaacagtctccaggtgttttaaggggctcagtcctcctcatcccatctcactctccgtggtaacttagccaacttgacccctctcatcccactcccggcggcccaggcacagaagggcagggccatagggagggagattcgctacggatccaggtcattcctgggtgagcccttgggcaggcatgtttggagatgagagaggcttcgagagggtgggtgctgggccacaggggtgcggggccagctcaggcactggcgtgggagccctgggagaccccttcccccaccctccaccaagcacacctgtttctgtctcatagcacatgtgacaatcatctggacaacagccacaagggggcgctcggaccaggcagccactttcctggtgctctctgggcccagctggtgctgtagggccacgcaggcaggggcgtcaaggggtttctctgcccaaggaagacagaacatggagaaccgtcagggcaggaaccccacagactgtcccttccagcccacactctgccacctcctggccctgtcccaattctgagccaaggcctccccgaggcagaagttgcctggtcctctgtccccacagtgacctgactgggggtgagggagaaggaggagagagcccatgtgtggtgtgtgtgcccctgagaacttcgtggtgactgcctttgggagcccgcaggtggccagaggcaggggtagctgagttcctggagaccccttttttgcccccaggttccccagagggcaacgccatcagtagcagtgtggtgtttcaggcagagctctggccaggctgtgccagtgtgtcccggacgcatcactaaggaagagagagtttatttagtcaactggcccaaggcagcgaggcttctacagtcccacaccccatagccgcctgggctggggcttactgggggctgaaggttctggacatgaacaagggtcaggtagaagagaaaggcttcccctacaccccagcctcctgctgtcccctgaagcccaggactgcgttgtatgctttccatccactcaccttaccccatagcatcttgcggcccagaaaccagagccatttgtctcagaccctaaatcaataatcacaaaccccaaaacgggagagagcagtgaaaacatgcagggctgtggacgggggaagggttgtggcgggtgttctgaggctgagaggacacctatatgcgtatttcctctacacacatcaccccccttctataatcttaagccatgactagcctggtggcgtgttagtttctgcccagttctaccccctcatgtgcttcttctgaatactgaatgtgactgtttgaaagctggtagaattcatccctcttactgtagataacactgcaaatcttggaattttgttttttgctgtttccagatgtatctataaatatctatacattatatgtgtgtgtgtgtgtgtgtgtgtgtgtacatcgggtcctcccatgtgtggtgttcttctggaggttgtctctttggtcaaggtgaacttttaatgtttattattttcttctccgcacaaagtaaagagcctaattttgtgtattctggtggctgctgtcatgagatgataaaatgtaaaacaaaactctagtcaacgtagaaagagttaactgtgctgaaaaactaataaagaacctaagaagaattccagtgtggtgatgccatgcccatcatgggaggcttttggagaaacagaatgtttgggcaggggctgctggtgctgcttgggttttgggttgagggtgctaggagaggatggtctccacccatctttctatttccagtacacgtcacattattttaccggtgagatgagaatgtcacaaacattaaa

SEQ ID NO: 316634 - DNA, 1090 bp, Homo sapiens
gggaaaatgcctgacagcagacacaagggaaccctgctgggttctggggccccactggccatcccgacatgctgaaccaattcagacccttcctcctggaacatgacatcgagacaccctacggccttctgcatgtagtgatccggggctcccccaaggggaaccgcccagccatcctcacctaccatgatgtgggcctcaaccacaaactatgcttcaacaccttcttcaacttcgaggacatgcaggagatcaccaagcactttgtggtgtgtcacgtggatgcccctggacaacaggtgggggcgtcgcagtttcctcaggggtaccagttcccctccatggagcagctggctgccatgctccccagcgtggtgcagcatttcgggttcaagtatgtgattggcatcggagtgggcgccggagcctatgtgctggccaagtttgcactcatcttccccgacctggtggaggggctggtgctggtgaacatcgaccccaatggcaaaggctggatagactgggctgccaccaagctctccggcctaactagcactttacccgacacggtgctctcccacctcttcagccaggaggagctggtgaacaacacagagttggtgcagagctaccggcagcagattgggaacgtggtgaaccaggccaacctgcagctcttctggaacatgtacaacagcgcgagaaaactcgggcccttaaccgtgctcggaacggggccaatggccagaactccgaggtcccggaaaagaggggaaggggacaagtggccaccttagaagagagaaggggagacaaaccaaaggagcccgcaaaaacacttcaaaggacgaaaccctaggagacccacaagagacacaacgcacagcaacgcgaagagacacacacaaacatgcacgggggtaatacacaaaacccaaagagaaaacgccagaacacggaacgctacagacgagcacagacgaggggtacaagccgacaatcctacacaaacagacgaagagaaaacacacacagcgctaaacacagcaacaactaacacccgcagcgcgcagatacaagccgcagcaag

SEQ ID NO: 316635 - DNA, 383 bp, Homo sapiens
agaagaaaataataaacattaaaagttcaccttgaccaaagagacaacctccagaagaacaccacatatgagaggacacctatatgcgtatttcctctacacacatcaccccccttctataatcttaagccatgactagcctggtggcgtgttagtttctgcccagttctaccccctcatgtgcttcttctgaatactgaatgtgactgtttgaaagctggtagaattcatccctcttactgtagataacactgcaaatcttggaattttgttttttgctgtttccagatgtatctataaatatctatacattatatgtgtgtgtgtgtgtgtgtgtgtgtgtgtgtgtgtgtgtgtgtgtacctcggccgcgaccacgctaa

SEQ ID NO: 316636 - DNA, 390 bp, Homo sapiens
caggagagttccggagggtagagtttgctgcccgcaagtcttgcttgtgaaactctgaattagggaattagggcacagtctgaattgagggcagtatgcgaccaccgctccgcgtcctcctttacagaaacagtcctacttctccactggcatcctcttgagggaggcacagctggaaacccagcacctccctgcaccagctcagggctgcctggtcagctgctggccgcagccccctaggcccactcactgtcgccggccctgcatgcccccagcccgacagctgtcgccagcctcctgactcaggaggagccctttgtgccttcgaggaacggttcgctggccgctttgcttgcagcctacttttcccaccagaggcacctggccctg

SEQ ID NO: 316637 - DNA, 3320 bp, Homo sapiens
agcgggcttcgcgctctcctgccgctccgctccgggtctcccgcgctcctctccccggctcggccgagcgcgctgccccgacgccgccacccagagccgggccgcgccgggcgccgagatgaaggtgctgggacaccggctggagctgctcacaggcctcctgctccacgacgtgaccatggccgggctgcaggagctgcgattccctgaggagaagccgctgctccggggccaggacgccaccgagctggagagctccgatgccttcctcttggctgcagacacagactggaaggaacatgacatcgagacaccctacggccttctgcatgtagtgatccggggctcccccaaggggaaccgcccagccatcctcacctaccatgatgtgggcctcaaccacaaactatgcttcaacaccttcttcaacttcgaggacatgcaggagatcaccaagcactttgtggtgtgtcacgtggatgcccctggacaacaggtgggggcgtcgcagtttcctcaggggtaccagttcccctccatggagcagctggctgccatgctccccagcgtggtgcagcatttcgggttcaagtatgtgattggcatcggagtgggcgccggagcctatgtgctggccaagtttgcactcatcttccccgacctggtggaggggctggtgctggtgaacatcgaccccaatggcaaaggctggatagactgggctgccaccaagctctccggcctaactagcactttacccgacacggtgctctcccacctcttcagccaggaggagctggtgaacaacacagagttggtgcagagctaccggcagcagattgggaacgtggtgaaccaggccaacctgcagctcttctggaacatgtacaacagccgcagagacctggacattaaccggcctggaacggtgcccaatgccaagacgctccgctgccccgtgatgctggtggttggggataatgcacccgctgaggacggggtggtggagtgcaactccaaactggacccgaccactacgaccttcctgaagatggcagactctggagggctgccccaggtcacacagccagggaagctgactgaagccttcaaatacttcctgcaaggcatgggctacatgccctcagccagcatgacccgcctggcacgctcccgcactgcatccctcaccagtgccagctcggtggatggcagccgcccacaggcctgcacccactcggagagcagcgaggggctgggccaggtcaaccacaccatggaggtgtcctgttgaagcccttgatcccgctgacgacgcccacgtcgaggccccaccgccatccttgcgccggctcatgttccctttagtttatttttgtgagggcaaaggggaggaaatggggttctgtttgaaaaaaatgaggggatcttagatgctgcagcagaacagtctccaggtgttttaaggggctcagtcctcctcatcccatctcactctccgtggtaacttagccaacttgacccctctcatcccactcccggcggcccaggcacagaagggcagggccatagggagggagattcgctacggatccaggtcattcctgggtgagcccttgggcaggcatgtttggagatgagagaggcttcgagagggtgggtgctgggccacaggggtgcggggccagctcaggcactggcgtgggagccctgggagaccccttcccccaccctccaccaagcacacctgtttctgtctcatagcacatgtgacaatcatctggacaacagccacaagggggcgctcggaccaggcagccactttcctggtgctctctgggcccagctggtgctgtagggccacgcaggcaggggcgtcaaggggtttctctgcccaaggaagacagaacatggagaaccgtcagggcaggaaccccacagactgtcccttccagcccacactctgccacctcctggccctgtcccaattctgagccaaggcctccccgaggcagaagttgcctggtcctctgtccccacagtgacctgactgggggtgagggagaaggaggagagagcccatgtgtggtgtgtgtgcccctgagaacttcgtggtgactgcctttgggagcccgcaggtggccagaggcaggggtagctgagttcctggagaccccttttttgcccccaggttccccagagggcaacgccatcagtagcagtgtggtgtttcaggcagagctctggccaggctgtgccagtgtgtcccggacgcatcactaaggaagagagagtttatttagtcaactggcccaaggcagcgaggcttctacagtcccacaccccatagccgcctgggctggggcttactgggggctgaaggttctggacatgaacaagggtcaggtagaagagaaaggcttcccctacaccccagcctcctgctgtcccctgaagcccaggactgcgttgtatgctttccatccactcaccttaccccatagcatcttgcggcccagaaaccagagccatttgtctcagaccctaaatcaataatcacaaaccccaaaacgggagagagcagtgaaaacatgcagggctgtggacgggggaagggttgtggcgggtgttctgaggctgagaggacacctatatgcgtatttcctctacacacatcaccccccttctataatcttaagccatgactagcctggtggcgtgttagtttctgcccagttctaccccctcatgtgcttcttctgaatactgaatgtgactgtttgaaagctggtagaattcatccctcttactgtagataacactgcaaatcttggaattttgttttttgctgtttccagatgtatctataaatatctatacattatatgtgtgtgtgtgtgtgtgtgtgtgtgtacatcgggtcctcccatgtgtggtgttcttctggaggttgtctctttggtcaaggtgaacttttaatgtttattattttcttctccgcacaaagtaaagagcctaattttgtgtattctggtggctgctgtcatgagatgataaaatgtaaaacaaaactctagtcaacgtagaaagagttaactgtgctgaaaaactaataaagaacctaagaagaattccagtgtggtgatgccatgcccatcatgggaggcttttggagaaacagaatgtttgggcaggggctgctggtgctgcttgggttttgggttgagggtgctaggagaggatggtctccacccatctttctatttccagtacacgtcacattattttaccggtgagatgagaatgtcacaaacattaaa

SEQ ID NO: 316638 - DNA, 2973 bp, Homo sapiens
agcggacggagccgaccatctcccactcgagctgcccccgccctctggacccgagtgactcaggcctttgtttgtccttcctggtagaggcgggttccctccctcggcaagatgccggagtgctgggatggggaacatgacatcgagacaccctacggccttctgcatgtagtgatccggggctcccccaaggggaaccgcccagccatcctcacctaccatgatgtgggcctcaaccacaaactatgcttcaacaccttcttcaacttcgaggacatgcaggagatcaccaagcactttgtggtgtgtcacgtggatgcccctggacaacaggtgggggcgtcgcagtttcctcaggggtaccagttcccctccatggagcagctggctgccatgctccccagcgtggtgcagcatttcgggttcaagtatgtgattggcatcggagtgggcgccggagcctatgtgctggccaagtttgcactcatcttccccgacctggtggaggggctggtgctggtgaacatcgaccccaatggcaaaggctggatagactgggctgccaccaagctctccggcctaactagcactttacccgacacggtgctctcccacctcttcagccaggaggagctggtgaacaacacagagttggtgcagagctaccggcagcagattgggaacgtggtgaaccaggccaacctgcagctcttctggaacatgtacaacagccgcagagacctggacattaaccggcctggaacggtgcccaatgccaagacgctccgctgccccgtgatgctggtggttggggataatgcacccgctgaggacggggtggtggagtgcaactccaaactggacccgaccactacgaccttcctgaagatggcagactctggagggctgccccaggtcacacagccagggaagctgactgaagccttcaaatacttcctgcaaggcatgggctacatgccctcagccagcatgacccgcctggcacgctcccgcactgcatccctcaccagtgccagctcggtggatggcagccgcccacaggcctgcacccactcggagagcagcgaggggctgggccaggtcaaccacaccatggaggtgtcctgttgaagcccttgatcccgctgacgacgcccacgtcgaggccccaccgccatccttgcgccggctcatgttccctttagtttatttttgtgagggcaaaggggaggaaatggggttctgtttgaaaaaaatgaggggatcttagatgctgcagcagaacagtctccaggtgttttaaggggctcagtcctcctcatcccatctcactctccgtggtaacttagccaacttgacccctctcatcccactcccggcggcccaggcacagaagggcagggccatagggagggagattcgctacggatccaggtcattcctgggtgagcccttgggcaggcatgtttggagatgagagaggcttcgagagggtgggtgctgggccacaggggtgcggggccagctcaggcactggcgtgggagccctgggagaccccttcccccaccctccaccaagcacacctgtttctgtctcatagcacatgtgacaatcatctggacaacagccacaagggggcgctcggaccaggcagccactttcctggtgctctctgggcccagctggtgctgtagggccacgcaggcaggggcgtcaaggggtttctctgcccaaggaagacagaacatggagaaccgtcagggcaggaaccccacagactgtcccttccagcccacactctgccacctcctggccctgtcccaattctgagccaaggcctccccgaggcagaagttgcctggtcctctgtccccacagtgacctgactgggggtgagggagaaggaggagagagcccatgtgtggtgtgtgtgcccctgagaacttcgtggtgactgcctttgggagcccgcaggtggccagaggcaggggtagctgagttcctggagaccccttttttgcccccaggttccccagagggcaacgccatcagtagcagtgtggtgtttcaggcagagctctggccaggctgtgccagtgtgtcccggacgcatcactaaggaagagagagtttatttagtcaactggcccaaggcagcgaggcttctacagtcccacaccccatagccgcctgggctggggcttactgggggctgaaggttctggacatgaacaagggtcaggtagaagagaaaggcttcccctacaccccagcctcctgctgtcccctgaagcccaggactgcgttgtatgctttccatccactcaccttaccccatagcatcttgcggcccagaaaccagagccatttgtctcagaccctaaatcaataatcacaaaccccaaaacgggagagagcagtgaaaacatgcagggctgtggacgggggaagggttgtggcgggtgttctgaggctgagaggacacctatatgcgtatttcctctacacacatcaccccccttctataatcttaagccatgactagcctggtggcgtgttagtttctgcccagttctaccccctcatgtgcttcttctgaatactgaatgtgactgtttgaaagctggtagaattcatccctcttactgtagataacactgcaaatcttggaattttgttttttgctgtttccagatgtatctataaatatctatacattatatgtgtgtgtgtgtgtgtgtgtgtgtgtacatcgggtcctcccatgtgtggtgttcttctggaggttgtctctttggtcaaggtgaacttttaatgtttattattttcttctccgcacaaagtaaagagcctaattttgtgtattctggtggctgctgtcatgagatgataaaatgtaaaacaaaactctagtcaacgtagaaagagttaactgtgctgaaaaactaataaagaacctaagaagaattcca

SEQ ID NO: 316639 - DNA, 3160 bp, Homo sapiens
tcctggctgcccgcacctgcacccgcgcgtcggcggcgccgaagccccgctccccgcctgcgcgtctgtctcgtccgcatctccgcggcctcctgctccacgacgtgaccatggccgggctgcaggagctgcgattccctgaggagaagccgctgctccggggccaggacgccaccgagctggagagctccgatgccttcctcttggctgcagacacagactggaaggcctaacaggtaccaggctgcgtcacctcattccccagaggagccaagagcggaggctgcccagagtgtccagcacggtctctccccttcaggaacatgacatcgagacaccctacggccttctgcatgtagtgatccggggctcccccaaggggaaccgcccagccatcctcacctaccatgatgtgggcctcaaccacaaactatgcttcaacaccttcttcaacttcgaggacatgcaggagatcaccaagcactttgtggtgtgtcacgtggatgcccctggacaacaggtgggggcgtcgcagtttcctcaggggtaccagttcccctccatggagcagctggctgccatgctccccagcgtggtgcagcatttcgggttcaagtatgtgattggcatcggagtgggcgccggagcctatgtgctggccaagtttgcactcatcttccccgacctggtggaggggctggtgctggtgaacatcgaccccaatggcaaaggctggatagactgggctgccaccaagctctccggcctaactagcactttacccgacacggtgctctcccacctcttcagccaggaggagctggtgaacaacacagagttggtgcagagctaccggcagcagattgggaacgtggtgaaccaggccaacctgcagctcttctggaacatgtacaacagccgcagagacctggacattaaccggcctggaacggtgcccaatgccaagacgctccgctgccccgtgatgctggtggttggggataatgcacccgctgaggacggggtggtggagtgcaactccaaactggacccgaccactacgaccttcctgaagatggcagactctggagggctgccccaggtcacacagccagggaagctgactgaagccttcaaatacttcctgcaaggcatgggctacatgccctcagccagcatgacccgcctggcacgctcccgcactgcatccctcaccagtgccagctcggtggatggcagccgcccacaggcctgcacccactcggagagcagcgaggggctgggccaggtcaaccacaccatggaggtgtcctgttgaagcccttgatcccgctgacgacgcccacgtcgaggccccaccgccatccttgcgccggctcatgttccctttagtttatttttgtgagggcaaaggggaggaaatggggttctgtttgaaaaaaatgaggggatcttagatgctgcagcagaacagtctccaggtgttttaaggggctcagtcctcctcatcccatctcactctccgtggtaacttagccaacttgacccctctcatcccactcccggcggcccaggcacagaagggcagggccatagggagggagattcgctacggatccaggtcattcctgggtgagcccttgggcaggcatgtttggagatgagagaggcttcgagagggtgggtgctgggccacaggggtgcggggccagctcaggcactggcgtgggagccctgggagaccccttcccccaccctccaccaagcacacctgtttctgtctcatagcacatgtgacaatcatctggacaacagccacaagggggcgctcggaccaggcagccactttcctggtgctctctgggcccagctggtgctgtagggccacgcaggcaggggcgtcaaggggtttctctgcccaaggaagacagaacatggagaaccgtcagggcaggaaccccacagactgtcccttccagcccacactctgccacctcctggccctgtcccaattctgagccaaggcctccccgaggcagaagttgcctggtcctctgtccccacagtgacctgactgggggtgagggagaaggaggagagagcccatgtgtggtgtgtgtgcccctgagaacttcgtggtgactgcctttgggagcccgcaggtggccagaggcaggggtagctgagttcctggagaccccttttttgcccccaggttccccagagggcaacgccatcagtagcagtgtggtgtttcaggcagagctctggccaggctgtgccagtgtgtcccggacgcatcactaaggaagagagagtttatttagtcaactggcccaaggcagcgaggcttctacagtcccacaccccatagccgcctgggctggggcttactgggggctgaaggttctggacatgaacaagggtcaggtagaagagaaaggcttcccctacaccccagcctcctgctgtcccctgaagcccaggactgcgttgtatgctttccatccactcaccttaccccatagcatcttgcggcccagaaaccagagccatttgtctcagaccctaaatcaataatcacaaaccccaaaacgggagagagcagtgaaaacatgcagggctgtggacgggggaagggttgtggcgggtgttctgaggctgagaggacacctatatgcgtatttcctctacacacatcaccccccttctataatcttaagccatgactagcctggtggcgtgttagtttctgcccagttctaccccctcatgtgcttcttctgaatactgaatgtgactgtttgaaagctggtagaattcatccctcttactgtagataacactgcaaatcttggaattttgttttttgctgtttccagatgtatctataaatatctatacattatatgtgtgtgtgtgtgtgtgtgtgtgtgtacatcgggtcctcccatgtgtggtgttcttctggaggttgtctctttggtcaaggtgaacttttaatgtttattattttcttctccgcacaaagtaaagagcctaattttgtgtattctggtggctgctgtcatgagatgataaaatgtaaaacaaaactctagtcaacgtagaaagagttaactgtgctgaaaaactaataaagaacctaagaagaattcca

SEQ ID NO: 316640 - DNA, 3070 bp, Homo sapiens
aaggctaggtacgaggcctgggtggtaccactcgagctgcccccgccctctggacccgagtgactcaggcctttgtttgtccttcctggtagaggcgggttccctccctcggcaagatgccggagtgctgggatggggcctaacaggtaccaggctgcgtcacctcattccccagaggagccaagagcggaggctgcccagagtgtccagcacggtctctccccttcaggaacatgacatcgagacaccctacggccttctgcatgtagtgatccggggctcccccaaggggaaccgcccagccatcctcacctaccatgatgtgggcctcaaccacaaactatgcttcaacaccttcttcaacttcgaggacatgcaggagatcaccaagcactttgtggtgtgtcacgtggatgcccctggacaacaggtgggggcgtcgcagtttcctcaggggtaccagttcccctccatggagcagctggctgccatgctccccagcgtggtgcagcatttcgggttcaagtatgtgattggcatcggagtgggcgccggagcctatgtgctggccaagtttgcactcatcttccccgacctggtggaggggctggtgctggtgaacatcgaccccaatggcaaaggctggatagactgggctgccaccaagctctccggcctaactagcactttacccgacacggtgctctcccacctcttcagccaggaggagctggtgaacaacacagagttggtgcagagctaccggcagcagattgggaacgtggtgaaccaggccaacctgcagctcttctggaacatgtacaacagccgcagagacctggacattaaccggcctggaacggtgcccaatgccaagacgctccgctgccccgtgatgctggtggttggggataatgcacccgctgaggacggggtggtggagtgcaactccaaactggacccgaccactacgaccttcctgaagatggcagactctggagggctgccccaggtcacacagccagggaagctgactgaagccttcaaatacttcctgcaaggcatgggctacatgccctcagccagcatgacccgcctggcacgctcccgcactgcatccctcaccagtgccagctcggtggatggcagccgcccacaggcctgcacccactcggagagcagcgaggggctgggccaggtcaaccacaccatggaggtgtcctgttgaagcccttgatcccgctgacgacgcccacgtcgaggccccaccgccatccttgcgccggctcatgttccctttagtttatttttgtgagggcaaaggggaggaaatggggttctgtttgaaaaaaatgaggggatcttagatgctgcagcagaacagtctccaggtgttttaaggggctcagtcctcctcatcccatctcactctccgtggtaacttagccaacttgacccctctcatcccactcccggcggcccaggcacagaagggcagggccatagggagggagattcgctacggatccaggtcattcctgggtgagcccttgggcaggcatgtttggagatgagagaggcttcgagagggtgggtgctgggccacaggggtgcggggccagctcaggcactggcgtgggagccctgggagaccccttcccccaccctccaccaagcacacctgtttctgtctcatagcacatgtgacaatcatctggacaacagccacaagggggcgctcggaccaggcagccactttcctggtgctctctgggcccagctggtgctgtagggccacgcaggcaggggcgtcaaggggtttctctgcccaaggaagacagaacatggagaaccgtcagggcaggaaccccacagactgtcccttccagcccacactctgccacctcctggccctgtcccaattctgagccaaggcctccccgaggcagaagttgcctggtcctctgtccccacagtgacctgactgggggtgagggagaaggaggagagagcccatgtgtggtgtgtgtgcccctgagaacttcgtggtgactgcctttgggagcccgcaggtggccagaggcaggggtagctgagttcctggagaccccttttttgcccccaggttccccagagggcaacgccatcagtagcagtgtggtgtttcaggcagagctctggccaggctgtgccagtgtgtcccggacgcatcactaaggaagagagagtttatttagtcaactggcccaaggcagcgaggcttctacagtcccacaccccatagccgcctgggctggggcttactgggggctgaaggttctggacatgaacaagggtcaggtagaagagaaaggcttcccctacaccccagcctcctgctgtcccctgaagcccaggactgcgttgtatgctttccatccactcaccttaccccatagcatcttgcggcccagaaaccagagccatttgtctcagaccctaaatcaataatcacaaaccccaaaacgggagagagcagtgaaaacatgcagggctgtggacgggggaagggttgtggcgggtgttctgaggctgagaggacacctatatgcgtatttcctctacacacatcaccccccttctataatcttaagccatgactagcctggtggcgtgttagtttctgcccagttctaccccctcatgtgcttcttctgaatactgaatgtgactgtttgaaagctggtagaattcatccctcttactgtagataacactgcaaatcttggaattttgttttttgctgtttccagatgtatctataaatatctatacattatatgtgtgtgtgtgtgtgtgtgtgtgtgtacatcgggtcctcccatgtgtggtgttcttctggaggttgtctctttggtcaaggtgaacttttaatgtttattattttcttctccgcacaaagtaaagagcctaattttgtgtattctggtggctgctgtcatgagatgataaaatgtaaaacaaaactctagtcaacgtagaaagagttaactgtgctgaaaaactaataaagaacctaagaagaattcca

SEQ ID NO: 316641 - DNA, 3122 bp, Homo sapiens
tcctggctgcccgcacctgcacccgcgcgtcggcggcgccgaagccccgctccccgcctgcgcgtctgtctcgtccgcatctccgcggcctcctgctccacgacgtgaccatggccgggctgcaggagctgcgattccctgaggagaagccgctgctccggggccaggacgccaccgagctggagagctccgatgccttcctcttggctgcagacacagactggaagaggagccaagagcggaggctgcccagagtgtccagcacggtctctccccttcaggaacatgacatcgagacaccctacggccttctgcatgtagtgatccggggctcccccaaggggaaccgcccagccatcctcacctaccatgatgtgggcctcaaccacaaactatgcttcaacaccttcttcaacttcgaggacatgcaggagatcaccaagcactttgtggtgtgtcacgtggatgcccctggacaacaggtgggggcgtcgcagtttcctcaggggtaccagttcccctccatggagcagctggctgccatgctccccagcgtggtgcagcatttcgggttcaagtatgtgattggcatcggagtgggcgccggagcctatgtgctggccaagtttgcactcatcttccccgacctggtggaggggctggtgctggtgaacatcgaccccaatggcaaaggctggatagactgggctgccaccaagctctccggcctaactagcactttacccgacacggtgctctcccacctcttcagccaggaggagctggtgaacaacacagagttggtgcagagctaccggcagcagattgggaacgtggtgaaccaggccaacctgcagctcttctggaacatgtacaacagccgcagagacctggacattaaccggcctggaacggtgcccaatgccaagacgctccgctgccccgtgatgctggtggttggggataatgcacccgctgaggacggggtggtggagtgcaactccaaactggacccgaccactacgaccttcctgaagatggcagactctggagggctgccccaggtcacacagccagggaagctgactgaagccttcaaatacttcctgcaaggcatgggctacatgccctcagccagcatgacccgcctggcacgctcccgcactgcatccctcaccagtgccagctcggtggatggcagccgcccacaggcctgcacccactcggagagcagcgaggggctgggccaggtcaaccacaccatggaggtgtcctgttgaagcccttgatcccgctgacgacgcccacgtcgaggccccaccgccatccttgcgccggctcatgttccctttagtttatttttgtgagggcaaaggggaggaaatggggttctgtttgaaaaaaatgaggggatcttagatgctgcagcagaacagtctccaggtgttttaaggggctcagtcctcctcatcccatctcactctccgtggtaacttagccaacttgacccctctcatcccactcccggcggcccaggcacagaagggcagggccatagggagggagattcgctacggatccaggtcattcctgggtgagcccttgggcaggcatgtttggagatgagagaggcttcgagagggtgggtgctgggccacaggggtgcggggccagctcaggcactggcgtgggagccctgggagaccccttcccccaccctccaccaagcacacctgtttctgtctcatagcacatgtgacaatcatctggacaacagccacaagggggcgctcggaccaggcagccactttcctggtgctctctgggcccagctggtgctgtagggccacgcaggcaggggcgtcaaggggtttctctgcccaaggaagacagaacatggagaaccgtcagggcaggaaccccacagactgtcccttccagcccacactctgccacctcctggccctgtcccaattctgagccaaggcctccccgaggcagaagttgcctggtcctctgtccccacagtgacctgactgggggtgagggagaaggaggagagagcccatgtgtggtgtgtgtgcccctgagaacttcgtggtgactgcctttgggagcccgcaggtggccagaggcaggggtagctgagttcctggagaccccttttttgcccccaggttccccagagggcaacgccatcagtagcagtgtggtgtttcaggcagagctctggccaggctgtgccagtgtgtcccggacgcatcactaaggaagagagagtttatttagtcaactggcccaaggcagcgaggcttctacagtcccacaccccatagccgcctgggctggggcttactgggggctgaaggttctggacatgaacaagggtcaggtagaagagaaaggcttcccctacaccccagcctcctgctgtcccctgaagcccaggactgcgttgtatgctttccatccactcaccttaccccatagcatcttgcggcccagaaaccagagccatttgtctcagaccctaaatcaataatcacaaaccccaaaacgggagagagcagtgaaaacatgcagggctgtggacgggggaagggttgtggcgggtgttctgaggctgagaggacacctatatgcgtatttcctctacacacatcaccccccttctataatcttaagccatgactagcctggtggcgtgttagtttctgcccagttctaccccctcatgtgcttcttctgaatactgaatgtgactgtttgaaagctggtagaattcatccctcttactgtagataacactgcaaatcttggaattttgttttttgctgtttccagatgtatctataaatatctatacattatatgtgtgtgtgtgtgtgtgtgtgtgtgtacatcgggtcctcccatgtgtggtgttcttctggaggttgtctctttggtcaaggtgaacttttaatgtttattattttcttctccgcacaaagtaaagagcctaattttgtgtattctggtggctgctgtcatgagatgataaaatgtaaaacaaaactctagtcaacgtagaaagagttaactgtgctgaaaaactaataaagaacctaagaagaattcca

SEQ ID NO: 316642 - DNA, 3068 bp, Homo sapiens
aaggctaggtacgaggcctgggtggtaccactcgagctgcccccgccctctggacccgagtgactcaggcctttgtttgtccttcctggtagaggcgggttccctccctcggcaagatgccggagtgctgggatggggtgggggaaggcaacgctggagccgtgaagctggcagggctaggggaccccaggtggagcccagggcacctcctctcgccggggcatcaggaacatgacatcgagacaccctacggccttctgcatgtagtgatccggggctcccccaaggggaaccgcccagccatcctcacctaccatgatgtgggcctcaaccacaaactatgcttcaacaccttcttcaacttcgaggacatgcaggagatcaccaagcactttgtggtgtgtcacgtggatgcccctggacaacaggtgggggcgtcgcagtttcctcaggggtaccagttcccctccatggagcagctggctgccatgctccccagcgtggtgcagcatttcgggttcaagtatgtgattggcatcggagtgggcgccggagcctatgtgctggccaagtttgcactcatcttccccgacctggtggaggggctggtgctggtgaacatcgaccccaatggcaaaggctggatagactgggctgccaccaagctctccggcctaactagcactttacccgacacggtgctctcccacctcttcagccaggaggagctggtgaacaacacagagttggtgcagagctaccggcagcagattgggaacgtggtgaaccaggccaacctgcagctcttctggaacatgtacaacagccgcagagacctggacattaaccggcctggaacggtgcccaatgccaagacgctccgctgccccgtgatgctggtggttggggataatgcacccgctgaggacggggtggtggagtgcaactccaaactggacccgaccactacgaccttcctgaagatggcagactctggagggctgccccaggtcacacagccagggaagctgactgaagccttcaaatacttcctgcaaggcatgggctacatgccctcagccagcatgacccgcctggcacgctcccgcactgcatccctcaccagtgccagctcggtggatggcagccgcccacaggcctgcacccactcggagagcagcgaggggctgggccaggtcaaccacaccatggaggtgtcctgttgaagcccttgatcccgctgacgacgcccacgtcgaggccccaccgccatccttgcgccggctcatgttccctttagtttatttttgtgagggcaaaggggaggaaatggggttctgtttgaaaaaaatgaggggatcttagatgctgcagcagaacagtctccaggtgttttaaggggctcagtcctcctcatcccatctcactctccgtggtaacttagccaacttgacccctctcatcccactcccggcggcccaggcacagaagggcagggccatagggagggagattcgctacggatccaggtcattcctgggtgagcccttgggcaggcatgtttggagatgagagaggcttcgagagggtgggtgctgggccacaggggtgcggggccagctcaggcactggcgtgggagccctgggagaccccttcccccaccctccaccaagcacacctgtttctgtctcatagcacatgtgacaatcatctggacaacagccacaagggggcgctcggaccaggcagccactttcctggtgctctctgggcccagctggtgctgtagggccacgcaggcaggggcgtcaaggggtttctctgcccaaggaagacagaacatggagaaccgtcagggcaggaaccccacagactgtcccttccagcccacactctgccacctcctggccctgtcccaattctgagccaaggcctccccgaggcagaagttgcctggtcctctgtccccacagtgacctgactgggggtgagggagaaggaggagagagcccatgtgtggtgtgtgtgcccctgagaacttcgtggtgactgcctttgggagcccgcaggtggccagaggcaggggtagctgagttcctggagaccccttttttgcccccaggttccccagagggcaacgccatcagtagcagtgtggtgtttcaggcagagctctggccaggctgtgccagtgtgtcccggacgcatcactaaggaagagagagtttatttagtcaactggcccaaggcagcgaggcttctacagtcccacaccccatagccgcctgggctggggcttactgggggctgaaggttctggacatgaacaagggtcaggtagaagagaaaggcttcccctacaccccagcctcctgctgtcccctgaagcccaggactgcgttgtatgctttccatccactcaccttaccccatagcatcttgcggcccagaaaccagagccatttgtctcagaccctaaatcaataatcacaaaccccaaaacgggagagagcagtgaaaacatgcagggctgtggacgggggaagggttgtggcgggtgttctgaggctgagaggacacctatatgcgtatttcctctacacacatcaccccccttctataatcttaagccatgactagcctggtggcgtgttagtttctgcccagttctaccccctcatgtgcttcttctgaatactgaatgtgactgtttgaaagctggtagaattcatccctcttactgtagataacactgcaaatcttggaattttgttttttgctgtttccagatgtatctataaatatctatacattatatgtgtgtgtgtgtgtgtgtgtgtgtgtacatcgggtcctcccatgtgtggtgttcttctggaggttgtctctttggtcaaggtgaacttttaatgtttattattttcttctccgcacaaagtaaagagcctaattttgtgtattctggtggctgctgtcatgagatgataaaatgtaaaacaaaactctagtcaacgtagaaagagttaactgtgctgaaaaactaataaagaacctaagaagaattcca

SEQ ID NO: 316643 - DNA, 3012 bp, Homo sapiens
agcggacggagccgaccatctcccactcgagctgcccccgccctctggacccgagtgactcaggcctttgtttgtccttcctggtagaggcgggttccctccctcggcaagatgccggagtgctgggatggggaacatgacatcgagacaccctacggccttctgcatgtagtgatccggggctcccccaaggggaaccgcccagccatcctcacctaccatgatgtgggcctcaaccacaaactatgcttcaacaccttcttcaacttcgaggacatgcaggagatcaccaagcactttgtggtgtgtcacgtggatgcccctggacaacaggtgggggcgtcgcagtttcctcaggggtaccagttcccctccatggagcagctggctgccatgctccccagcgtggtgcagcatttcgggttcaagtatgtgattggcatcggagtgggcgccggagcctatgtgctggccaagtttgcactcatcttccccgacctggtggaggggctggtgctggtgaacatcgaccccaatggcaaaggctggatagactgggctgccaccaagctctccggcctaactagcactttacccgacacggtgctctcccacctcttcagccaggaggagctggtgaacaacacagagttggtgcagagctaccggcagcagattgggaacgtggtgaaccaggccaacctgcagctcttctggaacatgtacaacagccgcagagacctggacattaaccggcctggaacggtgcccaatgccaagacgctccgctgccccgtgatgctggtggttggggataatgcacccgctgaggacggggtggtggagtgcaactccaaactggacccgaccactacgaccttcctgaagatggcagactctggagggctgccccaggtcacacagccagggaagctgactgaagccttcaaatacttcctgcaaggcatgggctacattgcgtacttgaaggaccgaaggctgagtggaggagcagtgccctcagccagcatgacccgcctggcacgctcccgcactgcatccctcaccagtgccagctcggtggatggcagccgcccacaggcctgcacccactcggagagcagcgaggggctgggccaggtcaaccacaccatggaggtgtcctgttgaagcccttgatcccgctgacgacgcccacgtcgaggccccaccgccatccttgcgccggctcatgttccctttagtttatttttgtgagggcaaaggggaggaaatggggttctgtttgaaaaaaatgaggggatcttagatgctgcagcagaacagtctccaggtgttttaaggggctcagtcctcctcatcccatctcactctccgtggtaacttagccaacttgacccctctcatcccactcccggcggcccaggcacagaagggcagggccatagggagggagattcgctacggatccaggtcattcctgggtgagcccttgggcaggcatgtttggagatgagagaggcttcgagagggtgggtgctgggccacaggggtgcggggccagctcaggcactggcgtgggagccctgggagaccccttcccccaccctccaccaagcacacctgtttctgtctcatagcacatgtgacaatcatctggacaacagccacaagggggcgctcggaccaggcagccactttcctggtgctctctgggcccagctggtgctgtagggccacgcaggcaggggcgtcaaggggtttctctgcccaaggaagacagaacatggagaaccgtcagggcaggaaccccacagactgtcccttccagcccacactctgccacctcctggccctgtcccaattctgagccaaggcctccccgaggcagaagttgcctggtcctctgtccccacagtgacctgactgggggtgagggagaaggaggagagagcccatgtgtggtgtgtgtgcccctgagaacttcgtggtgactgcctttgggagcccgcaggtggccagaggcaggggtagctgagttcctggagaccccttttttgcccccaggttccccagagggcaacgccatcagtagcagtgtggtgtttcaggcagagctctggccaggctgtgccagtgtgtcccggacgcatcactaaggaagagagagtttatttagtcaactggcccaaggcagcgaggcttctacagtcccacaccccatagccgcctgggctggggcttactgggggctgaaggttctggacatgaacaagggtcaggtagaagagaaaggcttcccctacaccccagcctcctgctgtcccctgaagcccaggactgcgttgtatgctttccatccactcaccttaccccatagcatcttgcggcccagaaaccagagccatttgtctcagaccctaaatcaataatcacaaaccccaaaacgggagagagcagtgaaaacatgcagggctgtggacgggggaagggttgtggcgggtgttctgaggctgagaggacacctatatgcgtatttcctctacacacatcaccccccttctataatcttaagccatgactagcctggtggcgtgttagtttctgcccagttctaccccctcatgtgcttcttctgaatactgaatgtgactgtttgaaagctggtagaattcatccctcttactgtagataacactgcaaatcttggaattttgttttttgctgtttccagatgtatctataaatatctatacattatatgtgtgtgtgtgtgtgtgtgtgtgtgtacatcgggtcctcccatgtgtggtgttcttctggaggttgtctctttggtcaaggtgaacttttaatgtttattattttcttctccgcacaaagtaaagagcctaattttgtgtattctggtggctgctgtcatgagatgataaaatgtaaaacaaaactctagtcaacgtagaaagagttaactgtgctgaaaaactaataaagaacctaagaagaattcca

SEQ ID NO: 316644 - DNA, 2919 bp, Homo sapiens
agcggacggagccgaccatctcccactcgagctgcccccgccctctggacccgagtgactcaggcctttgtttgtccttcctggtagaggcgggttccctccctcggcaagatgccggagtgctgggatggggaacatgacatcgagacaccctacggccttctgcatgtagtgatccggggctcccccaaggggaaccgcccagccatcctcacctaccatgatgtgggcctcaaccacaaactatgcttcaacaccttcttcaacttcgaggacatgcaggagatcaccaagcactttgtggtgtgtcacgtggatgcccctggacaacaggtgggggcgtcgcagtttcctcaggggtaccagttcccctccatggagcagctggctgccatgctccccagcgtggtgcagcatttcgggttcaagtatgtgattggcatcggagtgggcgccggagcctatgtgctggccaagtttgcactcatcttccccgacctggtggaggggctggtgctggtgaacatcgaccccaatggcaaaggctggatagactgggctgccaccaagctctccggcctaactagcactttacccgacacggtgctctcccacctcttcagccaggaggagctggtgaacaacacagagttggtgcagagctaccggcagcagattgggaacgtggtgaaccaggccaacctgcagctcttctggaacatgtacaacagccgcagagacctggacattaaccggcctggaacggtgcccaatgccaagacgctccgctgccccgtgatgctggtggttggggataatgcacccgctgaggacggggtggtggagtgcaactccaaactggacccgaccactacgaccttcctgaagatggcagactctggagggctgccccaggtcacacagccagggaagctgactgaagccttcaaatacttcctgcaaggcatgggctacatgccctcagccagcatgacccgcctggcacgctcccgcactgcatccctcaccagtgccagctcggtggatggcagccgcccacaggcctgcacccactcggagagcagcgaggggctgggccaggtcaaccacaccatggaggtgtcctgttgaagcccttgatcccgctgacgacgcccacgtcgaggccccaccgccatccttgcgccggctcatgttccctttagtttatttttgtgagggcaaaggggaggaaatggggttctgtttgaaaaaaatgaggggatcttagatgctgcagcagaacagtctccaggtgttttaaggggctcagtcctcctcatcccatctcactctccgtggtaacttagccaacttgacccctctcatcccactcccggcggcccaggcacagaagggcagggccatagggagggagattcgctacggatccaggtcattcctgggtgagcccttgggcaggcatgtttggagatgagagaggcttcgagagggtgggtgctgggccacaggggtgcggggccagctcaggcactggcgtgggagccctgggagaccccttcccccaccctccaccaagcacacctgtttctgtctcatagcacatgtgacaatcatctggacaacagccacaagggggcgctcggaccaggcagccactttcctggtgctctctgggcccagctggtgctgtagggccacgcaggcaggggcgtcaaggggtttctctgcccaaggaagacagaacatggagaaccgtcagggcaggaaccccacagactgtcccttccagcccacactctgccacctcctggccctgtcccaattctgagccaaggcctccccgaggcagaagttgcctggtcctctgtccccacagtgacctgactgggggtgagggagaaggaggagagagcccatgtgtggtgtgtgtgcccctgagaacttcgtggtgactgcctttgggagcccgcaggtggccagaggcaggggtagctgagttcctggagaccccttttttgcccccaggttccccagagggcaacgccatcagtagcagtgtggtgtttcaggcagagctctggccaggctgtgccagtgtgtcccggacgcatcactaaggaagagagagtttatttagtcaactggcccaaggcagcgaggcttctacagtcccacaccccatagccgcctgggctggggcttactgggggctgaaggttctggacatgaacaagggtcaggtagaagagaaaggcttcccctacaccccagcctcctgctgtcccctgaagcccaggactgcgttgtatgctttccatccactcaccttaccccatagcatcttgcggcccagaaaccagagccatttgtctcagaccctaaatcaataatcacaaaccccaaaacgggagagagcagtgagaggacacctatatgcgtatttcctctacacacatcaccccccttctataatcttaagccatgactagcctggtggcgtgttagtttctgcccagttctaccccctcatgtgcttcttctgaatactgaatgtgactgtttgaaagctggtagaattcatccctcttactgtagataacactgcaaatcttggaattttgttttttgctgtttccagatgtatctataaatatctatacattatatgtgtgtgtgtgtgtgtgtgtgtgtgtacatcgggtcctcccatgtgtggtgttcttctggaggttgtctctttggtcaaggtgaacttttaatgtttattattttcttctccgcacaaagtaaagagcctaattttgtgtattctggtggctgctgtcatgagatgataaaatgtaaaacaaaactctagtcaacgtagaaagagttaactgtgctgaaaaactaataaagaacctaagaagaattcca

SEQ ID NO: 316645 - DNA, 2793 bp, Homo sapiens
agcggacggagccgaccatctcccactcgagctgcccccgccctctggacccgagtgactcaggcctttgtttgtccttcctggtagaggcgggttccctccctcggcaagatgccggagtgctgggatggggaacatgacatcgagacaccctacggccttctgcatgtagtgatccggggctcccccaaggggaaccgcccagccatcctcacctaccatgatgtgggcctcaaccacaaactatgcttcaacaccttcttcaacttcgaggacatgcaggagatcaccaagcactttgtggtgtgtcacgtggatgcccctggacaacaggtgggggcgtcgcagtttcctcaggggtaccagttcccctccatggagcagctggctgccatgctccccagcgtggtgcagcatttcgggttcaagtatgtgattggcatcggagtgggcgccggagcctatgtgctggccaagtttgcactcatcttccccgacctggtggaggggctggtgctggtgaacatcgaccccaatggcaaaggctggatagactgggctgccaccaagctctccggcctaactagcactttacccgacacggtgctctcccacctcttcagccaggaggagctggtgaacaacacagagttggtgcagagctaccggcagcagattgggaacgtggtgaaccaggccaacctgcagctcttctggaacatgtacaacagccgcagagacctggacattaaccggcctggaacggtgcccaatgccaagacgctccgctgccccgtgatgctggtggttggggataatgcacccgctgaggacggggtggtggagtgcaactccaaactggacccgaccactacgaccttcctgaagatggcagactctggagggctgccccaggtcacacagccagggaagctgactgaagccttcaaatacttcctgcaaggcatgggctacatgccctcagccagcatgacccgcctggcacgctcccgcactgcatccctcaccagtgccagctcggtggatggcagccgcccacaggcctgcacccactcggagagcagcgaggggctgggccaggtcaaccacaccatggaggtgtcctgttgaagcccttgatcccgctgacgacgcccacgtcgaggccccaccgccatccttgcgccggctcatgttccctttagtttatttttgtgagggcaaaggggaggaaatggggttctgtttgaaaaaaatgaggggatcttagatgctgcagcagaacagtctccaggtgttttaaggggctcagtcctcctcatcccatctcactctccgtggtaacttagccaacttgacccctctcatcccactcccggcggcccaggcacagaagggcagggccatagggagggagattcgctacggatccaggtcattcctgggtgagcccttgggcaggcatgtttggagatgagagaggcttcgagagggtgggtgctgggccacaggggtgcggggccagctcaggcactggcgtgggagccctgggagaccccttcccccaccctccaccaagcacacctgtttctgtctcatagcacatgtgacaatcatctggacaacagccacaagggggcgctcggaccaggcagccactttcctggtgctctctgggcccagctggtgctgtagggccacgcaggcaggggcgtcaaggggtttctctgcccaaggaagacagaacatggagaaccgtcagggcaggaaccccacagactgtcccttccagcccacactctgccacctcctggccctgtcccaattctgagccaaggcctccccgaggcagaagttgcctggtcctctgtccccacagtgacctgactgggggtgagggagaaggaggagagagcccatgtgtggtgtgtgtgcccctgagaacttcgtggtgactgcctttgggagcccgcaggtggccagaggcaggggtagctgagttcctggagaccccttttttgcccccaggttccccagagggcaacgccatcagtagcagtgtggtgtttcaggcagagctctggccaggctgtgccagtgtgtcccggacgcatcactaaggaagagagagtttatttagtcaactggcccaaggcagcgaggcttctacagtcccacaccccatagccgcctgggctggggcttactgggggctgaaggttctggacatgaacaagggtcaggtagaagagaaaggcttcccctacaccccagcctcctgctgtcccctgaagcccaggactgcgttgtatgctttccatccactcaccttaccccatagcatcttgcggcccagaaaccagagccatttgtctcagaccctaaatcaataatcacaaaccccaaaacgggagagagcagtgaaaacatgcagggctgtggacgggggaagggttgtggcgggtgttctgaggctgagaggacacctatatgcgtatttcctctacacacatcaccccccttctataatcttaagccatgactagcctggtggcgtgttagtttctgcccagttctaccccctcatgtgcttcttctgaatactgaatgtgactgtttgaaagctggtagaattcatccctcttactgtagataacactgcaaatcttggaattttgttttttgctgtttccagatgtatctataaatatctatacattaaaaaatattatctgaaaataagtaaaatctcgagtttttttttttgcctttttgcattataccgtttattgc

SEQ ID NO: 316646 - DNA, 2967 bp, Homo sapiens
  misc_feature (2755)..(2755): n is a, c, g, or t
agcggacggagccgaccatctcccactcgagctgcccccgccctctggacccgagtgactcaggcctttgtttgtccttcctggtagaggcgggttccctccctcggcaagatgccggagtgctgggatggggaacatgacatcgagacaccctacggccttctgcatgtagtgatccggggctcccccaaggggaaccgcccagccatcctcacctaccatgatgtgggcctcaaccacaaactatgcttcaacaccttcttcaacttcgaggacatgcaggagatcaccaagcactttgtggtgtgtcacgtggatgcccctggacaacaggtgggggcgtcgcagtttcctcaggggtaccagttcccctccatggagcagctggctgccatgctccccagcgtggtgcagcatttcgggttcaagtatgtgattggcatcggagtgggcgccggagcctatgtgctggccaagtttgcactcatcttccccgacctggtggaggggctggtgctggtgaacatcgaccccaatggcaaaggctggatagactgggctgccaccaagctctccggcctaactagcactttacccgacacggtgctctcccacctcttcagccaggaggagctggtgaacaacacagagttggtgcagagctaccggcagcagattgggaacgtggtgaaccaggccaacctgcagctcttctggaacatgtacaacagccgcagagacctggacattaaccggcctggaacggtgcccaatgccaagacgctccgctgccccgtgatgctggtggttggggataatgcacccgctgaggacggggtggtggagtgcaactccaaactggacccgaccactacgaccttcctgaagatggcagactctggagggctgccccaggtcacacagccagggaagctgactgaagccttcaaatacttcctgcaaggcatgggctacatgccctcagccagcatgacccgcctggcacgctcccgcactgcatccctcaccagtgccagctcggtggatggcagccgcccacaggcctgcacccactcggagagcagcgaggggctgggccaggtcaaccacaccatggaggtgtcctgttgaagcccttgatcccgctgacgacgcccacgtcgaggccccaccgccatccttgcgccggctcatgttccctttagtttatttttgtgagggcaaaggggaggaaatggggttctgtttgaaaaaaatgaggggatcttagatgctgcagcagaacagtctccaggtgttttaaggggctcagtcctcctcatcccatctcactctccgtggtaacttagccaacttgacccctctcatcccactcccggcggcccaggcacagaagggcagggccatagggagggagattcgctacggatccaggtcattcctgggtgagcccttgggcaggcatgtttggagatgagagaggcttcgagagggtgggtgctgggccacaggggtgcggggccagctcaggcactggcgtgggagccctgggagaccccttcccccaccctccaccaagcacacctgtttctgtctcatagcacatgtgacaatcatctggacaacagccacaagggggcgctcggaccaggcagccactttcctggtgctctctgggcccagctggtgctgtagggccacgcaggcaggggcgtcaaggggtttctctgcccaaggaagacagaacatggagaaccgtcagggcaggaaccccacagactgtcccttccagcccacactctgccacctcctggccctgtcccaattctgagccaaggcctccccgaggcagaagttgcctggtcctctgtccccacagtgacctgactgggggtgagggagaaggaggagagagcccatgtgtggtgtgtgtgcccctgagaacttcgtggtgactgcctttgggagcccgcaggtggccagaggcaggggtagctgagttcctggagaccccttttttgcccccaggttccccagagggcaacgccatcagtagcagtgtggtgtttcaggcagagctctggccaggctgtgccagtgtgtcccggacgcatcactaaggaagagagagtttatttagtcaactggcccaaggcagcgaggcttctacagtcccacaccccatagccgcctgggctggggcttactgggggctgaaggttctggacatgaacaagggtcaggtagaagagaaaggcttcccctacaccccagcctcctgctgtcccctgaagcccaggactgcgttgtatgctttccatccactcaccttaccccatagcatcttgcggcccagaaaccagagccatttgtctcagaccctaaatcaataatcacaaaccccaaaacgggagagagcagtgaaaacatgcagggctgtggacgggggaagggttgtggcgggtgttctgaggctgagaggacacctatatgcgtatttcctctacacacatcaccccccttctataatcttaagccatgactagcctggtggcgtgttagtttctgcccagttctaccccctcatgtgcttcttctgaatactgaatgtgactgtttgaaagctggtagaattcatccctcttactgtagataacactgcaaatcttggaattttgttttttgctgtttccagatgtatctataaatatctatacattatatgtgtgtgtgtgtgtgtgtgtgtgtgtgtttntacttatataccatacattgctccatttttactatcgttctaaaatttccttttattcaaatttacctttaatattattactttctgtctccgaccaattaatatccctacttttgtcttcccatactactttcttaaaatattacatttaatcacatctttatcacccttaaataattcccttctttaaacttatcaactccctttaataa

SEQ ID NO: 316647 - DNA, 2767 bp, Homo sapiens
agcggacggagccgaccatctcccactcgagctgcccccgccctctggacccgagtgactcaggcctttgtttgtccttcctggtagaggcgggttccctccctcggcaagatgccggagtgctgggatggggaacatgacatcgagacaccctacggccttctgcatgtagtgatccggggctcccccaaggggaaccgcccagccatcctcacctaccatgatgtgggcctcaaccacaaactatgcttcaacaccttcttcaacttcgaggacatgcaggagatcaccaagcactttgtggtgtgtcacgtggatgcccctggacaacaggtgggggcgtcgcagtttcctcaggggtaccagttcccctccatggagcagctggctgccatgctccccagcgtggtgcagcatttcgggttcaagtatgtgattggcatcggagtgggcgccggagcctatgtgctggccaagtttgcactcatcttccccgacctggtggaggggctggtgctggtgaacatcgaccccaatggcaaaggctggatagactgggctgccaccaagctctccggcctaactagcactttacccgacacggtgctctcccacctcttcagccaggaggagctggtgaacaacacagagttggtgcagagctaccggcagcagattgggaacgtggtgaaccaggccaacctgcagctcttctggaacatgtacaacagccgcagagacctggacattaaccggcctggaacggtgcccaatgccaagacgctccgctgccccgtgatgctggtggttggggataatgcacccgctgaggacggggtggtggagtgcaactccaaactggacccgaccactacgaccttcctgaagatggcagactctggagggctgccccaggtcacacagccagggaagctgactgaagccttcaaatacttcctgcaaggcatgggctacatgccctcagccagcatgacccgcctggcacgctcccgcactgcatccctcaccagtgccagctcggtggatggcagccgcccacaggcctgcacccactcggagagcagcgaggggctgggccaggtcaaccacaccatggaggtgtcctgttgaagcccttgatcccgctgacgacgcccacgtcgaggccccaccgccatccttgcgccggctcatgttccctttagtttatttttgtgagggcaaaggggaggaaatggggttctgtttgaaaaaaatgaggggatcttagatgctgcagcagaacagtctccaggtgttttaaggggctcagtcctcctcatcccatctcactctccgtggtaacttagccaacttgacccctctcatcccactcccggcggcccaggcacagaagggcagggccatagggagggagattcgctacggatccaggtcattcctgggtgagcccttgggcaggcatgtttggagatgagagaggcttcgagagggtgggtgctgggccacaggggtgcggggccagctcaggcactggcgtgggagccctgggagaccccttcccccaccctccaccaagcacacctgtttctgtctcatagcacatgtgacaatcatctggacaacagccacaagggggcgctcggaccaggcagccactttcctggtgctctctgggcccagctggtgctgtagggccacgcaggcaggggcgtcaaggggtttctctgcccaaggaagacagaacatggagaaccgtcagggcaggaaccccacagactgtcccttccagcccacactctgccacctcctggccctgtcccaattctgagccaaggcctccccgaggcagaagttgcctggtcctctgtccccacagtgacctgactgggggtgagggagaaggaggagagagcccatgtgtggtgtgtgtgcccctgagaacttcgtggtgactgcctttgggagcccgcaggtggccagaggcaggggtagctgagttcctggagaccccttttttgcccccaggttccccagagggcaacgccatcagtagcagtgtggtgtttcaggcagagctctggccaggctgtgccagtgtgtcccggacgcatcactaaggaagagagagtttatttagtcaactggcccaaggcagcgaggcttctacagtcccacaccccatagccgcctgggctggggcttactgggggctgaaggttctggacatgaacaagggtcaggtagaagagaaaggcttcccctacaccccagcctcctgctgtcccctgaagcccaggactgcgttgtatgctttccatccactcaccttaccccatagcatcttgcggcccagaaaccagagccatttgtctcagaccctaaatcaataatcacaaaccccaaaacgggagagagcagtgaaaacatgcagggctgtggacgggggaagggttgtggcgggtgttctgaggctgagaggacacctatatgcgtatttcctctacacacatcaccccccttctataatcttaagccatgactagcctggtggcgtgttagtttctgcccagttctaccccctcatgtgcttcttctgaatactgaatgtgactgtttgaaagctggtagaattcatccctcttactgtagataacactgctcactccttggcgacgtggtttttcctctgccccagaccagtctagcaagacttgactagcatcgatattattgagatctctgtctggtctgtgctgtgcgacac

SEQ ID NO: 316648 - DNA, 318 bp, Homo sapiens
ttgcgaggtgaacggaagaacattgtcaggcgctgagacgcgttctcagggtcctggggagaaactccaccaggcagccccaagctgggaagggcacagagcgggcaggcctcccccattctgtatgcaggagactgaggcctagcagaatggtgaggggataagcaccccacctgtcagggcttccttgggccagagatccttctgggggccactgctgggtgggcaggcaggagtgggcttccagaagcctctggccctgcccccagcctctctgtgcctgtcctttgtcccatctctctggctcatctcaatgcc

SEQ ID NO: 316649 - DNA, 630 bp, Homo sapiens
cctctctgtgcctgtcctttgtcccatctctctggctcatctcaatgcccttgactcagcggaccacgctcttcactgtgttgtgtctcccccatccccgccccctctccggctctgtcttctctcttagttgcgtacttgaaggaccgaaggctgagtggaggagcaggtagccccacggcccttcccctgatgcatggacgcccagcctcctcctcccccgctccttcctctgcgcagtgtgctgcagccaggccgcatcttgctgtggtttggaaccttcttgtgtcctgttcaactcagaaaccccacagattcttgcttttctgcagacttggcctctaggttggctgggttgcagagcagtcttgcttctaggttgtcatgagctgcgtggcttccagagctctggggataggaaacagaccctccttagaggtagagcccaggcctggccctgcctgagccacataggtggccaggagagttccggagggtagagtttgctgcccgcaagtcttgcttgtgaaactctgaattagggaattagggcacagtctgaattgagggcagtatgcgaccaccgctccgcgtcctcctttacagaaacagtcctacttctccactggc

SEQ ID NO: 316650 - DNA, 1204 bp, Homo sapiens
tagctggtacccgccatacagatcaggtgaactggcctatgcggtcgaggagtggcctggtttctggcagggccccgacagacactcgttgacatcggtctcacagcgaggtccagtgtagccacgaccgcactggcacagtgaaggagccctgcgtgttcacgcacctgcccaagtgctcgcaggggttggcgccgatagagcactcgtccacgtcctggtcacatgccccaagcgcagcggccgcgtttgaaggatgacctctaggaagaaagtgttgctgaaggttatcatcctgggagattctggagtcgggaagacatcactcatgaaccagtatgtgaataagaaattcagcaatcagtacaaagccacaataggagctgactttctgaccaaggaggtgatggtggatgacaggctagtcacaatgcagggtaagcacatgtcttggctgtgctgaccaggccttgatagttcatttagtcttaatctttcctcatgcatagacattttccttccctgttcttcaaatcttattatcttatttgtagataattggctgatactcagttaaatttgaatttcagatcaatagtgaatacttttttagtatacttctagtgtatctcagatacgacttgctaagacacactaaaaaattcttcttaaaaaaaaactcagatttatcctttcttgttttttgttgtttttggttttgttgtttgctaaatttggcaacctgcaggtctctgtcttgtgcctctcttgacatccttgcccagtgctttaggtaaacatctttgtctcacctcagtagtgagacataaactttatttttctgacttcctatttcatacgtaacttcaagagttgtgtgtctattgagccaatcttttttttatgtatcagcttattaatctttcaagggttccctttcaacagttaggataagatacagattctttcatatgacttgttgaaaagccttcacattctggctataaactattattccctttttttcccccattgagtcattttgtttgtatacatgtattaacatccctagaaaagaaacccctgaaggatggataccttgagcccaggagtttgagcctgcagtgagctgtgactgctccattatactccagcctgggtgatggagtgagaccctgtctctaaattaaaaaaaaaaaaaaaa

SEQ ID NO: 316651 - DNA, 2237 bp, Homo sapiens
agcggacttccgctcggggcggcggcggtggcggaagtgggagcgggcctggagtcttggccataaagcctgaggcggcggcagcggcggagttggcggcttggagagctcgggagagttccctggaaccagaacttggaccttctcgcttctgtcctccgtttagtctcctcctcggcgggagccctcgcgacgcgcccggcccggagcccccagcgcagcggccgcgtttgaaggatgacctctaggaagaaagtgttgctgaaggttatcatcctgggagattctggagtcgggaagacatcactcatgaaccagtatgtgaataagaaattcagcaatcagtacaaagccacaataggagctgactttctgaccaaggaggtgatggtggatgacaggctagtcacaatgcagatatgggacacagcaggacaggaacggttccagtctctcggtgtggccttctacagaggtgcagactgctgcgttctggtatttgatgtgactgcccccaacacattcaaaaccctagatagctggagagatgagtttctcatccaggccagtccccgagatcctgaaaacttcccatttgttgtgttgggaaacaagattgacctcgaaaacagacaagtggccacaaagcgggcacaggcctggtgctacagcaaaaacaacattccctactttgagaccagtgccaaggaggccatcaacgtggagcaggcgttccagacgattgcacggaatgcacttaagcaggaaacggaggtggagctgtacaacgaatttcctgaacctatcaaactggacaagaatgaccgggccaaggcctcggcagaaagctgcagttgctgagggggcagtgagagttgagcacagagtccttcacaaaccaagaacacacgtaggccttcaacacaattcccctctcctcttccaaacaaaacatacattgatctctcacatccagctgccaaaagaaaaccccatcaaacacagttacaccccacatatctctcacacacacacacacacgcacacacacacacacagatctgacgtaatcaaactccagcccttgcccgtgatggctccttggggtctgcctgcccacccacatgagcccgcgagtatggcagcaggacaagccagcggtggaagtcattctgatatggagttggcattggaagcttattctttttgttcactggagagagagagaactgtttacagttaatctgtgtctaattatctgattttttttattggtcttgtggtctttttaccccccctttcccctccctccttgaaggctaccccttgggaaggctggtgccccatgccccattacaggctcacacccagtctgatcaggctgagttttgtatgtatctatctgttaatgcttgttacttttaactaatcagatctttttacagtatccatttattatgtaatgcttcttagaaaagaatcttatagtacatgttaatatatgcaaccaattaaaatgtataaattagtgtaagaaattcttggattatgtgtttaagtcctgtaatgcaggcctgtaaggtggagggttgaaccctgtttggattgcagagtgttactcagaattgggaaatccagctagcggcagtattctgtacagtagacacaagaattatgtacgccttttatcaaagacttaagagccaaaaagcttttcatctctccagggggaaaactgtctagttcccttctgtgtctaaattttccaaaacgttgatttgcataatacagtggtatgtgcaatggataaattgccgttatttcaaaaattaaaattctcattttctttcttttttttcccccctgctccacacttcaaaactcccgttagatcagcattctactacaagagtgaaaggaaaaccctaacagatctgtcctagtgattttacctttgttctagaaggcgctcctttcagggttgtggtattcttaggttagcggagctttttcctcttttccccacccatctccccaatattgcccattattaattaacctctttctttggttggaaccctggcagttctgctcccttcctaggatctgcccctgcattgtagcttgcttaacggagcacttctcctttttccaaaggtctacattctagggtgtgggctgagttcttctgtaaagagatgaacgcaatgccaataaaattgaacaagaacaatgat

SEQ ID NO: 316652 - DNA, 1538 bp, Homo sapiens
agcggacttccgctcggggcggcggcggtggcggaagtgggagcgggcctggagtcttggccataaagcctgaggcggcggcagcggcggagttggcggcttggagagctcgggagagttccctggaaccagaacttggaccttctcgcttctgtcctccgtttagtctcctcctcggcgggagccctcgcgacgcgcccggcccggagcccccagcgcagcggccgcgtttgaaggatgacctctaggaagaaagtgttgctgaaggttatcatcctgggagattctggagtcgggaagacatcactcatgaaccagtatgtgaataagaaattcagcaatcagtacaaagccacaataggagctgactttctgaccaaggaggtgatggtggatgacaggctagtcacaatgcagatatgggacacagcaggacaggaacggttccagtctctcggtgtggccttctacagaggtgcagactgctgcgttctggtatttgatgtgactgcccccaacacattcaaaaccctagatagctggagagatgagtttctcatccaggccagtccccgagatcctgaaaacttcccatttgttgtgttgggaaacaagattgacctcgaaaacagacaagtggccacaaagcgggcacaggcctggtgctacagcaaaaacaacattccctactttgagaccagtgccaaggaggccatcaacgtggagcaggcgttccagacgattgcacggaatgcacttaagcaggaaacggaggtggagctgtacaacgaatttcctgaacctatcaaactggacaagaatgaccgggccaaggcctcggcagaaagctgcagttgctgagggggcagtgagagttgagcacagagtccttcacaaaccaagaacacacgtaggccttcaacacaattcccctctcctcttccaaacaaaacatacattgatctctcacatccagctgccaaaagaaaaccccatcaaacacagttacaccccacatatctctcacacacacacacacacgcacacacacacacacagatctgacgtaatcaaactccagcccttgcccgtgatggctccttggggtctgcctgcccacccacatgagcccgcgagtatggcagcaggacaagccagcggtggaagtcattctgatatggagttggcattggaagcttattctttttgttcactggagagagagagaactgtttacagttaatctgtgtctaattatctgattttttttattggtcttgtggtctttttaccccccctttcccctccctccttgaaggctaccccttgggaaggctggtgccccatgccccattacaggctcacacccagtctgatcaggctgagttttgtatgtatctatctgttaatgcttgttacttttaactaatcagatctttttacagtatccatttattatgtaatgcttcttagaaaagaatcttatagtacatgttaatatatgcaaccaattaaaatgtataaattagtgtaagaaa

SEQ ID NO: 316653 - DNA, 2278 bp, Homo sapiens
gggcattttaggaggaaaaaaaaaaacaatgcacagaaaaagggtaaaacaaaataggttgatgtggtggagacctttgacctcccaggtgcccccacaagcagctggcccaccctggagcaccaaagttgggggccacagccaccactgcctcttggagtccctttttcatggaaatgaagaccccttggtcgtgggccactagtgtacatgggctggaagtggggatgtccatggcccaagagacccctccagcttccagcccctggcaacagcgggagagcaaacccagcaccagggacttggcgtgagccagccgggaggcccccaatcaggctctggggtatcagagcaaccaagttgacgtagtgtgaaaaaatagtattcctttgataaaaaatactgtcccttggtcttctctaagtttgaaacaccccgaataaagcctgaggcggcggcagcggcggagttggcggcttggagagctcgggagagttccctggaaccagaacttggaccttctcgcttctgtcctccgtttagtctcctcctcggcgggagccctcgcgacgcgcccggcccggagcccccagcgcagcggccgcgtttgaaggatgacctctaggaagaaagtgttgctgaaggttatcatcctgggagattctggagtcgggaagacatcactcatgaaccagtatgtgaataagaaattcagcaatcagtacaaagccacaataggagctgactttctgaccaaggaggtgatggtggatgacaggctagtcacaatgcagatatgggacacagcaggacaggaacggttccagtctctcggtgtggccttctacagaggtgcagactgctgcgttctggtatttgatgtgactgcccccaacacattcaaaaccctagatagctggagagatgagtttctcatccaggccagtccccgagatcctgaaaacttcccatttgttgtgttgggaaacaagattgacctcgaaaacagacaagtggccacaaagcgggcacaggcctggtgctacagcaaaaacaacattccctactttgagaccagtgccaaggaggccatcaacgtggagcaggcgttccagacgattgcacggaatgcacttaagcaggaaacggaggtggagctgtacaacgaatttcctgaacctatcaaactggacaagaatgaccgggccaaggcctcggcagaaagctgcagttgctgagggggcagtgagagttgagcacagagtccttcacaaaccaagaacacacgtaggccttcaacacaattcccctctcctcttccaaacaaaacatacattgatctctcacatccagctgccaaaagaaaaccccatcaaacacagttacaccccacatatctctcacacacacacacacacgcacacacacacacacagatctgacgtaatcaaactccagcccttgcccgtgatggctccttggggtctgcctgcccacccacatgagcccgcgagtatggcagcaggacaagccagcggtggaagtcattctgatatggagttggcattggaagcttattctttttgttcactggagagcccgaattcgggcattcttagtgccccctatgaccatctacactgaacaagatttatacagttatgtcatatctaagccccgcaacaaaagagtacccattcttccttttgttataggagcaggagtgctaggtgcactaggtactggcattggcggtatcacaacctctactcagttctactacaaactatctcaagaactaaatggggacatggaacgggtcgcccgactccctggtcaccttgcaagatcaacttaactccctagcagcagtagtccttcaaaatcgaagagctttagacttgctaaccgctgaaagagggggaacctgtttatttttaggggaagaatgctgttattatgttaatcaatccggaatcgtcactgagaaagttaaagaaattcgagatcgaatacaacgtagagcagaggagcttcgaaacactggaccctggggcctcctcagccaatggatgccctggattctccccttcttaggacctctagcagctataatattgctactcctctttggaccctgtatctttaacctccttgttaactttgtctcttccagaatcgaagctgtaaaactacaaatggagcccaagatgcagtccaagactaagatctaccgcagacccctggaccggcctgctagcccacgatctgatgtccc

SEQ ID NO: 316654 - DNA, 1073 bp, Homo sapiens
  misc_feature (918)..(918): n is a, c, g, or t
  misc_feature (920)..(921): n is a, c, g, or t
  misc_feature (929)..(929): n is a, c, g, or t
  misc_feature (936)..(937): n is a, c, g, or t
agcggacttccgctcggggcggcggcggtggcggaagtgggagcgggcctggagtcttggccataaagcctgaggcggcggcagcggcggagttggcggcttggagagctcgggagagttccctggaaccagaacttggaccttctcgcttctgtcctccgtttagtctcctcctcggcgggagccctcgcgacgcgcccggcccggagcccccagcgcagcggccgcgtttgaaggatgacctctaggaagaaagtgttgctgaaggttatcatcctgggagattctggagtcgggaagacatcactcatgaaccagtatgtgaataagaaattcagcaatcagtacaaagccacaataggagctgactttctgaccaaggaggtgatggtggatgacaggctagtcacaatgcagatatgggacacagcaggacaggaacggttccagtctctcggtgtggccttctacagaggtgcagactgctgcgttctggtatttgatgtgactgcccccaacacattcaaaaccctagatagctggagagatgagtttctcatccaggccagtccccgagatcctgaaaacttcccatttgttgtgttgggaaacaagattgacctcgaaaacagacaagtggccacaaagcgggcacaggcctggtgctacagcaaaaacaacattccctactttgagaccagtgccaaggaggccatcaacgtggagcaggcgttccagacgattgcacggaatgcacttaagcaggaaacggaggtggagctgtacaacgaatttcctgaacctatcaaactggacaagaatgaccgggccaaggcctcggcagaaagctgcagttgctgagggggcagtgagagttgagcacagagtccttcacaaaccaagaacacacgtaggctnannattcctcnctttcannaatctggtcccctcgtgcaagaaccctaagcgtacccttttaagaaagggaccgagttggtatacctcgggtcgggggcctcgctgtggacgggataggggggatgagaggaggttaggcacccgcagcgcctctt

SEQ ID NO: 316655 - DNA, 1024 bp, Homo sapiens
  misc_feature (19)..(19): n is a, c, g, or t
  misc_feature (27)..(27): n is a, c, g, or t
aaacttacggctaggtagnggccggtntgaatcaaagcctgaggcggcggcagcggcggagttggcggcttggagagctcgggagagttccctggaaccagaacttggaccttctcgcttctgtcctccgtttagtctcctcctcggcgggagccctcgcgacgcgcccggcccggagcccccagcgcagcggccgcgtttgaaggatgacctctaggaagaaagtgttgctgaaggttatcatcctgggagattctggagtcgggaagacatcactcatgaaccagtatgtgaataagaaattcagcaatcagtacaaagccacaataggagctgactttctgaccaaggaggtgatggtggatgacaggctagtcacaatgcagatatgggacacagcaggacaggaacggttccagtctctcggtgtggccttctacagaggtgcagactgctgcgttctggtatttgatgtgactgcccccaacacattcaaaaccctagatagctggagagatgagtttctcatccaggccagtccccgagatcctgaaaacttcccatttgttgtgttgggaaacaagattgacctcgaaaacagacaagtggccacaaagcgggcacaggcctggtgctacagcaaaaacaacattccctactttgagaccagtgccaaggaggccatcaacgtggagcaggcgttccagacgattgcacggaatgcacttaagcaggaaacggaggtggagctgtacaacgaatttcctgaacctatcaaactggacaagaatgaccgggccaaggcctcggcagaaagctgcagttgctgagggggcagtgagagttgagcacagagtccttcacaaaccaagaacacacgtaggccttcaacacaattcccctctcctcttccaaacaaaacatacattgatctctcacatccagctgccaaaaaaaatgttacccattttttacataactggcacaaaatgttggtaaaaccagcggcggaggccgggtggcc

SEQ ID NO: 316656 - DNA, 745 bp, Homo sapiens
gacgcgtgggcggacgcgtggaaaatgtataaattagtgtaagaaattcttggattatgtgtttaagtcctgtaatgcaggcctgtaaggtggagggttgaaccctgtttggattgcagagtgttactcagaattgggaaatccagctagcggcagtattctgtacagtagacacaagaattatgtacgccttttatcaaagacttaagagccaaaaagcttttcatctctccagggggaaaactgtctagttcccttctgtgtctaaattttccaaaacgttgatttgcataatacagtggtatgtgcaatggataaattgccgttatttcaaaaattaaaattctcattttctttcttttttttcccccctgctccacacttcaaaactcccgttagatcagcattctactacaagagtgaaaggaaaaccctaacagatctgtcctagtgattttacctttgttctagaaggcgctcctttcagggttgtggtattcttaggttagcggagctttttcctcttttccccacccatctccccaatattgcccattattaattaacctctttctttggttggaaccctggcagttctgctcccttcctaggatctgcccctgcattgtagcttgcttaacggagcacttctcctttttccaaaggtctacattctagggtgtgggctgagttcttctgtaaagagatgaacgcaatgccaataaaattgaacaagaacaatgat

SEQ ID NO: 316657 - DNA, 597 bp, Homo sapiens
ggtagtacccggaatgtgtccgcggtgagagttgagcacagagtccttcacaaaccaagaacacacgtaggccttcaacacaattcccctctcctcttccaaacaaaacatacattgatctctcacatccagctgccaaaagaaaaccccatcaaacacagttacaccccacatatctctcacacacacacacacacgcacacacacacacacagatctgacgtaatcaaactccagcccttgcccgtgatggctccttggggtctgcctgcccacccacatgagcccgcgagtatggcagcaggacaagccagcggtggaagtcattctgatatggagttggcattggaagcttattctttttgttcactggagagagagagaactgtttacagttaatctgtgtctaattatctgattttttttattggtcttgtggtctttttacccccccttcaacacaattcccctctcctcttccaaacaaaacatacatagatctctcacatccagctgccaaaagaaaaccccatcaaacacagttacaccccacatatctctcacacacacacacacacgcacacacacacacagaga

SEQ ID NO: 316658 - DNA, 231 bp, Homo sapiens
tccctcaagctgcaagcagcaaccccctcgagactctatgacaccccacatatctctccacacgcacacacacacacacagatctgacgtaatcaaactccagcccttgcccgtgatggctccttggggtctgcctgcccacccacatgagcccgcgagtatggcagcaggacaaggtttgattacgtcagatctgtgttatgtgtgtgtgagagatatgtgggggataac

SEQ ID NO: 316659 - DNA, 2749 bp, Homo sapiens
  misc_feature (2248)..(2248): n is a, c, g, or t
agcggacttccgctcggggcggcggcggtggcggaagtgggagcgggcctggagtcttggccataaagcctgaggcggcggcagcggcggagttggcggcttggagagctcgggagagttccctggaaccagaacttggaccttctcgcttctgtcctccgtttagtctcctcctcggcgggagccctcgcgacgcgcccggcccggagcccccagcgcagcggccgcgtttgaaggatgacctctaggaagaaagtgttgctgaaggttatcatcctgggagattctggagtcgggaagacatcactcatgaaccagtatgtgaataagaaattcagcaatcagtacaaagccacaataggagctgactttctgaccaaggaggtgatggtggatgacaggctagtcacaatgcagatatgggacacagcaggacaggaacggttccagtctctcggtgtggccttctacagaggtgcagactgctgcgttctggtatttgatgtgactgcccccaacacattcaaaaccctagatagctggagagatgagtttctcatccaggccagtccccgagatcctgaaaacttcccatttgttgtgttgggaaacaagattgacctcgaaaacagacaagtggccacaaagcgggcacaggcctggtgctacagcaaaaacaacattccctactttgagaccagtgccaaggaggccatcaacgtggagcaggcgttccagacgattgcacggaatgcacttaagcaggaaacggaggtggagctgtacaacgaatttcctgaacctatcaaactggacaagaatgaccgggccaaggcctcggcagaaagctgcagttgctgagggggcagtgagagttgagcacagagtccttcacaaaccaagaacacacgtaggccttcaacacaattcccctctcctcttccaaacaaaacatacattgatctctcacatccagctgccaaaagaaaaccccatcaaacacagttacaccccacatatctctcacacacacacacacacgcacacacacacacacagatctgacgtaatcaaactccagcccttgcccgtgatggctccttggggtctgcctgcccacccacatgagcccgcgagtatggcagcaggacaagccagcggtggaagtcattctgatatggagttggcattggaagcttattctttttgttcactggagagagagagaactgtttacagttaatctgtgtctaattatctgattttttttattggtcttgtggtctttttaccccccctttcccctccctccttgaaggctaccccttgggaaggctggtgccccatgccccattacaggctcacacccagtctgatcaggctgagttttgtatgtatctatctgttaatgcttgttacttttaactaatcagatctttttacagtatccatttattatgtaatgcttcttagaaaagaatcttatagtacatgttaatatatgcaaccaattaaaatgtataaattagtgtaagaaattcttggattatgtgtttaagtcctgtaatgcaggcctgtaaggtggagggttgaaccctgtttggattgcagagtgttactcagaattgggaaatccagctagcggcagtattctgtacagtagacacaagaattatgtacgccttttatcaaagacttaagagccaaaaagcttttcatctctccagggggaaaactgtctagttcccttctgtgtctaaattttccaaaacgttgatttgcataatacagtggtatgtgcaatggataaattgccgttatttcaaaaattaaaattctcattttctttcttttttttcccccctgctccacacttcaaaactcccgttagatcagcattctactacaagagtgaaaggaaaaccctaacagatctgtcctagtgattttacctttgttctagaaggcgctcctttcagggttgtggtattcttaggttagcggagctttttcctcttttccccacccatctccccaatattgcccattattaattaacctctttctttggttggaaccctggcagttctgctcccttcctaggatctgcccctgcattgtagcttgcttaacggagcacttctcctttttccaaaggtctacattctagggtgtgggctgagttcttctgtaaagagatgaacgcaatgccaataaaattgaacaagaacaatgataaaaaaaaaancaaaaacacaaaaaaaaaacaaaaacacatgaaaaccgagaaagtcccacacagcgcagaccagacgactaagagggacagcaagcgaagacgcgcacaatcatcctcctccgcacacacggcggtgatgctcataccgtgagcacgacctccaattagatatgtcgatgagctagccatcccggcccggtgccagtacgcccgacggcgccccacacgaacacgagagcgccaaaactagacgaccaacccacacacacgacacaacagcggcgtcagaaaacacatcagcagagaaacaaacgatgccaagcgccagctggacacaacaacaccgacgccgactcgcatccgagcagagagggacagctcaaccgagccggacccccccgacgcccaccacctacgtggcggcagaggcacgcagcaagacgagacacgccgccacacacagacgcaggggggccacacacaccgccgcaccacaaccgaaacacaaac

SEQ ID NO: 316660 - DNA, 2729 bp, Homo sapiens
agcggacttccgctcggggcggcggcggtggcggaagtgggagcgggcctggagtcttggccataaagcctgaggcggcggcagcggcggagttggcggcttggagagctcgggagagttccctggaaccagaacttggaccttctcgcttctgtcctccgtttagtctcctcctcggcgggagccctcgcgacgcgcccggcccggagcccccagcgcagcggccgcgtttgaaggatgacctctaggaagaaagtgttgctgaaggttatcatcctgggagattctggagtcgggaagacatcactcatgaaccagtatgtgaataagaaattcagcaatcagtacaaagccacaataggagctgactttctgaccaaggaggtgatggtggatgacaggctagtcacaatgcagatatgggacacagcaggacaggaacggttccagtctctcggtgtggccttctacagaggtgcagactgctgcgttctggtatttgatgtgactgcccccaacacattcaaaaccctagatagctggagagatgagtttctcatccaggccagtccccgagatcctgaaaacttcccatttgttgtgttgggaaacaagattgacctcgaaaacagacaagtggccacaaagcgggcacaggcctggtgctacagcaaaaacaacattccctactttgagaccagtgccaaggaggccatcaacgtggagcaggcgttccagacgattgcacggaatgcacttaagcaggaaacggaggtggagctgtacaacgaatttcctgaacctatcaaactggacaagaatgaccgggccaaggcctcggcagaaagctgcagttgctgagggggcagtgagagttgagcacagagtccttcacaaaccaagaacacacgtaggccttcaacacaattcccctctcctcttccaaacaaaacatacattgatctctcacatccagctgccaaaagaaaaccccatcaaacacagttacaccccacatatctctcacacacacacacacacgcacacacacacacacagatctgacgtaatcaaactccagcccttgcccgtgatggctccttggggtctgcctgcccacccacatgagcccgcgagtatggcagcaggacaagccagcggtggaagtcattctgatatggagttggcattggaagcttattctttttgttcactggagagagagagaactgtttacagttaatctgtgtctaattatctgattttttttattggtcttgtggtctttttaccccccctttcccctccctccttgaaggctaccccttgggaaggctggtgccccatgccccattacaggctcacacccagtctgatcaggctgagttttgtatgtatctatctgttaatgcttgttacttttaactaatcagatctttttacagtatccatttattatgtaatgcttcttagaaaagaatcttatagtacatgttaatatatgcaaccaattaaaatgtataaattagtgtaagaaattcttggattatgtgtttaagtcctgtaatgcaggcctgtaaggtggagggttgaaccctgtttggattgcagagtgttactcagaattgggaaatccagctagcggcagtattctgtacagtagacacaagaattatgtacgccttttatcaaagacttaagagccaaaaagcttttcatctctccagggggaaaactgtctagttcccttctgtgtctaaattttccaaaacgttgatttgcataatacagtggtatgtgcaatggataaattgccgttatttcaaaaattaaaattctcattttctttcttttttttcccccctgctccacacttcaaaactcccgttagatcagcattctactacaagagtgaaaggaaaaccctaacagatctgtcctagtgattttacctttgttctagaaggcgctcctttcagggttgtggtattcttaggttagcggagctttttcctcttttccccacccatctccccaatattgcccattattaattaacctctttctttggttggaaccctggcagttctgctcccttcctaggatctgcccctgcattgtagcttgcttaacggagcacttctcctttttccaaaggtctacattctagggtgtgggctgagttcttctgtaaagagatgaacgcaatgccaataaaattgaacaagaacaatgatacaatgatcatctgcctttgccagagtctttttttccttcttcaagagccttggctcagtagagaccacatgagctaatcatagtcaatgccttatcaagcaagagagccctccataaatgggcacgtgtggtgcttcaaggcagaaaggccctctcatatctggtcctgtagtgcctgtccctagtttttttttgtttgtttttttttccgggggcgggggtgggtgtattttaatcacattgttggaggttgaggaccatggatggagaacgcattgtccctttaggagagcagccagaaactgctggggactctgagccatgcatatcctgtaggtgtaactgtaacctagtcatgtgttatgtgttttatttttagttgacctagttgctaacacttagatgtgtaattctgcatttgtcacaggagaggaagatttggcagcagaggccctgtattccaacatatgtaagcccccacctggaatgga

SEQ ID NO: 316661 - DNA, 2293 bp, Homo sapiens
  misc_feature (2282)..(2282): n is a, c, g, or t
agcggacttccgctcggggcggcggcggtggcggaagtgggagcgggcctggagtcttggccataaagcctgaggcggcggcagcggcggagttggcggcttggagagctcgggagagttccctggaaccagaacttggaccttctcgcttctgtcctccgtttagtctcctcctcggcgggagccctcgcgacgcgcccggcccggagcccccagcgcagcggccgcgtttgaaggatgacctctaggaagaaagtgttgctgaaggttatcatcctgggagattctggagtcgggaagacatcactcatgaaccagtatgtgaataagaaattcagcaatcagtacaaagccacaataggagctgactttctgaccaaggaggtgatggtggatgacaggctagtcacaatgcagatatgggacacagcaggacaggaacggttccagtctctcggtgtggccttctacagaggtgcagactgctgcgttctggtatttgatgtgactgcccccaacacattcaaaaccctagatagctggagagatgagtttctcatccaggccagtccccgagatcctgaaaacttcccatttgttgtgttgggaaacaagattgacctcgaaaacagacaagtggccacaaagcgggcacaggcctggtgctacagcaaaaacaacattccctactttgagaccagtgccaaggaggccatcaacgtggagcaggcgttccagacgattgcacggaatgcacttaagcaggaaacggaggtggagctgtacaacgaatttcctgaacctatcaaactggacaagaatgaccgggccaaggcctcggcagaaagctgcagttgctgagggggcagtgagagttgagcacagagtccttcacaaaccaagaacacacgtaggccttcaacacaattcccctctcctcttccaaacaaaacatacattgatctctcacatccagctgccaaaagaaaaccccatcaaacacagttacaccccacatatctctcacacacacacacacacgcacacacacacacacagatctgacgtaatcaaactccagcccttgcccgtgatggctccttggggtctgcctgcccacccacatgagcccgcgagtatggcagcaggacaagccagcggtggaagtcattctgatatggagttggcattggaagcttattctttttgttcactggagagagagagaactgtttacagttaatctgtgtctaattatctgattttttttattggtcttgtggtctttttaccccccctttcccctccctccttgaaggctaccccttgggaaggctggtgccccatgccccattacaggctcacacccagtctgatcaggctgagttttgtatgtatctatctgttaatgcttgttacttttaactaatcagatctttttacagtatccatttattatgtaatgcttcttagaaaagaatcttatagtacatgttaatatatgcaaccaattaaaatgtataaattagtgtaagaaattcttggattatgtgtttaagtcctgtaatgcaggcctgtaaggtggagggttgaaccctgtttggattgcagagtgttactcagaattgggaaatccagctagcggcagtattctgtacagtagacacaagaattatgtacgccttttatcaaagacttaagagccaaaaagcttttcatctctccagggggaaaactgtctagttcccttctgtgtctaaattttccaaaacgttgatttgcataatacagtggtatgtgcaatggataaattgccgttatttcaaaaattaaaattctcattttctttcttttttttcccccctgctccacacttcaaaactcccgttagatcagcattctactacaagagtgaaaggaaaaccctaacagatctgtcctagtgattttacctttgttctagaaggcgctcctttcagggttgtggtattcttaggttagcggagctttttcctcttttccccacccatctccccaatattgcccattattaattaacctctttctttggttggaaccctggcagttctgctcccttcctaggatctgcccctgcattgtagcttgcttaacggagcacttctcctttttccaaaggtctacattctagggtgtgggctgagttcttctgtaaagagatgaacgcaatgccaataaaattgaacaagaacaatgatcacgcacatgaaaaacgacgctggtcgacatatcctactcccggncgtaccagcct

SEQ ID NO: 316662 - DNA, 2951 bp, Homo sapiens
agcggacttccgctcggggcggcggcggtggcggaagtgggagcgggcctggagtcttggccataaagcctgaggcggcggcagcggcggagttggcggcttggagagctcgggagagttccctggaaccagaacttggaccttctcgcttctgtcctccgtttagtctcctcctcggcgggagccctcgcgacgcgcccggcccggagcccccagcgcagcggccgcgtttgaaggatgacctctaggaagaaagtgttgctgaaggttatcatcctgggagattctggagtcgggaagacatcactcatgaaccagtatgtgaataagaaattcagcaatcagtacaaagccacaataggagctgactttctgaccaaggaggtgatggtggatgacaggctagtcacaatgcagatatgggacacagcaggacaggaacggttccagtctctcggtgtggccttctacagaggtgcagactgctgcgttctggtatttgatgtgactgcccccaacacattcaaaaccctagatagctggagagatgagtttctcatccaggccagtccccgagatcctgaaaacttcccatttgttgtgttgggaaacaagattgacctcgaaaacagacaagtggccacaaagcgggcacaggcctggtgctacagcaaaaacaacattccctactttgagaccagtgccaaggaggccatcaacgtggagcaggcgttccagacgattgcacggaatgcacttaagcaggaaacggaggtggagctgtacaacgaatttcctgaacctatcaaactggacaagaatgaccgggccaaggcctcggcagaaagctgcagttgctgagggggcagtgagagttgagcacagagtccttcacaaaccaagaacacacgtaggccttcaacacaattcccctctcctcttccaaacaaaacatacattgatctctcacatccagctgccaaaagaaaaccccatcaaacacagttacaccccacatatctctcacacacacacacacacgcacacacacacacacagatctgacgtaatcaaactccagcccttgcccgtgatggctccttggggtctgcctgcccacccacatgagcccgcgagtatggcagcaggacaagccagcggtggaagtcattctgatatggagttggcattggaagcttattctttttgttcactggagagagagagaactgtttacagttaatctgtgtctaattatctgattttttttattggtcttgtggtctttttaccccccctttcccctccctccttgaaggctaccccttgggaaggctggtgccccatgccccattacaggctcacacccagtctgatcaggctgagttttgtatgtatctatctgttaatgcttgttacttttaactaatcagatctttttacagtatccatttattatgtaatgcttcttagaaaagaatcttatagtacatgttaatatatgcaaccaattaaaatgtataaattagtgtaagaaattcttggattatgtgtttaagtcctgtaatgcaggcctgtaaggtggagggttgaaccctgtttggattgcagagtgttactcagaattgggaaatccagctagcggcagtattctgtacagtagacacaagaattatgtacgccttttatcaaagacttaagagccaaaaagcttttcatctctccagggggaaaactgtctagttcccttctgtgtctaaattttccaaaacgttgatttgcataatacagtggtatgtgcaatggataaattgccgttatttcaaaaattaaaattctcattttctttcttttttttcccccctgctccacacttcaaaactcccgttagatcagcattctactacaagagtgaaaggaaaaccctaacagatctgtcctagtgattttacctttgttctagaaggcgctcctttcagggttgtggtattcttaggttagcggagctttttcctcttttccccacccatctccccaatattgcccattattaattaacctctttctttggttggaaccctggcagttctgctcccttcctaggatctgcccctgcattgtagcttgcttaacggagcacttctcctttttccaaaggtctacattctagggtgtgggctgagttcttctgtaaagagatgaacgcaatgccaataaaattgaacaagaacaatgataaaaaaaaaaaaaaaaaaaaaaaaaaaattttggggggggcggggctagaaaaaagttttaaaaacccattcgggtggggggcgggggcccaggtgggggtaggagcacatggggccaacccggctcccccaaagaaagccccggcgggcaatgcagactacggcgcggtgggcctctcccaccaataaaaaaaaacgcccggcggcggaacaccccggacggcggttctgtggaccactccccagatgggtgtccggggcccaaaactgggcaccaaccacacgcggagctcccaacaggagacgcccgaggatatcaaattagccccggcccctgagcgtgggagacgcgcaacacacagagccagcacacaaagcggaagaggacaagaacgagaagggcgaaagagcaggggagaccagagaggaagcgaccaacgcgcacagagagggaagaccaggccagcagcaagaagagggcaagagagacgagaagggggcgcgaggagaaaaaggacacggagaacagcggcagagcgcaaacgaagagatacgagagaaaaagcaggccgagagcaaagcacgcagagagacaggcgaccgagaaagaaggaaaggcagagaacaaagaaacgaagcacaaggaaacgaagaaaagacaaagcaggagggcggcgaggcagaagggaccaaagcggagcaagacaggaaagg

SEQ ID NO: 316663 - DNA, 2195 bp, Homo sapiens
agcggacttccgctcggggcggcggcggtggcggaagtgggagcgggcctggagtcttggccataaagcctgaggcggcggcagcggcggagttggcggcttggagagctcgggagagttccctggaaccagaacttggaccttctcgcttctgtcctccgtttagtctcctcctcggcgggagccctcgcgacgcgcccggcccggagcccccagcgcagcggccgcgtttgaaggatgacctctaggaagaaagtgttgctgaaggttatcatcctgggagattctggagtcgggaagacatcactcatgaaccagtatgtgaataagaaattcagcaatcagtacaaagccacaataggagctgactttctgaccaaggaggtgatggtggatgacaggctagtcacaatgcagatatgggacacagcaggacaggaacggttccagtctctcggtgtggccttctacagaggtgcagactgctgcgttctggtatttgatgtgactgcccccaacacattcaaaaccctagatagctggagagatgagtttctcatccaggccagtccccgagatcctgaaaacttcccatttgttgtgttgggaaacaagattgacctcgaaaacagacaagtggccacaaagcgggcacaggcctggtgctacagcaaaaacaacattccctactttgagaccagtgccaaggaggccatcaacgtggagcaggcgttccagacgattgcacggaatgcacttaagcaggaaacggaggtggagctgtacaacgaatttcctgaacctatcaaactggacaagaatgaccgggccaaggcctcggcagaaagctgcagttgctgagggggcagtgagagttgagcacagagtccttcacaaaccaagaacacacgtaggccttcaacacaattcccctctcctcttccaaacaaaacatacattgatctctcacatccagctgccaaaagaaaaccccatcaaacacagttacaccccacatatctctcacacacacacacacacgcacacacacacacacagatctgacgtaatcaaactccagcccttgcccgtgatggctccttggggtctgcctgcccacccacatgagcccgcgagtatggcagcaggacaagccagcggtggaagtcattctgatatggagttggcattggaagcttattctttttgttcactggagagagagagaactgtttacagttaatctgtgtctaattatctgattttttttattggtcttgtggtctttttaccccccctttcccctccctccttgaaggctaccccttgggaaggctggtgccccatgccccattacaggctcacacccagtctgatcaggctgagttttgtatgtatctatctgttaatgcttgttacttttaactaatcagatctttttacagtatccatttattatgtaatgcttcttagaaaagaatcttatagtacatgttaatatatgcaaccaattaaaatgtataaattagtgtaagaaattcttggattatgtgtttaagtcctgtaatgcaggcctgtaaggtggagggttgaaccctgtttggattgcagagtgttactcagaattgggaaatccagctagcggcagtattctgtacagtagacacaagaattatgtacgccttttatcaaagacttaagagccaaaaagcttttcatctctccagggggaaaactgtctagttcccttctgtgtctaaattttccaaaacgttgatttgcataatacagtggtatgtgcaatggataaattgccgttatttcaaaaattaaaattctcattttctttcttttttttcccccctgctccacacttcaaaactcccgttagatcagcattctactacaagagtgaaaggaaaaccctaacagatctgtcctagtgattttacctttgttctagaaggcgctcctttcagggttgtggtattcttaggttagcggagctttttcctcttttccccacccatctccccaatattgcccattattaattaacctctttctttggttggaaccctggcagttctgctcccttcctaggatctgcccctgcattgtagcttgcttaacggagcacttctcctttttccaaaggtctacctgccgaacaactcactacgttagtctacctg

SEQ ID NO: 316664 - DNA, 2226 bp, Homo sapiens
aaagagagaagaagcacaaataatgactaggtacgagactgggtttacttatgaaagcctgaggcggcggcagcggcggagttggcggcttggagagctcgggagagttccctggaaccagaacttggaccttctcgcttctgtcctccgtttagtctcctcctcggcgggagccctcgcgacgcgcccggcccggagcccccagcgcagcggccgcgtttgaaggatgacctctaggaagaaagtgttgctgaaggttatcatcctgggagattctggagtcgggaagacatcactcatgaaccagtatgtgaataagaaattcagcaatcagtacaaagccacaataggagctgactttctgaccaaggaggtgatggtggatgacaggctagtcacaatgcagatatgggacacagcaggacaggaacggttccagtctctcggtgtggccttctacagaggtgcagactgctgcgttctggtatttgatgtgactgcccccaacacattcaaaaccctagatagctggagagatgagtttctcatccaggccagtccccgagatcctgaaaacttcccatttgttgtgttgggaaacaagattgacctcgaaaacagacaagtggccacaaagcgggcacaggcctggtgctacagcaaaaacaacattccctactttgagaccagtgccaaggaggccatcaacgtggagcaggcgttccagacgattgcacggaatgcacttaagcaggaaacggaggtggagctgtacaacgaatttcctgaacctatcaaactggacaagaatgaccgggccaaggcctcggcagaaagctgcagttgctgagggggcagtgagagttgagcacagagtccttcacaaaccaagaacacacgtaggccttcaacacaattcccctctcctcttccaaacaaaacatacattgatctctcacatccagctgccaaaagaaaaccccatcaaacacagttacaccccacatatctctcacacacacacacacacgcacacacacacacacagatctgacgtaatcaaactccagcccttgcccgtgatggctccttggggtctgcctgcccacccacatgagcccgcgagtatggcagcaggacaagccagcggtggaagtcattctgatatggagttggcattggaagcttattctttttgttcactggagagagagagaactgtttacagttaatctgtgtctaattatctgattttttttattggtcttgtggtctttttaccccccctttcccctccctccttgaaggctaccccttgggaaggctggtgccccatgccccattacaggctcacacccagtctgatcaggctgagttttgtatgtatctatctgttaatgcttgttacttttaactaatcagatctttttacagtatccatttattatgtaatgcttcttagaaaagaatcttatagtacatgttaatatatgcaaccaattaaaatgtataaattagtgtaagaaattcttggattatgtgtttaagtcctgtaatgcaggcctgtaaggtggagggttgaaccctgtttggattgcagagtgttactcagaattgggaaatccagctagcggcagtattctgtacagtagacacaagaattatgtacgccttttatcaaagacttaagagccaaaaagcttttcatctctccagggggaaaactgtctagttcccttctgtgtctaaattttccaaaacgttgatttgcataatacagtggtatgtgcaatggataaattgccgttatttcaaaaattaaaattctcattttctttcttttttttcccccctgctccacacttcaaaactcccgttagatcagcattctactacaagagtgaaaggaaaaccctaacagatctgtcctagtgattttacctttgttctagaaggcgctcctttcagggttgtggtattcttaggttagcggagctttttcctcttttccccacccatctccccaatattgcccattattaattaacctctttctttggttggaaccctggcagttctgctcccttcctaggatctgcccctgcattgtagcttgcttaacggagcacttctcctttttccaaaggtctacattctagggtgtgggctgagttcttctgtaaagagatgaacgcaatgccaataaaattgaacaagaacaatgat

SEQ ID NO: 316665 - DNA, 2221 bp, Homo sapiens
cttgagtatcacaaccgtcgcacctccattgggtcgctgactgtggagaaagcctgaggcggcggcagcggcggagttggcggcttggagagctcgggagagttccctggaaccagaacttggaccttctcgcttctgtcctccgtttagtctcctcctcggcgggagccctcgcgacgcgcccggcccggagcccccagcgcagcggccgcgtttgaaggatgacctctaggaagaaagtgttgctgaaggttatcatcctgggagattctggagtcgggaagacatcactcatgaaccagtatgtgaataagaaattcagcaatcagtacaaagccacaataggagctgactttctgaccaaggaggtgatggtggatgacaggctagtcacaatgcagatatgggacacagcaggacaggaacggttccagtctctcggtgtggccttctacagaggtgcagactgctgcgttctggtatttgatgtgactgcccccaacacattcaaaaccctagatagctggagagatgagtttctcatccaggccagtccccgagatcctgaaaacttcccatttgttgtgttgggaaacaagattgacctcgaaaacagacaagtggccacaaagcgggcacaggcctggtgctacagcaaaaacaacattccctactttgagaccagtgccaaggaggccatcaacgtggagcaggcgttccagacgattgcacggaatgcacttaagcaggaaacggaggtggagctgtacaacgaatttcctgaacctatcaaactggacaagaatgaccgggccaaggcctcggcagaaagctgcagttgctgagggggcagtgagagttgagcacagagtccttcacaaaccaagaacacacgtaggccttcaacacaattcccctctcctcttccaaacaaaacatacattgatctctcacatccagctgccaaaagaaaaccccatcaaacacagttacaccccacatatctctcacacacacacacacacgcacacacacacacacagatctgacgtaatcaaactccagcccttgcccgtgatggctccttggggtctgcctgcccacccacatgagcccgcgagtatggcagcaggacaagccagcggtggaagtcattctgatatggagttggcattggaagcttattctttttgttcactggagagagagagaactgtttacagttaatctgtgtctaattatctgattttttttattggtcttgtggtctttttaccccccctttcccctccctccttgaaggctaccccttgggaaggctggtgccccatgccccattacaggctcacacccagtctgatcaggctgagttttgtatgtatctatctgttaatgcttgttacttttaactaatcagatctttttacagtatccatttattatgtaatgcttcttagaaaagaatcttatagtacatgttaatatatgcaaccaattaaaatgtataaattagtgtaagaaattcttggattatgtgtttaagtcctgtaatgcaggcctgtaaggtggagggttgaaccctgtttggattgcagagtgttactcagaattgggaaatccagctagcggcagtattctgtacagtagacacaagaattatgtacgccttttatcaaagacttaagagccaaaaagcttttcatctctccagggggaaaactgtctagttcccttctgtgtctaaattttccaaaacgttgatttgcataatacagtggtatgtgcaatggataaattgccgttatttcaaaaattaaaattctcattttctttcttttttttcccccctgctccacacttcaaaactcccgttagatcagcattctactacaagagtgaaaggaaaaccctaacagatctgtcctagtgattttacctttgttctagaaggcgctcctttcagggttgtggtattcttaggttagcggagctttttcctcttttccccacccatctccccaatattgcccattattaattaacctctttctttggttggaaccctggcagttctgctcccttcctaggatctgcccctgcattgtagcttgcttaacggagcacttctcctttttccaaaggtctacattctagggtgtgggctgagttcttctgtaaagagatgaacgcaatgccaataaaattgaacaagaacaatgat

SEQ ID NO: 316666 - DNA, 2206 bp, Homo sapiens
  misc_feature (19)..(19): n is a, c, g, or t
  misc_feature (27)..(27): n is a, c, g, or t
aaacttacggctaggtagnggccggtntgaatcaaagcctgaggcggcggcagcggcggagttggcggcttggagagctcgggagagttccctggaaccagaacttggaccttctcgcttctgtcctccgtttagtctcctcctcggcgggagccctcgcgacgcgcccggcccggagcccccagcgcagcggccgcgtttgaaggatgacctctaggaagaaagtgttgctgaaggttatcatcctgggagattctggagtcgggaagacatcactcatgaaccagtatgtgaataagaaattcagcaatcagtacaaagccacaataggagctgactttctgaccaaggaggtgatggtggatgacaggctagtcacaatgcagatatgggacacagcaggacaggaacggttccagtctctcggtgtggccttctacagaggtgcagactgctgcgttctggtatttgatgtgactgcccccaacacattcaaaaccctagatagctggagagatgagtttctcatccaggccagtccccgagatcctgaaaacttcccatttgttgtgttgggaaacaagattgacctcgaaaacagacaagtggccacaaagcgggcacaggcctggtgctacagcaaaaacaacattccctactttgagaccagtgccaaggaggccatcaacgtggagcaggcgttccagacgattgcacggaatgcacttaagcaggaaacggaggtggagctgtacaacgaatttcctgaacctatcaaactggacaagaatgaccgggccaaggcctcggcagaaagctgcagttgctgagggggcagtgagagttgagcacagagtccttcacaaaccaagaacacacgtaggccttcaacacaattcccctctcctcttccaaacaaaacatacattgatctctcacatccagctgccaaaagaaaaccccatcaaacacagttacaccccacatatctctcacacacacacacacacgcacacacacacacacagatctgacgtaatcaaactccagcccttgcccgtgatggctccttggggtctgcctgcccacccacatgagcccgcgagtatggcagcaggacaagccagcggtggaagtcattctgatatggagttggcattggaagcttattctttttgttcactggagagagagagaactgtttacagttaatctgtgtctaattatctgattttttttattggtcttgtggtctttttaccccccctttcccctccctccttgaaggctaccccttgggaaggctggtgccccatgccccattacaggctcacacccagtctgatcaggctgagttttgtatgtatctatctgttaatgcttgttacttttaactaatcagatctttttacagtatccatttattatgtaatgcttcttagaaaagaatcttatagtacatgttaatatatgcaaccaattaaaatgtataaattagtgtaagaaattcttggattatgtgtttaagtcctgtaatgcaggcctgtaaggtggagggttgaaccctgtttggattgcagagtgttactcagaattgggaaatccagctagcggcagtattctgtacagtagacacaagaattatgtacgccttttatcaaagacttaagagccaaaaagcttttcatctctccagggggaaaactgtctagttcccttctgtgtctaaattttccaaaacgttgatttgcataatacagtggtatgtgcaatggataaattgccgttatttcaaaaattaaaattctcattttctttcttttttttcccccctgctccacacttcaaaactcccgttagatcagcattctactacaagagtgaaaggaaaaccctaacagatctgtcctagtgattttacctttgttctagaaggcgctcctttcagggttgtggtattcttaggttagcggagctttttcctcttttccccacccatctccccaatattgcccattattaattaacctctttctttggttggaaccctggcagttctgctcccttcctaggatctgcccctgcattgtagcttgcttaacggagcacttctcctttttccaaaggtctacattctagggtgtgggctgagttcttctgtaaagagatgaacgcaatgccaataaaattgaacaagaacaatgat

SEQ ID NO: 316667 - DNA, 2195 bp, Homo sapiens
ccgggttggaatcggacgagggaaagcctgaggcggcggcagcggcggagttggcggcttggagagctcgggagagttccctggaaccagaacttggaccttctcgcttctgtcctccgtttagtctcctcctcggcgggagccctcgcgacgcgcccggcccggagcccccagcgcagcggccgcgtttgaaggatgacctctaggaagaaagtgttgctgaaggttatcatcctgggagattctggagtcgggaagacatcactcatgaaccagtatgtgaataagaaattcagcaatcagtacaaagccacaataggagctgactttctgaccaaggaggtgatggtggatgacaggctagtcacaatgcagatatgggacacagcaggacaggaacggttccagtctctcggtgtggccttctacagaggtgcagactgctgcgttctggtatttgatgtgactgcccccaacacattcaaaaccctagatagctggagagatgagtttctcatccaggccagtccccgagatcctgaaaacttcccatttgttgtgttgggaaacaagattgacctcgaaaacagacaagtggccacaaagcgggcacaggcctggtgctacagcaaaaacaacattccctactttgagaccagtgccaaggaggccatcaacgtggagcaggcgttccagacgattgcacggaatgcacttaagcaggaaacggaggtggagctgtacaacgaatttcctgaacctatcaaactggacaagaatgaccgggccaaggcctcggcagaaagctgcagttgctgagggggcagtgagagttgagcacagagtccttcacaaaccaagaacacacgtaggccttcaacacaattcccctctcctcttccaaacaaaacatacattgatctctcacatccagctgccaaaagaaaaccccatcaaacacagttacaccccacatatctctcacacacacacacacacgcacacacacacacacagatctgacgtaatcaaactccagcccttgcccgtgatggctccttggggtctgcctgcccacccacatgagcccgcgagtatggcagcaggacaagccagcggtggaagtcattctgatatggagttggcattggaagcttattctttttgttcactggagagagagagaactgtttacagttaatctgtgtctaattatctgattttttttattggtcttgtggtctttttaccccccctttcccctccctccttgaaggctaccccttgggaaggctggtgccccatgccccattacaggctcacacccagtctgatcaggctgagttttgtatgtatctatctgttaatgcttgttacttttaactaatcagatctttttacagtatccatttattatgtaatgcttcttagaaaagaatcttatagtacatgttaatatatgcaaccaattaaaatgtataaattagtgtaagaaattcttggattatgtgtttaagtcctgtaatgcaggcctgtaaggtggagggttgaaccctgtttggattgcagagtgttactcagaattgggaaatccagctagcggcagtattctgtacagtagacacaagaattatgtacgccttttatcaaagacttaagagccaaaaagcttttcatctctccagggggaaaactgtctagttcccttctgtgtctaaattttccaaaacgttgatttgcataatacagtggtatgtgcaatggataaattgccgttatttcaaaaattaaaattctcattttctttcttttttttcccccctgctccacacttcaaaactcccgttagatcagcattctactacaagagtgaaaggaaaaccctaacagatctgtcctagtgattttacctttgttctagaaggcgctcctttcagggttgtggtattcttaggttagcggagctttttcctcttttccccacccatctccccaatattgcccattattaattaacctctttctttggttggaaccctggcagttctgctcccttcctaggatctgcccctgcattgtagcttgcttaacggagcacttctcctttttccaaaggtctacattctagggtgtgggctgagttcttctgtaaagagatgaacgcaatgccaataaaattgaacaagaacaatgat

SEQ ID NO: 316668 - DNA, 1832 bp, Homo sapiens
agcggacttccgctcggggcggcggcggtggcggaagtgggagcgggcctggagtcttggccataaagcctgaggcggcggcagcggcggagttggcggcttggagagctcgggagagttccctggaaccagaacttggaccttctcgcttctgtcctccgtttagtctcctcctcggcgggagccctcgcgacgcgcccggcccggagcccccagcgcagcggccgcgtttgaaggatgacctctaggaagaaagtgttgctgaaggttatcatcctgggagattctggagtcgggaagacatcactcatgaaccagtatgtgaataagaaattcagcaatcagtacaaagccacaataggagctgactttctgaccaaggaggtgatggtggatgacaggctagtcacaatgcagatatgggacacagcaggacaggaacggttccagtctctcggtgtggccttctacagaggtgcagactgctgcgttctggtatttgatgtgactgcccccaacacattcaaaaccctagatagctggagagatgagtttctcatccaggccagtccccgagatcctgaaaacttcccatttgttgtgttgggaaacaagattgacctcgaaaacagacaagtggccacaaagcgggcacaggcctggtgctacagcaaaaacaacattccctactttgagaccagtgccaaggaggccatcaacgtggagcaggcgttccagacgattgcacggaatgcacttaagcaggaaacggaggtggagctgtacaacgaatttcctgaacctatcaaactggacaagaatgaccgggccaaggcctcggcagaaagctgcagttgctgagggggcagtgagagttgagcacagagtccttcacaaaccaagaacacacgtaggccttcaacacaattcccctctcctcttccaaacaaaacatacattgatctctcacatccagctgccaaaagaaaaccccatcaaacacagttacaccccacatatctctcacacacacacacacacgcacacacacacacacagatctgacgtaatcaaactccagcccttgcccgtgatggctccttggggtctgcctgcccacccacatgagcccgcgagtatggcagcaggacaagccagcggtggaagtcattctgatatggagttggcattggaagcttattctttttgttcactggagagagagagaactgtttacagttaatctgtgtctaattatctgattttttttattggtcttgtggtctttttaccccccctttcccctccctccttgaaggctaccccttgggaaggctggtgccccatgccccattacaggctcacacccagtctgatcaggctgagttttgtatgtatctatctgttaatgcttgttacttttaactaatcagatctttttacagtatccatttattatgtaatgcttcttagaaaagaatcttatagtacatgttaatatatgcaaccaattaaaatgtataaattagtgtaagaaattcttggattatgtgtttaagtcctgtaatgcaggcctgtaaggtggagggttgaaccctgtttggattgcagagtgttactcagaattgggaaatccagctagcggcagtattctgtacagtagacacaagaattatgtacgccttttatcaaagacttaagagccaaaaagcttttcatctctccagggggaaaactgtctagttcccttctgtgtctaaattttccaaaacgttgatttgcataatacagtggtatgtgcaatggataaattgccgttatttcaaaaatta

SEQ ID NO: 316669 - DNA, 1907 bp, Homo sapiens
agcggacttccgctcggggcggcggcggtggcggaagtgggagcgggcctggagtcttggccataaagcctgaggcggcggcagcggcggagttggcggcttggagagctcgggagagttccctggaaccagaacttggaccttctcgcttctgtcctccgtttagtctcctcctcggcgggagccctcgcgacgcgcccggcccggagcccccagcgcagcggccgcgtttgaaggatgacctctaggaagaaagtgttgctgaaggttatcatcctgggagattctggagtcgggaagacatcactcatgaaccagtatgtgaataagaaattcagcaatcagtacaaagccacaataggagctgactttctgaccaaggaggtgatggtggatgacaggctagtcacaatgcagatatgggacacagcaggacaggaacggttccagtctctcggtgtggccttctacagaggtgcagactgctgcgttctggtatttgatgtgactgcccccaacacattcaaaaccctagatagctggagagatgagtttctcatccaggccagtccccgagatcctgaaaacttcccatttgttgtgttgggaaacaagattgacctcgaaaacagacaagtggccacaaagcgggcacaggcctggtgctacagcaaaaacaacattccctactttgagaccagtgccaaggaggccatcaacgtggagcaggcgttccagacgattgcacggaatgcacttaagcaggaaacggaggtggagctgtacaacgaatttcctgaacctatcaaactggacaagaatgaccgggccaaggcctcggcagaaagctgcagttgctgagggggcagtgagagttgagcacagagtccttcacaaaccaagaacacacgtaggccttcaacacaattcccctctcctcttccaaacaaaacatacattgatctctcacatccagctgccaaaagaaaaccccatcaaacacagttacaccccacatatctctcacacacacacacacacgcacacacacacacacagatctgacgtaatcaaactccagcccttgcccgtgatggctccttggggtctgcctgcccacccacatgagcccgcgagtatggcagcaggacaagccagcggtggaagtcattctgatatggagttggcattggaagcttattctttttgttcactggagagagagagaactgtttacagttaatctgtgtctaattatctgattttttttattggtcttgtggtctttttaccccccctttcccctccctccttgaaggctaccccttgggaaggctggtgccccatgccccattacaggctcacacccagtctgatcaggctgagttttgtatgtatctatctgttaatgcttgttacttttaactaatcagatctttttacagtatccatttattatgtaatgcttcttagaaaagaatcttatagtacatgttaatatatgcaaccaattaaaatgtataaattagtgtaagaaattcttggattatgtgtttaagtcctgtaatgcaggcctgtaaggtggagggttgaaccctgtttggattgcagagtgttactcagaattgggaaatccagctagcggcagtattctgtacagtagacacaagaattatgtacgccttttatcaaagacttaagagccaaaaagcttttcatctctccagggggaaaactgtctagttcccttctgtgtctaaattttccaaaacgttgatttgcataatacagtggtatgtgtccccttgaaaagcgtagattttagtggcggtctcactttcaccagcagttcgcccgttagttctcaggatcgcgatgggctggacgtcgtgaggcggacgcgtggg

SEQ ID NO: 316670 - DNA, 2209 bp, Homo sapiens
agcggacttccgctcggggcggcggcggtggcggaagtgggagcgggcctggagtcttggccataaagcctgaggcggcggcagcggcggagttggcggcttggagagctcgggagagttccctggaaccagaacttggaccttctcgcttctgtcctccgtttagtctcctcctcggcgggagccctcgcgacgcgcccggcccggagcccccagcgcagcggccgcgtttgaaggatgacctctaggaagaaagtgttgctgaaggttatcatcctgggagattctggagtcgggaagacatcactcatgaaccagtatgtgaataagaaattcagcaatcagtacaaagccacaataggagctgactttctgaccaaggaggtgatggtggatgacaggctagtcacaatgcagatatgggacacagcaggacaggaacggttccagtctctcggtgtggccttctacagaggtgcagactgctgcgttctggtatttgatgtgactgcccccaacacattcaaaaccctagatagctggagagatgagtttctcatccaggccagtccccgagatcctgaaaacttcccatttgttgtgttgggaaacaagattgacctcgaaaacagacaagtggccacaaagcgggcacaggcctggtgctacagcaaaaacaacattccctactttgagaccagtgccaaggaggccatcaacgtggagcaggcgttccagacgattgcacggaatgcacttaagcaggaaacggaggtggagctgtacaacgaatttcctgaacctatcaaactggacaagaatgaccgggccaaggcctcggcagaaagctgcagttgctgagggggcagtgagagttgagcacagagtccttcacaaaccaagaacacacgtaggccttcaacacaattcccctctcctcttccaaacaaaacatacattgatctctcacatccagctgccaaaagaaaaccccatcaaacacagttacaccccacatatctctcacacacacacaacgtaatcaaactccagcccttgcccgtgatggctccttggggtctgcctgcccacccacatgagcccgcgagtatggcagcaggacaagccagcggtggaagtcattctgatatggagttggcattggaagcttattctttttgttcactggagagagagagaactgtttacagttaatctgtgtctaattatctgattttttttattggtcttgtggtctttttaccccccctttcccctccctccttgaaggctaccccttgggaaggctggtgccccatgccccattacaggctcacacccagtctgatcaggctgagttttgtatgtatctatctgttaatgcttgttacttttaactaatcagatctttttacagtatccatttattatgtaatgcttcttagaaaagaatcttatagtacatgttaatatatgcaaccaattaaaatgtataaattagtgtaagaaattcttggattatgtgtttaagtcctgtaatgcaggcctgtaaggtggagggttgaaccctgtttggattgcagagtgttactcagaattgggaaatccagctagcggcagtattctgtacagtagacacaagaattatgtacgccttttatcaaagacttaagagccaaaaagcttttcatctctccagggggaaaactgtctagttcccttctgtgtctaaattttccaaaacgttgatttgcataatacagtggtatgtgcaatggataaattgccgttatttcaaaaattaaaattctcattttctttcttttttttcccccctgctccacacttcaaaactcccgttagatcagcattctactacaagagtgaaaggaaaaccctaacagatctgtcctagtgattttacctttgttctagaaggcgctcctttcagggttgtggtattcttaggttagcggagctttttcctcttttccccacccatctccccaatattgcccattattaattaacctctttctttggttggaaccctggcagttctgctcccttcctaggatctgcccctgcattgtagcttgcttaacggagcacttctcctttttccaaaggtctacattctagggtgtgggctgagttcttctgtaaagagatgaacgcaatgccaataaaattgaacaagaacaatgat

SEQ ID NO: 316671 - DNA, 2186 bp, Homo sapiens
agcggacttccgctcggggcggcggcggtggcggaagtgggagcgggcctggagtcttggccataaagcctgaggcggcggcagcggcggagttggcggcttggagagctcgggagagttccctggaaccagaacttggaccttctcgcttctgtcctccgtttagtctcctcctcggcgggagccctcgcgacgcgcccggcccggagcccccagcgcagcggccgcgtttgaaggatgacctctaggaagaaagtgttgctgaaggttatcatcctgggagattctggagtcgggaagacatcactcatgaaccagtatgtgaataagaaattcagcaatcagtacaaagccacaataggagctgactttctgaccaaggaggtgatggtggatgacaggctagtcacaatgcagatatgggacacagcaggacaggaacggttccagtctctcggtgtggccttctacagaggtgcagactgctgcgttctggtatttgatgtgactgcccccaacacattcaaaaccctagatagctggagagatgagtttctcatccaggccagtccccgagatcctgaaaacttcccatttgttgtgttgggaaacaagattgacctcgaaaacagacaagtggccacaaagcgggcacaggcctggtgctacagcaaaaacaacattccctactttgagaccagtgccaaggaggccatcaacgtggagcaggcgttccagacgattgcacggaatgcacttaagcaggaaacggaggtggagctgtacaacgaatttcctgaacctatcaaactggacaagaatgaccgggccaaggcctcggcagaaagctgcagttgctgagggggcagtgagagttgagcacagagtccttcacaaaccaagaacacacgtaggccttcaacacaattcccctctcctcttccaaacaaaacatacattgatctctcacatccagctgccaaaacacacgcacacacacacacacagatctgacgtaatcaaactccagcccttgcccgtgatggctccttggggtctgcctgcccacccacatgagcccgcgagtatggcagcaggacaagccagcggtggaagtcattctgatatggagttggcattggaagcttattctttttgttcactggagagagagagaactgtttacagttaatctgtgtctaattatctgattttttttattggtcttgtggtctttttaccccccctttcccctccctccttgaaggctaccccttgggaaggctggtgccccatgccccattacaggctcacacccagtctgatcaggctgagttttgtatgtatctatctgttaatgcttgttacttttaactaatcagatctttttacagtatccatttattatgtaatgcttcttagaaaagaatcttatagtacatgttaatatatgcaaccaattaaaatgtataaattagtgtaagaaattcttggattatgtgtttaagtcctgtaatgcaggcctgtaaggtggagggttgaaccctgtttggattgcagagtgttactcagaattgggaaatccagctagcggcagtattctgtacagtagacacaagaattatgtacgccttttatcaaagacttaagagccaaaaagcttttcatctctccagggggaaaactgtctagttcccttctgtgtctaaattttccaaaacgttgatttgcataatacagtggtatgtgcaatggataaattgccgttatttcaaaaattaaaattctcattttctttcttttttttcccccctgctccacacttcaaaactcccgttagatcagcattctactacaagagtgaaaggaaaaccctaacagatctgtcctagtgattttacctttgttctagaaggcgctcctttcagggttgtggtattcttaggttagcggagctttttcctcttttccccacccatctccccaatattgcccattattaattaacctctttctttggttggaaccctggcagttctgctcccttcctaggatctgcccctgcattgtagcttgcttaacggagcacttctcctttttccaaaggtctacattctagggtgtgggctgagttcttctgtaaagagatgaacgcaatgccaataaaattgaacaagaacaatgat

SEQ ID NO: 316672 - DNA, 2252 bp, Homo sapiens
agcggacttccgctcggggcggcggcggtggcggaagtgggagcgggcctggagtcttggccataaagcctgaggcggcggcagcggcggagttggcggcttggagagctcgggagagttccctggaaccagaacttggaccttctcgcttctgtcctccgtttagtctcctcctcggcgggagccctcgcgacgcgcccggcccggagcccccagcgcagcggccgcgtttgaaggatgacctctaggaagaaagtgttgctgaaggttatcatcctgggagattctggagtcgggaagacatcactcatgaaccagtatgtgaataagaaattcagcaatcagtacaaagccacaataggagctgactttctgaccaaggaggtgatggtggatgacaggctagtcacaatgcagatatgggacacagcaggacaggaacggttccagtctctcggtgtggccttctacagaggtgcagactgctgcgttctggtatttgatgtgactgcccccaacacattcaaaaccctagatagctggagagatgagtttctcatccaggccagtccccgagatcctgaaaacttcccatttgttgtgttgggaaacaagattgacctcgaaaacagacaagtggccacaaagcgggcacaggcctggtgctacagcaaaaacaacattccctactttgagaccagtgccaaggaggccatcaacgtggagcaggcgttccagacgattgcacggaatgcacttaagcaggaaacggaggtggagctgtacaacgaatttcctgaacctatcaaactggacaagaatgaccgggccaaggcctcggcagaaagctgcagttgctgagggggcagtgagagttgagcacagagtccttcacaaaccaagaacacacgtaggccttcaacacaattcccctctcctcttccaaacaaaacatacattgatctctcacatccagctgccaaaagaaaaccccatcaaacacagttacaccccacatatctctcacacacacacacacacgcacacacacacacacagatctgacgtaatcaaactccagcccttgcccgtgatggctccttggggtctgcctgcccacccacatgagcccgcgagtatggcagcaggacaagccagcggtggaagtcattctgatatggagttggcattggaagcttattctttttgttcactggagagagagagaactgtttacagttaatctgtgtctaattatctgattttttttattggtcttgtggtctttttaccccccctttcccctccctccttgaaggctaccccttgggaaggctggtgccccatgccccattacaggctcacacccagtctgatcaggctgagttttgtatgtatctatctgttaatgcttgttacttttaactaatcagatctttttacagtatccatttattatgtaatgcttcttagaaaagaatcttatagtacatgttaatatatgcaaccaattaaaatgtataaattagtgtaagaaaaaaaaaaaaaaaaaaaaaaaaaaaaaaattttggggggggcggggctagaaaaaagttttaaaaacccattcgggtggggggcgggggcccaggtgggggtaggagcacatggggccaacccggctcccccaaagaaagccccggcgggcaatgcagactacggcgcggtgggcctctcccaccaataaaaaaaaacgcccggcggcggaacaccccggacggcggttctgtggaccactccccagatgggtgtccggggcccaaaactgggcaccaaccacacgcggagctcccaacaggagacgcccgaggatatcaaattagccccggcccctgagcgtgggagacgcgcaacacacagagccagcacacaaagcggaagaggacaagaacgagaagggcgaaagagcaggggagaccagagaggaagcgaccaacgcgcacagagagggaagaccaggccagcagcaagaagagggcaagagagacgagaagggggcgcgaggagaaaaaggacacggagaacagcggcagagcgcaaacgaagagatacgagagaaaaagcaggccgagagcaaagcacgcagagagacaggcgaccgagaaagaaggaaaggcagagaacaaagaaacgaagcacaaggaaacgaagaaaagacaaagcaggagggcggcgaggcagaagggaccaaagcggagcaagacaggaaagg

SEQ ID NO: 316673 - DNA, 2222 bp, Homo sapiens
ccagatatgtactagctcggtactctggttttaatttcatgaccagggctgtgttgtagttaacgttagcaaggtacggtaggctgacagaatctcgggagagttccctggaaccagaacttggaccttctcgcttctgtcctccgtttagtctcctcctcggcgggagccctcgcgacgcgcccggcccggagcccccagcgcagcggccgcgtttgaaggatgacctctaggaagaaagtgttgctgaaggttatcatcctgggagattctggagtcgggaagacatcactcatgaaccagtatgtgaataagaaattcagcaatcagtacaaagccacaataggagctgactttctgaccaaggaggtgatggtggatgacaggctagtcacaatgcagatatgggacacagcaggacaggaacggttccagtctctcggtgtggccttctacagaggtgcagactgctgcgttctggtatttgatgtgactgcccccaacacattcaaaaccctagatagctggagagatgagtttctcatccaggccagtccccgagatcctgaaaacttcccatttgttgtgttgggaaacaagattgacctcgaaaacagacaagtggccacaaagcgggcacaggcctggtgctacagcaaaaacaacattccctactttgagaccagtgccaaggaggccatcaacgtggagcaggcgttccagacgattgcacggaatgcacttaagcaggaaacggaggtggagctgtacaacgaatttcctgaacctatcaaactggacaagaatgaccgggccaaggcctcggcagaaagctgcagttgctgagggggcagtgagagttgagcacagagtccttcacaaaccaagaacacacgtaggccttcaacacaattcccctctcctcttccaaacaaaacatacattgatctctcacatccagctgccaaaagaaaaccccatcaaacacagttacaccccacatatctctcacacacacacacacacgcacacacacacacacagatctgacgtaatcaaactccagcccttgcccgtgatggctccttggggtctgcctgcccacccacatgagcccgcgagtatggcagcaggacaagccagcggtggaagtcattctgatatggagttggcattggaagcttattctttttgttcactggagagagagagaactgtttacagttaatctgtgtctaattatctgattttttttattggtcttgtggtctttttaccccccctttcccctccctccttgaaggctaccccttgggaaggctggtgccccatgccccattacaggctcacacccagtctgatcaggctgagttttgtatgtatctatctgttaatgcttgttacttttaactaatcagatctttttacagtatccatttattatgtaatgcttcttagaaaagaatcttatagtacatgttaatatatgcaaccaattaaaatgtataaattagtgtaagaaattcttggattatgtgtttaagtcctgtaatgcaggcctgtaaggtggagggttgaaccctgtttggattgcagagtgttactcagaattgggaaatccagctagcggcagtattctgtacagtagacacaagaattatgtacgccttttatcaaagacttaagagccaaaaagcttttcatctctccagggggaaaactgtctagttcccttctgtgtctaaattttccaaaacgttgatttgcataatacagtggtatgtgcaatggataaattgccgttatttcaaaaattaaaattctcattttctttcttttttttcccccctgctccacacttcaaaactcccgttagatcagcattctactacaagagtgaaaggaaaaccctaacagatctgtcctagtgattttacctttgttctagaaggcgctcctttcagggttgtggtattcttaggttagcggagctttttcctcttttccccacccatctccccaatattgcccattattaattaacctctttctttggttggaaccctggcagttctgctcccttcctaggatctgcccctgcattgtagcttgcttaacggagcacttctcctttttccaaaggtctacattctagggtgtgggctgagttcttctgtaaagagatgaacgcaatgccaataaaattgaacaagaacaatgat

SEQ ID NO: 316674 - DNA, 2131 bp, Homo sapiens
  misc_feature (122)..(122): n is a, c, g, or t
aagatgccagcttttgatttgttatgagaaacattgtacttgaaagaaagaattgtttcatcgttcaaatactgtaccaatactggtagtttcgctctgaggagcttcttccgatgcacacngtttgaaggatgacctctaggaagaaagtgttgctgaaggttatcatcctgggagattctggagtcgggaagacatcactcatgaaccagtatgtgaataagaaattcagcaatcagtacaaagccacaataggagctgactttctgaccaaggaggtgatggtggatgacaggctagtcacaatgcagatatgggacacagcaggacaggaacggttccagtctctcggtgtggccttctacagaggtgcagactgctgcgttctggtatttgatgtgactgcccccaacacattcaaaaccctagatagctggagagatgagtttctcatccaggccagtccccgagatcctgaaaacttcccatttgttgtgttgggaaacaagattgacctcgaaaacagacaagtggccacaaagcgggcacaggcctggtgctacagcaaaaacaacattccctactttgagaccagtgccaaggaggccatcaacgtggagcaggcgttccagacgattgcacggaatgcacttaagcaggaaacggaggtggagctgtacaacgaatttcctgaacctatcaaactggacaagaatgaccgggccaaggcctcggcagaaagctgcagttgctgagggggcagtgagagttgagcacagagtccttcacaaaccaagaacacacgtaggccttcaacacaattcccctctcctcttccaaacaaaacatacattgatctctcacatccagctgccaaaagaaaaccccatcaaacacagttacaccccacatatctctcacacacacacacacacgcacacacacacacacagatctgacgtaatcaaactccagcccttgcccgtgatggctccttggggtctgcctgcccacccacatgagcccgcgagtatggcagcaggacaagccagcggtggaagtcattctgatatggagttggcattggaagcttattctttttgttcactggagagagagagaactgtttacagttaatctgtgtctaattatctgattttttttattggtcttgtggtctttttaccccccctttcccctccctccttgaaggctaccccttgggaaggctggtgccccatgccccattacaggctcacacccagtctgatcaggctgagttttgtatgtatctatctgttaatgcttgttacttttaactaatcagatctttttacagtatccatttattatgtaatgcttcttagaaaagaatcttatagtacatgttaatatatgcaaccaattaaaatgtataaattagtgtaagaaattcttggattatgtgtttaagtcctgtaatgcaggcctgtaaggtggagggttgaaccctgtttggattgcagagtgttactcagaattgggaaatccagctagcggcagtattctgtacagtagacacaagaattatgtacgccttttatcaaagacttaagagccaaaaagcttttcatctctccagggggaaaactgtctagttcccttctgtgtctaaattttccaaaacgttgatttgcataatacagtggtatgtgcaatggataaattgccgttatttcaaaaattaaaattctcattttctttcttttttttcccccctgctccacacttcaaaactcccgttagatcagcattctactacaagagtgaaaggaaaaccctaacagatctgtcctagtgattttacctttgttctagaaggcgctcctttcagggttgtggtattcttaggttagcggagctttttcctcttttccccacccatctccccaatattgcccattattaattaacctctttctttggttggaaccctggcagttctgctcccttcctaggatctgcccctgcattgtagcttgcttaacggagcacttctcctttttccaaaggtctacattctagggtgtgggctgagttcttctgtaaagagatgaacgcaatgccaataaaattgaacaagaacaatgat

SEQ ID NO: 316675 - DNA, 2157 bp, Homo sapiens
gagactagtgtgttagaggatcagaataagtgtattcgtacaacctatatatcatacaaaccctgtctaagtccctgcaggcaaagacatacgatcttgcgttgggagccctcgcgagcgcccggccggagcccccagcgcagggcgcgtttgaaggatgacctctaggaagaaagtgttgctgaaggttatcatcctgggagattctggagtcgggaagacatcactcatgaaccagtatgtgaataagaaattcagcaatcagtacaaagccacaataggagctgactttctgaccaaggaggtgatggtggatgacaggctagtcacaatgcagatatgggacacagcaggacaggaacggttccagtctctcggtgtggccttctacagaggtgcagactgctgcgttctggtatttgatgtgactgcccccaacacattcaaaaccctagatagctggagagatgagtttctcatccaggccagtccccgagatcctgaaaacttcccatttgttgtgttgggaaacaagattgacctcgaaaacagacaagtggccacaaagcgggcacaggcctggtgctacagcaaaaacaacattccctactttgagaccagtgccaaggaggccatcaacgtggagcaggcgttccagacgattgcacggaatgcacttaagcaggaaacggaggtggagctgtacaacgaatttcctgaacctatcaaactggacaagaatgaccgggccaaggcctcggcagaaagctgcagttgctgagggggcagtgagagttgagcacagagtccttcacaaaccaagaacacacgtaggccttcaacacaattcccctctcctcttccaaacaaaacatacattgatctctcacatccagctgccaaaagaaaaccccatcaaacacagttacaccccacatatctctcacacacacacacacacgcacacacacacacacagatctgacgtaatcaaactccagcccttgcccgtgatggctccttggggtctgcctgcccacccacatgagcccgcgagtatggcagcaggacaagccagcggtggaagtcattctgatatggagttggcattggaagcttattctttttgttcactggagagagagagaactgtttacagttaatctgtgtctaattatctgattttttttattggtcttgtggtctttttaccccccctttcccctccctccttgaaggctaccccttgggaaggctggtgccccatgccccattacaggctcacacccagtctgatcaggctgagttttgtatgtatctatctgttaatgcttgttacttttaactaatcagatctttttacagtatccatttattatgtaatgcttcttagaaaagaatcttatagtacatgttaatatatgcaaccaattaaaatgtataaattagtgtaagaaattcttggattatgtgtttaagtcctgtaatgcaggcctgtaaggtggagggttgaaccctgtttggattgcagagtgttactcagaattgggaaatccagctagcggcagtattctgtacagtagacacaagaattatgtacgccttttatcaaagacttaagagccaaaaagcttttcatctctccagggggaaaactgtctagttcccttctgtgtctaaattttccaaaacgttgatttgcataatacagtggtatgtgcaatggataaattgccgttatttcaaaaattaaaattctcattttctttcttttttttcccccctgctccacacttcaaaactcccgttagatcagcattctactacaagagtgaaaggaaaaccctaacagatctgtcctagtgattttacctttgttctagaaggcgctcctttcagggttgtggtattcttaggttagcggagctttttcctcttttccccacccatctccccaatattgcccattattaattaacctctttctttggttggaaccctggcagttctgctcccttcctaggatctgcccctgcattgtagcttgcttaacggagcacttctcctttttccaaaggtctacattctagggtgtgggctgagttcttctgtaaagagatgaacgcaatgccaataaaattgaacaagaacaatgat

SEQ ID NO: 316676 - DNA, 2256 bp, Homo sapiens
tagctggtacccgccatacagatcaggtgaactggcctatgcggtcgaggagtggcctggtttctggcagggccccgacagacactcgttgacatcggtctcacagcgaggtccagtgtagccacgaccgcactggcacagtgaaggagccctgcgtgttcacgcacctgcccaagtgctcgcaggggttggcgccgatagagcactcgtccacgtcctggtcacatgccccaagcgcagcggccgcgtttgaaggatgacctctaggaagaaagtgttgctgaaggttatcatcctgggagattctggagtcgggaagacatcactcatgaaccagtatgtgaataagaaattcagcaatcagtacaaagccacaataggagctgactttctgaccaaggaggtgatggtggatgacaggctagtcacaatgcagatatgggacacagcaggacaggaacggttccagtctctcggtgtggccttctacagaggtgcagactgctgcgttctggtatttgatgtgactgcccccaacacattcaaaaccctagatagctggagagatgagtttctcatccaggccagtccccgagatcctgaaaacttcccatttgttgtgttgggaaacaagattgacctcgaaaacagacaagtggccacaaagcgggcacaggcctggtgctacagcaaaaacaacattccctactttgagaccagtgccaaggaggccatcaacgtggagcaggcgttccagacgattgcacggaatgcacttaagcaggaaacggaggtggagctgtacaacgaatttcctgaacctatcaaactggacaagaatgaccgggccaaggcctcggcagaaagctgcagttgctgagggggcagtgagagttgagcacagagtccttcacaaaccaagaacacacgtaggccttcaacacaattcccctctcctcttccaaacaaaacatacattgatctctcacatccagctgccaaaagaaaaccccatcaaacacagttacaccccacatatctctcacacacacacacacacgcacacacacacacacagatctgacgtaatcaaactccagcccttgcccgtgatggctccttggggtctgcctgcccacccacatgagcccgcgagtatggcagcaggacaagccagcggtggaagtcattctgatatggagttggcattggaagcttattctttttgttcactggagagagagagaactgtttacagttaatctgtgtctaattatctgattttttttattggtcttgtggtctttttaccccccctttcccctccctccttgaaggctaccccttgggaaggctggtgccccatgccccattacaggctcacacccagtctgatcaggctgagttttgtatgtatctatctgttaatgcttgttacttttaactaatcagatctttttacagtatccatttattatgtaatgcttcttagaaaagaatcttatagtacatgttaatatatgcaaccaattaaaatgtataaattagtgtaagaaattcttggattatgtgtttaagtcctgtaatgcaggcctgtaaggtggagggttgaaccctgtttggattgcagagtgttactcagaattgggaaatccagctagcggcagtattctgtacagtagacacaagaattatgtacgccttttatcaaagacttaagagccaaaaagcttttcatctctccagggggaaaactgtctagttcccttctgtgtctaaattttccaaaacgttgatttgcataatacagtggtatgtgcaatggataaattgccgttatttcaaaaattaaaattctcattttctttcttttttttcccccctgctccacacttcaaaactcccgttagatcagcattctactacaagagtgaaaggaaaaccctaacagatctgtcctagtgattttacctttgttctagaaggcgctcctttcagggttgtggtattcttaggttagcggagctttttcctcttttccccacccatctccccaatattgcccattattaattaacctctttctttggttggaaccctggcagttctgctcccttcctaggatctgcccctgcattgtagcttgcttaacggagcacttctcctttttccaaaggtctacattctagggtgtgggctgagttcttctgtaaagagatgaacgcaatgccaataaaattgaacaagaacaatgat

SEQ ID NO: 316677 - DNA, 1323 bp, Homo sapiens
agcggacttccgctcggggcggcggcggtggcggaagtgggagcgggcctggagtcttggccataaagcctgaggcggcggcagcggcggagttggcggcttggagagctcgggagagttccctggaaccagaacttggaccttctcgcttctgtcctccgtttagtctcctcctcggcgggagccctcgcgacgcgcccggcccggagcccccagcgcagcggccgcgtttgaaggatgacctctaggaagaaagtgttgctgaaggttatcatcctgggagattctggagtcgggaagacatcactcatgaaccagtatgtgaataagaaattcagcaatcagtacaaagccacaataggagctgactttctgaccaaggaggtgatggtggatgacaggctagtcacaatgcagatatgggacacagcaggacaggaacggttccagtctctcggtgtggccttctacagaggtgcagactgctgcgttctggtatttgatgtgactgcccccaacacattcaaaaccctagatagctggagagatgagtttctcatccaggccagtccccgagatcctgaaaacttcccatttgttgtgttgggaaacaagattgacctcgaaaacagacaagtggccacaaagcgggcacaggcctggtgctacagcaaaaacaacattccctactttgagaccagtgccaaggaggccatcaacgtggagcaggcgttccagacgattgcacggaatgcacttaagcaggaaacggaggtggagctgtacaacgaatttcctgaacctatcaaactggacaagaatgaccgggccaaggcctcggcagaaagctgcagttgctgagggggcagtgagagttgagcacagagtccttcacaaaccaagaacacacgtaggccttcaacacaattcccctctcctcttccaaacaaaacatacattgatctctcacatccagctgccaaaagaaaaccccatcaaacacagttacaccccacatatctctcacacacacacaacaagaacaagcaaaacttacaccctttatccccatacacgttattatcgaaaccatcagcctacacatcaaaccaaaagccctggcagacgcctaacgggaacattcctggggccacactatatggcactaatgggaaggcacctagaattgcacatgaacttcctcagatgatattacagagtcattaggaaaccaaaaccgtggcctaccacgcaggtcaactctgtacttagggaagataaaaaaaccgggtatcgggagaggaagggcatcccttgaggacg

SEQ ID NO: 316678 - DNA, 1055 bp, Homo sapiens
agcggacttccgctcggggcggcggcggtggcggaagtgggagcgggcctggagtcttggccataaagcctgaggcggcggcagcggcggagttggcggcttggagagctcgggagagttccctggaaccagaacttggaccttctcgcttctgtcctccgtttagtctcctcctcggcgggagccctcgcgacgcgcccggcccggagcccccagcgcagcggccgcgtttgaaggatgacctctaggaagaaagtgttgctgaaggttatcatcctgggagattctggagtcgggaagacatcactcatgaaccagtatgtgaataagaaattcagcaatcagtacaaagccacaataggagctgactttctgaccaaggaggtgatggtggatgacaggctagtcacaatgcagatatgggacacagcaggacaggaacggttccagtctctcggtgtggccttctacagaggtgcagactgctgcgttctggtatttgatgtgactgcccccaacacattcaaaaccctagatagctggagagatgagtttctcatccaggccagtccccgagatcctgaaaacttcccatttgttgtgttgggaaacaagattgacctcgaaaacagacaagtggccacaaagcgggcacaggcctggtgctacagcaaaaacaacattccctactttgagaccagtgccaaggaggccatcaacgtggagcaggcgttccagacgattgcacggaatgcacttaagcaggaaacggaggtggagctgtacaacgaatttcctgaacctatcaaactggacaagaatgaccgggccaaggcctcggcagaaagctgcagttgctgagggggcagtgagagttgagcacagagtccttcacaaaccaagaacacacgtaggccttcaacacaattcccctctcctcttccaaacaaaacatacattgatctctcacatccagctgccaaaaaaaatgttacccattttttacataactggcacaaaatgttggtaaaaccagcggcggaggccgggtggcc

SEQ ID NO: 316679 - DNA, 2084 bp, Homo sapiens
tcacgagtctgactctcgggcggagcgctcggcgacgggccgcgtgcggagggcctcagggcaaggatccagattttgaagtgtgaagagtaggaacggaaagtcttctagctgttttcatgctgtcagtattctaaagtcgtgactaggacaacccctgcggagtatgtgaataagaaattcagcaatcagtacaaagccacaataggagctgactttctgaccaaggaggtgatggtggatgacaggctagtcacaatgcagatatgggacacagcaggacaggaacggttccagtctctcggtgtggccttctacagaggtgcagactgctgcgttctggtatttgatgtgactgcccccaacacattcaaaaccctagatagctggagagatgagtttctcatccaggccagtccccgagatcctgaaaacttcccatttgttgtgttgggaaacaagattgacctcgaaaacagacaagtggccacaaagcgggcacaggcctggtgctacagcaaaaacaacattccctactttgagaccagtgccaaggaggccatcaacgtggagcaggcgttccagacgattgcacggaatgcacttaagcaggaaacggaggtggagctgtacaacgaatttcctgaacctatcaaactggacaagaatgaccgggccaaggcctcggcagaaagctgcagttgctgagggggcagtgagagttgagcacagagtccttcacaaaccaagaacacacgtaggccttcaacacaattcccctctcctcttccaaacaaaacatacattgatctctcacatccagctgccaaaagaaaaccccatcaaacacagttacaccccacatatctctcacacacacacacacacgcacacacacacacacagatctgacgtaatcaaactccagcccttgcccgtgatggctccttggggtctgcctgcccacccacatgagcccgcgagtatggcagcaggacaagccagcggtggaagtcattctgatatggagttggcattggaagcttattctttttgttcactggagagagagagaactgtttacagttaatctgtgtctaattatctgattttttttattggtcttgtggtctttttaccccccctttcccctccctccttgaaggctaccccttgggaaggctggtgccccatgccccattacaggctcacacccagtctgatcaggctgagttttgtatgtatctatctgttaatgcttgttacttttaactaatcagatctttttacagtatccatttattatgtaatgcttcttagaaaagaatcttatagtacatgttaatatatgcaaccaattaaaatgtataaattagtgtaagaaattcttggattatgtgtttaagtcctgtaatgcaggcctgtaaggtggagggttgaaccctgtttggattgcagagtgttactcagaattgggaaatccagctagcggcagtattctgtacagtagacacaagaattatgtacgccttttatcaaagacttaagagccaaaaagcttttcatctctccagggggaaaactgtctagttcccttctgtgtctaaattttccaaaacgttgatttgcataatacagtggtatgtgcaatggataaattgccgttatttcaaaaattaaaattctcattttctttcttttttttcccccctgctccacacttcaaaactcccgttagatcagcattctactacaagagtgaaaggaaaaccctaacagatctgtcctagtgattttacctttgttctagaaggcgctcctttcagggttgtggtattcttaggttagcggagctttttcctcttttccccacccatctccccaatattgcccattattaattaacctctttctttggttggaaccctggcagttctgctcccttcctaggatctgcccctgcattgtagcttgcttaacggagcacttctcctttttccaaaggtctacattctagggtgtgggctgagttcttctgtaaagagatgaacgcaatgccaataaaattgaacaagaacaatgat

SEQ ID NO: 316680 - DNA, 1107 bp, Homo sapiens
  misc_feature (1107)..(1107): n is a, c, g, or t
agcggacttccgctcggggcggcggcggtggcggaagtgggagcgggcctggagtcttggccataaagcctgaggcggcggcagcggcggagttggcggcttggagagctcgggagagttccctggaaccagaacttggaccttctcgcttctgtcctccgtttagtctcctcctcggcgggagccctcgcgacgcgcccggcccggagcccccagcgcagcggccgcgtttgaaggatgacctctaggaagaaagtgttgctgaaggttatcatcctgggagattctggagtcgggaagacatcactcatgaaccagtatgtgaataagaaattcagcaatcagtacaaagccacaataggagctgactttctgaccaaggaggtgatggtggatgacaggctagtcacaatgcagatatgggacacagcaggacaggaacggttccagtctctcggtgtggccttctacagaggtgcagactgctgcgttctggtatttgatgtgactgcccccaacacattcaaaaccctagatagctggagagatgagtttctcatccaggccagtccccgagatcctgaaaacttcccatttgttgtgttgggaaacaagattgacctcgaaaacagacaagtggccacaaagcgggcacaggcctggtgctacagcaaaaacaacattccctactttgagaccagtgccaaggaggccatcaacgtggagcaggcgttccagacgattgcacggaatgcacttaagcaggaaacggaggtggagctgtacaacgaatttcctgaacctatcaaactggacaagaatgaccgggccaaggcctcggcagaaagctgcagttgctgagggggcagtgagagttgagcacagagtccttcacaaaccaagaacacacgtaggccttcaacacaattcccctctcctcttccaaaaaattcttggtcttccatccggcaaaaaccctaagggtccctttgggaaaggcgcacgattgttaatcccgcgggggtgggggcccacggttggagcgggctttggtgtttgggagaggacatttgttatgtcgcgcgcgtgttgttgataataataacn

SEQ ID NO: 316681 - DNA, 2304 bp, Homo sapiens
  misc_feature (688)..(688): n is a, c, g, or t
agcggacttccgctcggggcggcggcggtggcggaagtgggagcgggcctggagtcttggccataaagcctgaggcggcggcagcggcggagttggcggcttggagagctcgggagagttccctggaaccagaacttggaccttctcgcttctgtcctccgtttagtctcctcctcggcgggagccctcgcgacgcgcccggcccggagcccccagcgcagcggccgcgtttgaaggatgacctctaggaagaaagtgttgctgaaggttatcatcctgggagattctggagtcgggaagacatcactcatgaaccagtatgtgaataagaaattcagcaatcagtacaaagccacaataggagctgactttctgaccaaggaggtgatggtggatgacaggctagtcacaatgcagatatgggacacagcaggacaggaacggttccagtctctcggtgtggccttctacagaggtgcagactgctgcgttctggtatttgatgtgactgcccccaacacattcaaaaccctagatagctggagagatgagtttctcatccaggccagtccccgagatcctgaaaacttcccatttgttgtgttggcggaaaaaaaccccgaaaaaaaaaaaaaaaagggggggggggcgaaaaaaaaatttttgacctcgaaaacagacaagtggncacaaagcgggcacaggcctggtgctacagcaaaaacaaacattcaccttaaaaaagtccccgccgtttttttttggaggagccaaggaggccatcaacgtggagcaggcgttccagacgattgcacggaatgcacttaagcaggaaacggaggtggagctgtacaacgaatttcctgaacctatcaaactggacaagaatgaccgggccaaggcctcggcagaaagctgcagttgctgagggggcagtgagagttgagcacagagtccttcacaaaccaagaacacacgtaggccttcaacacaattcccctctcctcttccaaacaaaacatacattgatctctcacatccagctgccaaaagaaaaccccatcaaacacagttacaccccacatatctctcacacacacacacacacgcacacacacacacacagatctgacgtaatcaaactccagcccttgcccgtgatggctccttggggtctgcctgcccacccacatgagcccgcgagtatggcagcaggacaagccagcggtggaagtcattctgatatggagttggcattggaagcttattctttttgttcactggagagagagagaactgtttacagttaatctgtgtctaattatctgattttttttattggtcttgtggtctttttaccccccctttcccctccctccttgaaggctaccccttgggaaggctggtgccccatgccccattacaggctcacacccagtctgatcaggctgagttttgtatgtatctatctgttaatgcttgttacttttaactaatcagatctttttacagtatccatttattatgtaatgcttcttagaaaagaatcttatagtacatgttaatatatgcaaccaattaaaatgtataaattagtgtaagaaattcttggattatgtgtttaagtcctgtaatgcaggcctgtaaggtggagggttgaaccctgtttggattgcagagtgttactcagaattgggaaatccagctagcggcagtattctgtacagtagacacaagaattatgtacgccttttatcaaagacttaagagccaaaaagcttttcatctctccagggggaaaactgtctagttcccttctgtgtctaaattttccaaaacgttgatttgcataatacagtggtatgtgcaatggataaattgccgttatttcaaaaattaaaattctcattttctttcttttttttcccccctgctccacacttcaaaactcccgttagatcagcattctactacaagagtgaaaggaaaaccctaacagatctgtcctagtgattttacctttgttctagaaggcgctcctttcagggttgtggtattcttaggttagcggagctttttcctcttttccccacccatctccccaatattgcccattattaattaacctctttctttggttggaaccctggcagttctgctcccttcctaggatctgcccctgcattgtagcttgcttaacggagcacttctcctttttccaaaggtctacattctagggtgtgggctgagttcttctgtaaagagatgaacgcaatgccaataaaattgaacaagaacaatgat

SEQ ID NO: 316682 - DNA, 2096 bp, Homo sapiens
agcggacttccgctcggggcggcggcggtggcggaagtgggagcgggcctggagtcttggccataaagcctgaggcggcggcagcggcggagttggcggcttggagagctcgggagagttccctggaaccagaacttggaccttctcgcttctgtcctccgtttagtctcctcctcggcgggagccctcgcgacgcgcccggcccggagcccccagcgcagcggccgcgtttgaaggatgacctctaggaagaaagtgttgctgaaggttatcatcctgggagattctggagtcgggaagacatcactcatgaaccagtatgtgaataagaaattcagcaatcagtacaaagccacaataggagctgactttctgaccaaggaggtgatggtggatgacaggctagtcacaatgcagatatgggacacagcaggacaggaacggttccagtctctcggtgtggccttctacagaggtgcagactgctgcgttctggtggccacaaagcgggcacaggcctggtgctacagcaaaaacaacattccctactttgagaccagtgccaaggaggccatcaacgtggagcaggcgttccagacgattgcacggaatgcacttaagcaggaaacggaggtggagctgtacaacgaatttcctgaacctatcaaactggacaagaatgaccgggccaaggcctcggcagaaagctgcagttgctgagggggcagtgagagttgagcacagagtccttcacaaaccaagaacacacgtaggccttcaacacaattcccctctcctcttccaaacaaaacatacattgatctctcacatccagctgccaaaagaaaaccccatcaaacacagttacaccccacatatctctcacacacacacacacacgcacacacacacacacagatctgacgtaatcaaactccagcccttgcccgtgatggctccttggggtctgcctgcccacccacatgagcccgcgagtatggcagcaggacaagccagcggtggaagtcattctgatatggagttggcattggaagcttattctttttgttcactggagagagagagaactgtttacagttaatctgtgtctaattatctgattttttttattggtcttgtggtctttttaccccccctttcccctccctccttgaaggctaccccttgggaaggctggtgccccatgccccattacaggctcacacccagtctgatcaggctgagttttgtatgtatctatctgttaatgcttgttacttttaactaatcagatctttttacagtatccatttattatgtaatgcttcttagaaaagaatcttatagtacatgttaatatatgcaaccaattaaaatgtataaattagtgtaagaaattcttggattatgtgtttaagtcctgtaatgcaggcctgtaaggtggagggttgaaccctgtttggattgcagagtgttactcagaattgggaaatccagctagcggcagtattctgtacagtagacacaagaattatgtacgccttttatcaaagacttaagagccaaaaagcttttcatctctccagggggaaaactgtctagttcccttctgtgtctaaattttccaaaacgttgatttgcataatacagtggtatgtgcaatggataaattgccgttatttcaaaaattaaaattctcattttctttcttttttttcccccctgctccacacttcaaaactcccgttagatcagcattctactacaagagtgaaaggaaaaccctaacagatctgtcctagtgattttacctttgttctagaaggcgctcctttcagggttgtggtattcttaggttagcggagctttttcctcttttccccacccatctccccaatattgcccattattaattaacctctttctttggttggaaccctggcagttctgctcccttcctaggatctgcccctgcattgtagcttgcttaacggagcacttctcctttttccaaaggtctacattctagggtgtgggctgagttcttctgtaaagagatgaacgcaatgccaataaaattgaacaagaacaatgat

SEQ ID NO: 316683 - DNA, 1706 bp, Homo sapiens
aggggggggggaaaaaaaactatatcggcaggagcgaggctgggtgatcctgaaaacttcccatttgttgtgttgggaaacaagattgacctcgaaaacagacaagtggccacaaagcgggcacaggcctggtgctacagcaaaaacaacattccctactttgagaccagtgccaaggaggccatcaacgtggagcaggcgttccagacgattgcacggaatgcacttaagcaggaaacggaggtggagctgtacaacgaatttcctgaacctatcaaactggacaagaatgaccgggccaaggcctcggcagaaagctgcagttgctgagggggcagtgagagttgagcacagagtccttcacaaaccaagaacacacgtaggccttcaacacaattcccctctcctcttccaaacaaaacatacattgatctctcacatccagctgccaaaagaaaaccccatcaaacacagttacaccccacatatctctcacacacacacacacacgcacacacacacacacagatctgacgtaatcaaactccagcccttgcccgtgatggctccttggggtctgcctgcccacccacatgagcccgcgagtatggcagcaggacaagccagcggtggaagtcattctgatatggagttggcattggaagcttattctttttgttcactggagagagagagaactgtttacagttaatctgtgtctaattatctgattttttttattggtcttgtggtctttttaccccccctttcccctccctccttgaaggctaccccttgggaaggctggtgccccatgccccattacaggctcacacccagtctgatcaggctgagttttgtatgtatctatctgttaatgcttgttacttttaactaatcagatctttttacagtatccatttattatgtaatgcttcttagaaaagaatcttatagtacatgttaatatatgcaaccaattaaaatgtataaattagtgtaagaaattcttggattatgtgtttaagtcctgtaatgcaggcctgtaaggtggagggttgaaccctgtttggattgcagagtgttactcagaattgggaaatccagctagcggcagtattctgtacagtagacacaagaattatgtacgccttttatcaaagacttaagagccaaaaagcttttcatctctccagggggaaaactgtctagttcccttctgtgtctaaattttccaaaacgttgatttgcataatacagtggtatgtgcaatggataaattgccgttatttcaaaaattaaaattctcattttctttcttttttttcccccctgctccacacttcaaaactcccgttagatcagcattctactacaagagtgaaaggaaaaccctaacagatctgtcctagtgattttacctttgttctagaaggcgctcctttcagggttgtggtattcttaggttagcggagctttttcctcttttccccacccatctccccaatattgcccattattaattaacctctttctttggttggaaccctggcagttctgctcccttcctaggatctgcccctgcattgtagcttgcttaacggagcacttctcctttttccaaaggtctacattctagggtgtgggctgagttcttctgtaaagagatgaacgcaatgccaataaaattgaacaagaacaatgat

SEQ ID NO: 316684 - DNA, 1977 bp, Homo sapiens
  misc_feature (17)..(17): n is a, c, g, or t
aaacttagtgctaggtncgaggcaaagcctgaggcggcggcagcggcggagttggcggcttggagagctcgggagagttccctggaaccagaacttggaccttctcgcttctgtcctccgtttagtctcctcctcggcgggagccctcgcgacgcgcccggcccggagcccccagcgcagcggccgcgtttgaaggatgacctctaggaagaaagtgttgctgaaggttatcatcctgggagattctggagtcgggaagacatcactcatgaaccagtatgtgaataagaaattcagcaatcagtacaaagccacaataggagctgactttctgaccaaggaggtgatggtggatgacaggctagtcacaatgcaggtggccacaaagcgggcacaggcctggtgctacagcaaaaacaacattccctactttgagaccagtgccaaggaggccatcaacgtggagcaggcgttccagacgattgcacggaatgcacttaagcaggaaacggaggtggagctgtacaacgaatttcctgaacctatcaaactggacaagaatgaccgggccaaggcctcggcagaaagctgcagttgctgagggggcagtgagagttgagcacagagtccttcacaaaccaagaacacacgtaggccttcaacacaattcccctctcctcttccaaacaaaacatacattgatctctcacatccagctgccaaaagaaaaccccatcaaacacagttacaccccacatatctctcacacacacacacacacgcacacacacacacacagatctgacgtaatcaaactccagcccttgcccgtgatggctccttggggtctgcctgcccacccacatgagcccgcgagtatggcagcaggacaagccagcggtggaagtcattctgatatggagttggcattggaagcttattctttttgttcactggagagagagagaactgtttacagttaatctgtgtctaattatctgattttttttattggtcttgtggtctttttaccccccctttcccctccctccttgaaggctaccccttgggaaggctggtgccccatgccccattacaggctcacacccagtctgatcaggctgagttttgtatgtatctatctgttaatgcttgttacttttaactaatcagatctttttacagtatccatttattatgtaatgcttcttagaaaagaatcttatagtacatgttaatatatgcaaccaattaaaatgtataaattagtgtaagaaattcttggattatgtgtttaagtcctgtaatgcaggcctgtaaggtggagggttgaaccctgtttggattgcagagtgttactcagaattgggaaatccagctagcggcagtattctgtacagtagacacaagaattatgtacgccttttatcaaagacttaagagccaaaaagcttttcatctctccagggggaaaactgtctagttcccttctgtgtctaaattttccaaaacgttgatttgcataatacagtggtatgtgcaatggataaattgccgttatttcaaaaattaaaattctcattttctttcttttttttcccccctgctccacacttcaaaactcccgttagatcagcattctactacaagagtgaaaggaaaaccctaacagatctgtcctagtgattttacctttgttctagaaggcgctcctttcagggttgtggtattcttaggttagcggagctttttcctcttttccccacccatctccccaatattgcccattattaattaacctctttctttggttggaaccctggcagttctgctcccttcctaggatctgcccctgcattgtagcttgcttaacggagcacttctcctttttccaaaggtctacattctagggtgtgggctgagttcttctgtaaagagatgaacgcaatgccaataaaattgaacaagaacaatgat

SEQ ID NO: 316685 - DNA, 1050 bp, Homo sapiens
agcggacttccgctcggggcggcggcggtggcggaagtgggagcgggcctggagtcttggccataaagcctgaggcggcggcagcggcggagttggcggcttggagagctcgggagagttccctggaaccagaacttggaccttctcgcttctgtcctccgtttagtctcctcctcggcgggagccctcgcgacgcgcccggcccggagcccccagcgcagcggccgcgtttgaaggatgacctctaggaagaaagtgttgctgaaggttatcatcctgggagattctggagtcgggaagacatcactcatgaaccagtatgtgaataagaaattcagcaatcagtacaaagccacaataggagctgactttctgaccaaggaggtgatggtggatgacaggctagtcacaatgcagatatgggacacagcaggacaggaacggttccagtctctcggtgtggccttctacagaggtgcagactgctgcgttctggtatttgatgtgactgcccccaacacattcaaaaccctagatagctggagagatgagtttctcatccaggccagtccccgagatcctgaaaacttcccatttgttgtgttgggaaacaagattgacctcgaaaacagacaagtggccacaaagcgggcacaggcctggtgctacagcaaaaacaacattccctactttgagaccagtgccaaggaggccatcaacgtggagcaggcgttccagacgattgcacggaatgcacttaagcaggaaacggaggtggagctgtacaacgaatttcctgaacctatcaaactggacaagaatgaccgggccaaggcctcggcagaaagctgcagttgctgagggggcagacccgaagacacctagatttgaccacctggtggccatagagcgtgccggaagagctgctgatggcaattactacaatgcaaggaagatgaacatcaagcacttggttgaccccattgacgatctttttcttgctgcgaagaagattcctggaatctcatcaactggtgtttctaactgggg

SEQ ID NO: 316686 - DNA, 1569 bp, Homo sapiens
atcacgaagcagagagtaatggacagcacagagagccaaggaggccatcaacgtggagcaggcgttccagacgattgcacggaatgcacttaagcaggaaacggaggtggagctgtacaacgaatttcctgaacctatcaaactggacaagaatgaccgggccaaggcctcggcagaaagctgcagttgctgagggggcagtgagagttgagcacagagtccttcacaaaccaagaacacacgtaggccttcaacacaattcccctctcctcttccaaacaaaacatacattgatctctcacatccagctgccaaaagaaaaccccatcaaacacagttacaccccacatatctctcacacacacacacacacgcacacacacacacacagatctgacgtaatcaaactccagcccttgcccgtgatggctccttggggtctgcctgcccacccacatgagcccgcgagtatggcagcaggacaagccagcggtggaagtcattctgatatggagttggcattggaagcttattctttttgttcactggagagagagagaactgtttacagttaatctgtgtctaattatctgattttttttattggtcttgtggtctttttaccccccctttcccctccctccttgaaggctaccccttgggaaggctggtgccccatgccccattacaggctcacacccagtctgatcaggctgagttttgtatgtatctatctgttaatgcttgttacttttaactaatcagatctttttacagtatccatttattatgtaatgcttcttagaaaagaatcttatagtacatgttaatatatgcaaccaattaaaatgtataaattagtgtaagaaattcttggattatgtgtttaagtcctgtaatgcaggcctgtaaggtggagggttgaaccctgtttggattgcagagtgttactcagaattgggaaatccagctagcggcagtattctgtacagtagacacaagaattatgtacgccttttatcaaagacttaagagccaaaaagcttttcatctctccagggggaaaactgtctagttcccttctgtgtctaaattttccaaaacgttgatttgcataatacagtggtatgtgcaatggataaattgccgttatttcaaaaattaaaattctcattttctttcttttttttcccccctgctccacacttcaaaactcccgttagatcagcattctactacaagagtgaaaggaaaaccctaacagatctgtcctagtgattttacctttgttctagaaggcgctcctttcagggttgtggtattcttaggttagcggagctttttcctcttttccccacccatctccccaatattgcccattattaattaacctctttctttggttggaaccctggcagttctgctcccttcctaggatctgcccctgcattgtagcttgcttaacggagcacttctcctttttccaaaggtctacattctagggtgtgggctgagttcttctgtaaagagatgaacgcaatgccaataaaattgaacaagaacaatgat

SEQ ID NO: 316687 - DNA, 1889 bp, Homo sapiens
agcggacttccgctcggggcggcggcggtggcggaagtgggagcgggcctggagtcttggccataaagcctgaggcggcggcagcggcggagttggcggcttggagagctcgggagagttccctggaaccagaacttggaccttctcgcttctgtcctccgtttagtctcctcctcggcgggagccctcgcgacgcgcccggcccggagcccccagcgcagcggccgcgtttgaaggatgacctctaggaagaaagtgttgctgaaggttatcatcctgggagattctggagtcgggaagacatcactcatgaaccagtatgtgaataagaaattcagcaatcagtacaaagccacaataggagctgactttctgaccaaggaggtgatggtggatgacaggctagtcacaatgcaggaaacggaggtggagctgtacaacgaatttcctgaacctatcaaactggacaagaatgaccgggccaaggcctcggcagaaagctgcagttgctgagggggcagtgagagttgagcacagagtccttcacaaaccaagaacacacgtaggccttcaacacaattcccctctcctcttccaaacaaaacatacattgatctctcacatccagctgccaaaagaaaaccccatcaaacacagttacaccccacatatctctcacacacacacacacacgcacacacacacacacagatctgacgtaatcaaactccagcccttgcccgtgatggctccttggggtctgcctgcccacccacatgagcccgcgagtatggcagcaggacaagccagcggtggaagtcattctgatatggagttggcattggaagcttattctttttgttcactggagagagagagaactgtttacagttaatctgtgtctaattatctgattttttttattggtcttgtggtctttttaccccccctttcccctccctccttgaaggctaccccttgggaaggctggtgccccatgccccattacaggctcacacccagtctgatcaggctgagttttgtatgtatctatctgttaatgcttgttacttttaactaatcagatctttttacagtatccatttattatgtaatgcttcttagaaaagaatcttatagtacatgttaatatatgcaaccaattaaaatgtataaattagtgtaagaaattcttggattatgtgtttaagtcctgtaatgcaggcctgtaaggtggagggttgaaccctgtttggattgcagagtgttactcagaattgggaaatccagctagcggcagtattctgtacagtagacacaagaattatgtacgccttttatcaaagacttaagagccaaaaagcttttcatctctccagggggaaaactgtctagttcccttctgtgtctaaattttccaaaacgttgatttgcataatacagtggtatgtgcaatggataaattgccgttatttcaaaaattaaaattctcattttctttcttttttttcccccctgctccacacttcaaaactcccgttagatcagcattctactacaagagtgaaaggaaaaccctaacagatctgtcctagtgattttacctttgttctagaaggcgctcctttcagggttgtggtattcttaggttagcggagctttttcctcttttccccacccatctccccaatattgcccattattaattaacctctttctttggttggaaccctggcagttctgctcccttcctaggatctgcccctgcattgtagcttgcttaacggagcacttctcctttttccaaaggtctacattctagggtgtgggctgagttcttctgtaaagagatgaacgcaatgccaataaaattgaacaagaacaatgat

SEQ ID NO: 316688 - DNA, 1525 bp, Homo sapiens
gagctcggtacccgtaaggcgcgagatatgttcacgcgaatgcacttaagcaggaaacggaggtggagctgtacaacgaatttcctgaacctatcaaactggacaagaatgaccgggccaaggcctcggcagaaagctgcagttgctgagggggcagtgagagttgagcacagagtccttcacaaaccaagaacacacgtaggccttcaacacaattcccctctcctcttccaaacaaaacatacattgatctctcacatccagctgccaaaagaaaaccccatcaaacacagttacaccccacatatctctcacacacacacacacacgcacacacacacacacagatctgacgtaatcaaactccagcccttgcccgtgatggctccttggggtctgcctgcccacccacatgagcccgcgagtatggcagcaggacaagccagcggtggaagtcattctgatatggagttggcattggaagcttattctttttgttcactggagagagagagaactgtttacagttaatctgtgtctaattatctgattttttttattggtcttgtggtctttttaccccccctttcccctccctccttgaaggctaccccttgggaaggctggtgccccatgccccattacaggctcacacccagtctgatcaggctgagttttgtatgtatctatctgttaatgcttgttacttttaactaatcagatctttttacagtatccatttattatgtaatgcttcttagaaaagaatcttatagtacatgttaatatatgcaaccaattaaaatgtataaattagtgtaagaaattcttggattatgtgtttaagtcctgtaatgcaggcctgtaaggtggagggttgaaccctgtttggattgcagagtgttactcagaattgggaaatccagctagcggcagtattctgtacagtagacacaagaattatgtacgccttttatcaaagacttaagagccaaaaagcttttcatctctccagggggaaaactgtctagttcccttctgtgtctaaattttccaaaacgttgatttgcataatacagtggtatgtgcaatggataaattgccgttatttcaaaaattaaaattctcattttctttcttttttttcccccctgctccacacttcaaaactcccgttagatcagcattctactacaagagtgaaaggaaaaccctaacagatctgtcctagtgattttacctttgttctagaaggcgctcctttcagggttgtggtattcttaggttagcggagctttttcctcttttccccacccatctccccaatattgcccattattaattaacctctttctttggttggaaccctggcagttctgctcccttcctaggatctgcccctgcattgtagcttgcttaacggagcacttctcctttttccaaaggtctacattctagggtgtgggctgagttcttctgtaaagagatgaacgcaatgccaataaaattgaacaagaacaatgat

SEQ ID NO: 316689 - DNA, 1494 bp, Homo sapiens
ctagcaggatcctagtattgtagaaacggaggtggagctgtacaacgaatttcctgaacctatcaaactggacaagaatgaccgggccaaggcctcggcagaaagctgcagttgctgagggggcagtgagagttgagcacagagtccttcacaaaccaagaacacacgtaggccttcaacacaattcccctctcctcttccaaacaaaacatacattgatctctcacatccagctgccaaaagaaaaccccatcaaacacagttacaccccacatatctctcacacacacacacacacgcacacacacacacacagatctgacgtaatcaaactccagcccttgcccgtgatggctccttggggtctgcctgcccacccacatgagcccgcgagtatggcagcaggacaagccagcggtggaagtcattctgatatggagttggcattggaagcttattctttttgttcactggagagagagagaactgtttacagttaatctgtgtctaattatctgattttttttattggtcttgtggtctttttaccccccctttcccctccctccttgaaggctaccccttgggaaggctggtgccccatgccccattacaggctcacacccagtctgatcaggctgagttttgtatgtatctatctgttaatgcttgttacttttaactaatcagatctttttacagtatccatttattatgtaatgcttcttagaaaagaatcttatagtacatgttaatatatgcaaccaattaaaatgtataaattagtgtaagaaattcttggattatgtgtttaagtcctgtaatgcaggcctgtaaggtggagggttgaaccctgtttggattgcagagtgttactcagaattgggaaatccagctagcggcagtattctgtacagtagacacaagaattatgtacgccttttatcaaagacttaagagccaaaaagcttttcatctctccagggggaaaactgtctagttcccttctgtgtctaaattttccaaaacgttgatttgcataatacagtggtatgtgcaatggataaattgccgttatttcaaaaattaaaattctcattttctttcttttttttcccccctgctccacacttcaaaactcccgttagatcagcattctactacaagagtgaaaggaaaaccctaacagatctgtcctagtgattttacctttgttctagaaggcgctcctttcagggttgtggtattcttaggttagcggagctttttcctcttttccccacccatctccccaatattgcccattattaattaacctctttctttggttggaaccctggcagttctgctcccttcctaggatctgcccctgcattgtagcttgcttaacggagcacttctcctttttccaaaggtctacattctagggtgtgggctgagttcttctgtaaagagatgaacgcaatgccaataaaattgaacaagaacaatgat

SEQ ID NO: 316690 - DNA, 1474 bp, Homo sapiens
ccggaggatcacttgaaaccaggagtttgagaccatcttgggcaacatagcaaggcctcatctctactaaaaattaaaaattagctaggtgtggtggcatgagcttatagttccagctacttgggaggctgagactggaggattgtgtgagcccaggagttagaggctgcagtgagctgtgatcatgccattgcactccagcctgggcgacagagcaagactgaaaaccccatcaaacacagttacaccccacatatctctcacacacacacacacacgcacacacacacacacagatctgacgtaatcaaactccagcccttgcccgtgatggctccttggggtctgcctgcccacccacatgagcccgcgagtatggcagcaggacaagccagcggtggaagtcattctgatatggagttggcattggaagcttattctttttgttcactggagagagagagaactgtttacagttaatctgtgtctaattatctgattttttttattggtcttgtggtctttttaccccccctttcccctccctccttgaaggctaccccttgggaaggctggtgccccatgccccattacaggctcacacccagtctgatcaggctgagttttgtatgtatctatctgttaatgcttgttacttttaactaatcagatctttttacagtatccatttattatgtaatgcttcttagaaaagaatcttatagtacatgttaatatatgcaaccaattaaaatgtataaattagtgtaagaaattcttggattatgtgtttaagtcctgtaatgcaggcctgtaaggtggagggttgaaccctgtttggattgcagagtgttactcagaattgggaaatccagctagcggcagtattctgtacagtagacacaagaattatgtacgccttttatcaaagacttaagagccaaaaagcttttcatctctccagggggaaaactgtctagttcccttctgtgtctaaattttccaaaacgttgatttgcataatacagtggtatgtgcaatggataaattgccgttatttcaaaaattaaaattctcattttctttcttttttttcccccctgctccacacttcaaaactcccgttagatcagcattctactacaagagtgaaaggaaaaccctaacagatctgtcctagtgattttacctttgttctagaaggcgctcctttcagggttgtggtattcttaggttagcggagctttttcctcttttccccacccatctccccaatattgcccattattaattaacctctttctttggttggaaccctggcagttctgctcccttcctaggatctgcccctgcattgtagcttgcttaacggagcacttctcctttttccaaaggtctacattctagggtgtgggctgagttcttctgtaaagagatgaacgcaatgccaataaaattgaacaagaacaatgat

SEQ ID NO: 316691 - DNA, 985 bp, Homo sapiens
agcggacttccgctcggggcggcggcggtggcggaagtgggagcgggcctggagtcttggccataaagcctgaggcggcggcagcggcggagttggcggcttggagagctcgggagagttccctggaaccagaacttggaccttctcgcttctgtcctccgtttagtctcctcctcggcgggagccctcgcgacgcgcccggcccggagcccccagcgcagcggccgcgtttgaaggatgacctctaggaagaaagtgttgctgaaggttatcatcctgggagattctggagtcgggaagacatcactcatgaaccagtatgtgaataagaaattcagcaatcagtacaaagccacaataggagctgactttctgaccaaggaggtgatggtggatgacaggctagtcacaatgcagatatgggacacagcaggacaggaacggttccagtctctcggtgtggccttctacagaggtgcagactgctgcgttctggtatttgatgtgactgcccccaacacattcaaaaccctagatagctggagagatgagtttctcatccaggccagtccccgagatcctgaaaacttcccatttgttgtgttgggaaacaagattgacctcgaaaacagacaagtggccacaaagcgggcacaggcctggtgctacagcaaaaacaacattccctactttgagaccagtgccaaggaggccatcaacgtggagcaggcgttccagacgattgcacggaatgcacttaagcagaaacggaggtggagctgtactggacacatattgatattatttgtatctattccatgtatcactttctcctaaggcatcaaatctaatacaaaaaaagaaaagcaaaacacaaaacctaggctcaaattccaccttggccatgttttagccgagtaactcacgttccccggtgtctaatctttaccagaaacttccttatctttaacatagggaaaaagcc

SEQ ID NO: 316692 - DNA, 875 bp, Homo sapiens
agcggacttccgctcggggcggcggcggtggcggaagtgggagcgggcctggagtcttggccataaagcctgaggcggcggcagcggcggagttggcggcttggagagctcgggagagttccctggaaccagaacttggaccttctcgcttctgtcctccgtttagtctcctcctcggcgggagccctcgcgacgcgcccggcccggagcccccagcgcagcggccgcgtttgaaggatgacctctaggaagaaagtgttgctgaaggttatcatcctgggagattctggagtcgggaagacatcactcatgaaccagtatgtgaataagaaattcagcaatcagtacaaagccacaataggagctgactttctgaccaaggaggtgatggtggatgacaggctagtcacaatgcagatatgggacacagcaggacaggaacggttccagtctctcggtgtggccttctacagaggtgcagactgctgcgttctggtatttgatgtgactgcccccaacacattcaaaaccctagatagctggagagatgagtttctcatccaggccagtccccgagatcctgaaaacttcccatttgttgtgttgggaaacaagattgacctcgaaaacagacaagtggccacaaagcgggcacaggcctggtgctacagcaaaaacaacattccctactttgagaccagtgccaaggaggccatcaacgtggagcaggcgttccagacgattgcacggaatgcacttaagcaggtgggtctcccacagctgaccagcccactctggtgatgcctgaccactgacccagtccctgcctggcctcctgcccttaatcttcttccctaacccactcttttctgtat

SEQ ID NO: 316693 - DNA, 1590 bp, Homo sapiens
agcggacttccgctcggggcggcggcggtggcggaagtgggagcgggcctggagtcttggccataaagcctgaggcggcggcagcggcggagttggcggcttggagagctcgggagagttccctggaaccagaacttggaccttctcgcttctgtcctccgtttagtctcctcctcggcgggagccctcgcgacgcgcccggcccggagcccccagcgcagcggccgcgtttgaaggatgacctctaggaagaaagtgttgctgaaggttatcatcctgggagattctggagtcgggaagacatcactcatgaaccagtatgtgaataagaaattcagcaatcagtacaaagccacaataggagctgactttctgaccaaggaggtgatggtggatgacaggctagtcacaatgcagacgtaatcaaactccagcccttgcccgtgatggctccttggggtctgcctgcccacccacatgagcccgcgagtatggcagcaggacaagccagcggtggaagtcattctgatatggagttggcattggaagcttattctttttgttcactggagagagagagaactgtttacagttaatctgtgtctaattatctgattttttttattggtcttgtggtctttttaccccccctttcccctccctccttgaaggctaccccttgggaaggctggtgccccatgccccattacaggctcacacccagtctgatcaggctgagttttgtatgtatctatctgttaatgcttgttacttttaactaatcagatctttttacagtatccatttattatgtaatgcttcttagaaaagaatcttatagtacatgttaatatatgcaaccaattaaaatgtataaattagtgtaagaaattcttggattatgtgtttaagtcctgtaatgcaggcctgtaaggtggagggttgaaccctgtttggattgcagagtgttactcagaattgggaaatccagctagcggcagtattctgtacagtagacacaagaattatgtacgccttttatcaaagacttaagagccaaaaagcttttcatctctccagggggaaaactgtctagttcccttctgtgtctaaattttccaaaacgttgatttgcataatacagtggtatgtgcaatggataaattgccgttatttcaaaaattaaaattctcattttctttcttttttttcccccctgctccacacttcaaaactcccgttagatcagcattctactacaagagtgaaaggaaaaccctaacagatctgtcctagtgattttacctttgttctagaaggcgctcctttcagggttgtggtattcttaggttagcggagctttttcctcttttccccacccatctccccaatattgcccattattaattaacctctttctttggttggaaccctggcagttctgctcccttcctaggatctgcccctgcattgtagcttgcttaacggagcacttctcctttttccaaaggtctacattctagggtgtgggctgagttcttctgtaaagagatgaacgcaatgccaataaaattgaacaagaacaatgat

SEQ ID NO: 316694 - DNA, 1196 bp, Homo sapiens
ggcctggagtctgtggcataaagacgtaatcaaactccagcccttgcccgtgatggctccttggggtctgcctgcccacccacatgagcccgcgagtatggcagcaggacaagccagcggtggaagtcattctgatatggagttggcattggaagcttattctttttgttcactggagagagagagaactgtttacagttaatctgtgtctaattatctgattttttttattggtcttgtggtctttttaccccccctttcccctccctccttgaaggctaccccttgggaaggctggtgccccatgccccattacaggctcacacccagtctgatcaggctgagttttgtatgtatctatctgttaatgcttgttacttttaactaatcagatctttttacagtatccatttattatgtaatgcttcttagaaaagaatcttatagtacatgttaatatatgcaaccaattaaaatgtataaattagtgtaagaaattcttggattatgtgtttaagtcctgtaatgcaggcctgtaaggtggagggttgaaccctgtttggattgcagagtgttactcagaattgggaaatccagctagcggcagtattctgtacagtagacacaagaattatgtacgccttttatcaaagacttaagagccaaaaagcttttcatctctccagggggaaaactgtctagttcccttctgtgtctaaattttccaaaacgttgatttgcataatacagtggtatgtgcaatggataaattgccgttatttcaaaaattaaaattctcattttctttcttttttttcccccctgctccacacttcaaaactcccgttagatcagcattctactacaagagtgaaaggaaaaccctaacagatctgtcctagtgattttacctttgttctagaaggcgctcctttcagggttgtggtattcttaggttagcggagctttttcctcttttccccacccatctccccaatattgcccattattaattaacctctttctttggttggaaccctggcagttctgctcccttcctaggatctgcccctgcattgtagcttgcttaacggagcacttctcctttttccaaaggtctacattctagggtgtgggctgagttcttctgtaaagagatgaacgcaatgccaataaaattgaacaagaacaatgat

SEQ ID NO: 316695 - DNA, 1201 bp, Homo sapiens
cttggctgtaggaattcggcactaggacacgtaatcaaactccagcccttgcccgtgatggctccttggggtctgcctgcccacccacatgagcccgcgagtatggcagcaggacaagccagcggtggaagtcattctgatatggagttggcattggaagcttattctttttgttcactggagagagagagaactgtttacagttaatctgtgtctaattatctgattttttttattggtcttgtggtctttttaccccccctttcccctccctccttgaaggctaccccttgggaaggctggtgccccatgccccattacaggctcacacccagtctgatcaggctgagttttgtatgtatctatctgttaatgcttgttacttttaactaatcagatctttttacagtatccatttattatgtaatgcttcttagaaaagaatcttatagtacatgttaatatatgcaaccaattaaaatgtataaattagtgtaagaaattcttggattatgtgtttaagtcctgtaatgcaggcctgtaaggtggagggttgaaccctgtttggattgcagagtgttactcagaattgggaaatccagctagcggcagtattctgtacagtagacacaagaattatgtacgccttttatcaaagacttaagagccaaaaagcttttcatctctccagggggaaaactgtctagttcccttctgtgtctaaattttccaaaacgttgatttgcataatacagtggtatgtgcaatggataaattgccgttatttcaaaaattaaaattctcattttctttcttttttttcccccctgctccacacttcaaaactcccgttagatcagcattctactacaagagtgaaaggaaaaccctaacagatctgtcctagtgattttacctttgttctagaaggcgctcctttcagggttgtggtattcttaggttagcggagctttttcctcttttccccacccatctccccaatattgcccattattaattaacctctttctttggttggaaccctggcagttctgctcccttcctaggatctgcccctgcattgtagcttgcttaacggagcacttctcctttttccaaaggtctacattctagggtgtgggctgagttcttctgtaaagagatgaacgcaatgccaataaaattgaacaagaacaatgat

SEQ ID NO: 316696 - DNA, 1329 bp, Homo sapiens
agcggacttccgctcggggcggcggcggtggcggaagtgggagcgggcctggagtcttggccataaagcctgaggcggcggcagcggcggagttggcggcttggagagctcgggagagttccctggaaccagaacttggaccttctcgcttctgtcctccgtttagtctcctcctcggcgggagccctcgcgacgcgcccggcccggagcccccagcgcagcggccgcgtttgaaggatgacctctaggaagaaagtgttgctgaaggttatcatcctgggagattctggagtcgggaagacatcactcatgaaccagtatgtgaataagaaattcagcaatcagtacaaagccacaataggagctgactttctgaccaaggaggtgatggtggatgacaggctagtcacaatgcagcttgggaaggctggtgccccatgccccattacaggctcacacccagtctgatcaggctgagttttgtatgtatctatctgttaatgcttgttacttttaactaatcagatctttttacagtatccatttattatgtaatgcttcttagaaaagaatcttatagtacatgttaatatatgcaaccaattaaaatgtataaattagtgtaagaaattcttggattatgtgtttaagtcctgtaatgcaggcctgtaaggtggagggttgaaccctgtttggattgcagagtgttactcagaattgggaaatccagctagcggcagtattctgtacagtagacacaagaattatgtacgccttttatcaaagacttaagagccaaaaagcttttcatctctccagggggaaaactgtctagttcccttctgtgtctaaattttccaaaacgttgatttgcataatacagtggtatgtgcaatggataaattgccgttatttcaaaaattaaaattctcattttctttcttttttttcccccctgctccacacttcaaaactcccgttagatcagcattctactacaagagtgaaaggaaaaccctaacagatctgtcctagtgattttacctttgttctagaaggcgctcctttcagggttgtggtattcttaggttagcggagctttttcctcttttccccacccatctccccaatattgcccattattaattaacctctttctttggttggaaccctggcagttctgctcccttcctaggatctgcccctgcattgtagcttgcttaacggagcacttctcctttttccaaaggtctacattctagggtgtgggctgagttcttctgtaaagagatgaacgcaatgccaataaaattgaacaagaacaatgat

SEQ ID NO: 316697 - DNA, 835 bp, Homo sapiens
aagcagtggtatcaacgcagagggcccattacggccgggttactatccatttattatgtaatgcttcttagaaaagaatcttatagtacatgttaatatatgcaaccaattaaaatgtataaattagtgtaagaaattcttggattatgtgtttaagtcctgtaatgcaggcctgtaaggtggagggttgaaccctgtttggattgcagagtgttactcagaattgggaaatccagctagcggcagtattctgtacagtagacacaagaattatgtacgccttttatcaaagacttaagagccaaaaagcttttcatctctccagggggaaaactgtctagttcccttctgtgtctaaattttccaaaacgttgatttgcataatacagtggtatgtgcaatggataaattgccgttatttcaaaaattaaaattctcattttctttcttttttttcccccctgctccacacttcaaaactcccgttagatcagcattctactacaagagtgaaaggaaaaccctaacagatctgtcctagtgattttacctttgttctagaaggcgctcctttcagggttgtggtattcttaggttagcggagctttttcctcttttccccacccatctccccaatattgcccattattaattaacctctttctttggttggaaccctggcagttctgctcccttcctaggatctgcccctgcattgtagcttgcttaacggagcacttctcctttttccaaaggtctacattctagggtgtgggctgagttcttctgtaaagagatgaacgcaatgccaataaaattgaacaagaacaatgat

SEQ ID NO: 316698 - DNA, 703 bp, Homo sapiens
agcggacttccgctcggggcggcggcggtggcggaagtgggagcgggcctggagtcttggccataaagcctgaggcggcggcagcggcggagttggcggcttggagagctcgggagagttccctggaaccagaacttggaccttctcgcttctgtcctccgtttagtctcctcctcggcgggagccctcgcgacgcgcccggcccggagcccccagcgcagcggccgcgtttgaaggatgacctctaggaagaaagtgttgctgaaggttatcatcctgggagattctggagtcgggaagacatcactcatgaaccagtatgtgaataagaaattcagcaatcagtacaaagccacaataggagctgactttctgaccaaggaggtgatggtggatgacaggctagtcacaatgcagatatgggacacagcaggacaggaacggttccagtctctcggtgtggccttctacagaggtgcagactgctgcgttctggtatttgatgtgactgcccccaacacattcaaaaccctagatagctggagagatgagtttctcatccaggccagtccccgagatcctgaaaacttcccatttgttgtgttgggaaacaagattgacctcgaaaacagacaagtggccacaaagcgggcacaggcctggtgctacagcaaaggccccaaaaggggaaccgagctcgaat

SEQ ID NO: 316699 - DNA, 1185 bp, Homo sapiens
agcggacttccgctcggggcggcggcggtggcggaagtgggagcgggcctggagtcttggccataaagcctgaggcggcggcagcggcggagttggcggcttggagagctcgggagagttccctggaaccagaacttggaccttctcgcttctgtcctccgtttagtctcctcctcggcgggagccctcgcgacgcgcccggcccggagcccccagcgcagcggccgcgtttgaaggatgacctctaggaagaaagtgttgctgaaggttatcatcctgggagattctggagtcgggaagacatcactcatgaaccagtatgtgaataagaaattcagcaatcagtacaaagccacaataggagctgactttctgaccaaggaggtgatggtggatgacaggctagtcacaatgcagggtaagcacatgtcttggctgtgctgaccaggccttgatagttcatttagtcttaatctttcctcatgcatagacattttccttccctgttcttcaaatcttattatcttatttgtagataattggctgatactcagttaaatttgaatttcagatcaatagtgaatacttttttagtatacttctagtgtatctcagatacgacttgctaagacacactaaaaaattcttcttaaaaaaaaactcagatttatcctttcttgttttttgttgtttttggttttgttgtttgctaaatttggcaacctgcaggtctctgtcttgtgcctctcttgacatccttgcccagtgctttaggtaaacatctttgtctcacctcagtagtgagacataaactttatttttctgacttcctatttcatacgtaacttcaagagttgtgtgtctattgagccaatcttttttttatgtatcagcttattaatctttcaagggttccctttcaacagttaggataagatacagattctttcatatgacttgttgaaaagccttcacattctggctataaactattattccctttttttcccccattgagtcattttgtttgtatacatgtattaacatccctagaaaagaaacccctgaaggatggataccttgagcccaggagtttgagcctgcagtgagctgtgactgctccattatactccagcctgggtgatggagtgagaccctgtctctaaattaaaaaaaaaaaaaaaa

SEQ ID NO: 316700 - DNA, 713 bp, Homo sapiens
gtaagcagcttttccacatctgccccacatctgtaccctatatttttacccagagagaaaacacaaaacttcaaaagtgtaatgctcggaaggctactggcattgccctttgctgtgagggcagtttcttgtccttcaggtcaggcagattcttttaaatgcttcaagtaattcgtgtcagtttcaggaccctcctatttgacttatacttatggtttttctccaatttcagagtcgggaagacatcactcatgaaccagtatgtgaataagaaattcagcaatcagtacaaagccacaataggagctgactttctgaccaaggaggtgatggtggatgacaggctagtcacaatgcagggtaagcacatgtcttggctgtgctgaccaggccttgatagttcatttagtcttaatctttcctcatgcatagacattttccttccctgttcttcaaatcttattatcttatttgtagataattggctgatactcagttaaatttgaatttcagatcaatagtgaatacttttttagtatacttctagtgtatctcagatacgacttgctaagacacactaaaaaattcttcttaaaaaaaaactcagatttatcctttcttgttttttgttgtttttggttttgttgtttgctaaatttggcaacctgcaggtctctgtcttgtgcctctcttgacatccttgcccagtgctt

SEQ ID NO: 316701 - DNA, 1269 bp, Homo sapiens
ccctgggatactcccctcccagggtgtctggtggcaggcctgtgcctatccctgctgtccccagggtgggccccgggggtcaggagctccagaagggccagctgggcatattctgagattggccatcagcccccatttctgctgcaaacctggtcagagccagtgttccctccatgggacctaaagacagtgccaagtgcctgcaccgtggaccacagccgagccactgggcagccggtgatggtcccacgcaggagcgctgtggaccccgctctctgggcagccctgtcctaggcctggacacctgcagagcctgggaccacgtggatgggcagatcctgggccagctgcggcccctgacagaggaggaagaggaggagggcgccggggccaccttgtccagggggcctgccttccccggcatgggctctgaggagttgcgtctggcctccttctatgactggccgctgactgctgaggtgccacccgagctgctggctgctgccggcttcttccacacaggccatcaggacaaggtgaggtgcttcttctgctatgggggcctgcagagctggaagcgcggggacgacccctggacggagcatgccaagtggttccccagctgtcagttcctgctccggtcaaaaggaagagactttgtccacagtgtgcaggagactcactcccagctgctgggctcctgggacccgtgggaagaaccggaagacgcagcccctgtggccccctccgtccctgcctctgggtaccctgagctgcccacacccaggagagaggtccagtctgaaagtgcccaggagccagaggagccagggatgtggaggcgcagctgcggcggctgcaggaggagaggacgtgcaaggtgtgcctggaccgcgccgtgtccatcgtctttgtgccgtgcggccacctggtctgtgctgagtgtgcccccggcctgcagctgtgccccatctgcagagcccccgtccgcagccgcgtgcgcaccttcctgtcctaggccaggtgccatggccggccaggtgggctgcagagtgggctccctgcccctctctgcctgttctggactgtgttctgggcctgctgaggatggcagagctggtgtccatccagcactgaccagccctgattccccgaccaccgcccagggtggagaaggaggcccttgcttggcgtgggggatggcttaactgtacctgtttggatgcttctgaatagaaataaagtgggttttccctggaggtacccagc

SEQ ID NO: 316702 - DNA, 1321 bp, Homo sapiens
ccctgggatactcccctcccagggtgtctggtggcaggcctgtgcctatccctgctgtccccagggtgggccccgggggtcaggagctccagaagggccagctgggcatattctgagattggccatcagcccccatttctgctgcaaacctggtcagagccagtgttccctccatgggacctaaagacagtgccaagtgcctgcaccgtggaccacagccgagccactgggcagccggtgatggtcccacgcaggagcgctgtggaccccgctctctgggcagccctgtcctaggcctggacacctgcagagcctgggaccacgtggatgggcagatcctgggccagctgcggcccctgacagaggaggaagaggaggagggcgccggggccaccttgtccagggggcctgccttccccggcatgggctctgaggagttgcgtctggcctccttctatgactggccgctgactgctgaggtgccacccgagctgctggctgctgccggcttcttccacacaggccatcaggacaaggtgaggtgcttcttctgctatgggggcctgcagagctggaagcgcggggacgacccctggacggagcatgccaagtggttccccagctgtcagttcctgctccggtcaaaaggaagagactttgtccacagtgtgcaggagactcactcccagctgctgggctcctgggacccgtgggaagaaccggaagacgcagcccctgtggccccctccgtccctgcctctgggtaccctgagctgcccacacccaggagagaggtccagtctgaaagtgcccaggagccaggaggggtcagtccagccgaggcccagagggcgtggtgggttcttgagcccccaggagccagggatgtggaggcgcagctgcggcggctgcaggaggagaggacgtgcaaggtgtgcctggaccgcgccgtgtccatcgtctttgtgccgtgcggccacctggtctgtgctgagtgtgcccccggcctgcagctgtgccccatctgcagagcccccgtccgcagccgcgtgcgcaccttcctgtcctaggccaggtgccatggccggccaggtgggctgcagagtgggctccctgcccctctctgcctgttctggactgtgttctgggcctgctgaggatggcagagctggtgtccatccagcactgaccagccctgattccccgaccaccgcccagggtggagaaggaggcccttgcttggcgtgggggatggcttaactgtacctgtttggatgcttctgaatagaaataaagtgggttttccctggaggtacccagc

SEQ ID NO: 316703 - DNA, 834 bp, Homo sapiens
tgcctctcccatgggactaccctgaagccccatggaggcgtctccacagcagccctcctcgcccatgcccacgggcactgcagggtggcgggaggagggggcccaaccctgacccccggggatccaagggcttgaagcagacagtgggggccctgaaccccaacctacatctctggggcatctgcagctgtcagttcctgctccggtcaaaaggaagagactttgtccacagtgtgcaggagactcactcccagctgctgggctcctgggacccgtgggaagaaccggaagacgcagcccctgtggccccctccgtccctgcctctgggtaccctgagctgcccacacccaggagagaggtccagtctgaaagtgcccaggagccagaggagccagggatgtggaggcgcagctgcggcggctgcaggaggagaggacgtgcaaggtgtgcctggaccgcgccgtgtccatcgtctttgtgccgtgcggccacctggtctgtgctgagtgtgcccccggcctgcagctgtgccccatctgcagagcccccgtccgcagccgcgtgcgcaccttcctgtcctaggccaggtgccatggccggccaggtgggctgcagagtgggctccctgcccctctctgcctgttctggactgtgttctgggcctgctgaggatggcagagctggtgtccatccagcactgaccagccctgattccccgaccaccgcccagggtggagaaggaggcccttgcttggcgtgggggatggcttaactgtacctgtttggatgcttctgaatagaaataaagtgggttttccctggaggtacccagc

SEQ ID NO: 316704 - DNA, 643 bp, Homo sapiens
attgtttatatctgtatttcctctttcattagagaaaaggtagtacatcttattcttcatggtgtctacaatatctggcagtttttggaagtcaagcgtgagcttagagcatagactggtgggattgtcaaagaagagggcaactggaagagaactgtcagttatttttggatcagtctttaattcatcatgacgggttaggcattagttgtatttcttgctaattttgaagaagacttattaacaaatcctacattaggtaaatggttttgaaagttgagttaatcataatggtgtttgacctaggactatttttaggccctatttatcttaatatcgaataatgaagcagcttcccccttagatatagacagaaaacatcaaagccaccacactacctggctggatttatcctagtaataaaatcaaaactgagctagttctctggctttcattgtaataattgtccttgtggttgtaaggaatctagatgaaaattacatggtctgttctacagccacagctgtacctacattcagaagacagacaaaagttgctgtgtttgaagagatccttcattaagggatcagacagagattactttgagacatattctaagtttaacttttctgcagggttgcca

SEQ ID NO: 316705 - DNA, 1850 bp, Homo sapiens
gcgcagtccagatgtcgtcagcaccagcgcctgggctggaggacagagaagccttttccgttgccggtgccggcctagcgtcctggaattacttcaatcaaaggagcgagaacccgagcagcgccatgagcaacactaccgtcgtccccagcactgcaggtccgggccccagcggcgggcccggtggcggaggtggtggtggcggcggaggcggcggcaccgaggtaatccaggtgactaatgtctccccgagcgctagctctgagcagatgcggactctcttcggtttcctaggcaagatcgacgaactgcgcctcttcccgccggatgattcgcctttgccagtctcatctcgtgtctgctttgttaagttccatgatccagactcagcagttgtggcacagcatctgacaaacactgtattcgttgacagagctttgatagtcgtaccatatgcagaaggtttgtgctttgtttaactacctatgtgggcatcctaagatgaccatctacctcagtagatgtagagtgagcattagtagcatgttaaatctaagctattaacatttttaaacccttgttatactgcagtccgtaatttttgcttgcagattttttttaattctaaaaattagaaattaggtctgttattataaggtatttaccttttgttttcttttaaaacatttttaagttgtttaaaaccatgtcccttattgtaactccctgagatacatctacttagttaatttaatgttaagttttatgaaaaagccctgaaggtaaatgattcactccatgtatgcttacagagccttcaaataaatgcatgatgttatttctgttttaaataaatgagtaggttgattttattttcttaaagcttcctcacattgataatctggaaaaaaaaaaaacacattgaatttcagtataccaagggttgcagtgattttggttttcgtgaaagttcaagatttcctgtagcttaggtgccaaatgggcactgggtgttttattttatgccagattttcttgttcattcttgctatatttctagaatatctctaaataataaattcttctctctgttatttgtgtgtgtgatttttatagtggagaaggcaaatgcaaaacccttccagatgcctgaaaaacagtgggtcctctgcagctacaggggattctagacattaactaaaggccagcaagcactcaagtgccccaagtgttttcctggtgtaaccatttgttaactacattttctctctttttacattttaggctgttaaagtaatttgacagaaaaaaatgagcaggttttttggatctaaaaagccactgtgacaagaaattttaataccattttgtaaaattttctaaggcgtattttataattagtttgttcccaatgtactgctacttgatttgcattttggtaactataaattttactcgaatcactgaaatatgataaaactgctggattttaagttaataatttaatatgctgaccaggatttaaatgctttcccctttccttaataaactggtcagtggaagtggaatcttaatattgttcattttagatgctatctgaaatctttgaaaacaaatgtgagcatttacaccataccttgtaaaagttgtgaaatgtctagtccttaacagagaagttgcctctggttttctaaagaaattaacttatatttataaatgggttaagacatgttatgtaatagtacctctgtctccatgatattaaagtgtatgagcccagttttaaggttttgtaatgtatagatagataaatttttgagttagtgtgttttggttaagcaatttctttt

SEQ ID NO: 316706 - DNA, 1982 bp, Homo sapiens
agtgtcgtggttggaggcgaggtggggcggccgtttgttttctcgtggtctcgagctcgcgcgctctcatcccctcccccgcggcgtgcggcggggcggagaaacggcggcggcggcggcggcatcggcagcagtagcagaggctgtagcatcggacaccctcctctctcccgcaatccggttcctcttccccctccttctcactgtttgttgtgtgtttgatgtgttaaagcaggagcgagaacccgagcagcgccatgagcaacactaccgtcgtccccagcactgcaggtccgggccccagcggcgggcccggtggcggaggtggtggtggcggcggaggcggcggcaccgaggtaatccaggtgactaatgtctccccgagcgctagctctgagcagatgcggactctcttcggtttcctaggcaagatcgacgaactgcgcctcttcccgccggatgattcgcctttgccagtctcatctcgtgtctgctttgttaagttccatgatccagactcagcagttgtggcacagcatctgacaaacactgtattcgttgacagagctttgatagtcgtaccatatgcagaaggtttgtgctttgtttaactacctatgtgggcatcctaagatgaccatctacctcagtagatgtagagtgagcattagtagcatgttaaatctaagctattaacatttttaaacccttgttatactgcagtccgtaatttttgcttgcagattttttttaattctaaaaattagaaattaggtctgttattataaggtatttaccttttgttttcttttaaaacatttttaagttgtttaaaaccatgtcccttattgtaactccctgagatacatctacttagttaatttaatgttaagttttatgaaaaagccctgaaggtaaatgattcactccatgtatgcttacagagccttcaaataaatgcatgatgttatttctgttttaaataaatgagtaggttgattttattttcttaaagcttcctcacattgataatctggaaaaaaaaaaaacacattgaatttcagtataccaagggttgcagtgattttggttttcgtgaaagttcaagatttcctgtagcttaggtgccaaatgggcactgggtgttttattttatgccagattttcttgttcattcttgctatatttctagaatatctctaaataataaattcttctctctgttatttgtgtgtgtgatttttatagtggagaaggcaaatgcaaaacccttccagatgcctgaaaaacagtgggtcctctgcagctacaggggattctagacattaactaaaggccagcaagcactcaagtgccccaagtgttttcctggtgtaaccatttgttaactacattttctctctttttacattttaggctgttaaagtaatttgacagaaaaaaatgagcaggttttttggatctaaaaagccactgtgacaagaaattttaataccattttgtaaaattttctaaggcgtattttataattagtttgttcccaatgtactgctacttgatttgcattttggtaactataaattttactcgaatcactgaaatatgataaaactgctggattttaagttaataatttaatatgctgaccaggatttaaatgctttcccctttccttaataaactggtcagtggaagtggaatcttaatattgttcattttagatgctatctgaaatctttgaaaacaaatgtgagcatttacaccataccttgtaaaagttgtgaaatgtctagtccttaacagagaagttgcctctggttttctaaagaaattaacttatatttataaatgggttaagacatgttatgtaatagtacctctgtctccatgatattaaagtgtatgagcccagttttaaggttttgtaatgtatagatagataaatttttgagttagtgtgttttggttaagcaatttctttt

SEQ ID NO: 316707 - DNA, 451 bp, Homo sapiens
accagagattttcctttgtttgaataatatacagatttgtgatatttcacagttgttcttgagaaggatttttataaatgttgaaatttgaattagagtgtatgactttttatcctttttgtctcacttttattttgaaaattatttctatcgcaagaatattaagtggatgaattgtaaagaaaaaatagttcaaagaagctaagaagtaagataaagtgtactactaaaacagacaattggaataataataatagtcttgtgctttttggaagacttattggtggagaagtgacaattcaaatgtcattatcagtaaatatcatatattgagaattttatgatgtcacttaaatactaaacaggaaattggaatcctctaagaatctactgttatggtacgtgtaaccattaactttctgctcaataaaataattgacaaaagttatca

SEQ ID NO: 316708 - DNA, 3158 bp, Homo sapiens
tggggaagctggagtgggaggctgggtaacatagtaagacccctcccatttctttaaggagaaattgcttaaacattctttttactactgcgggtgcaacattgttaaattttatagcagcagtgtttcacatctaaaaaccactgtattctttaagaaacattcaacagtaagcctgtataacaaggtggcttaacttgcttgtggatatcctgttaattttgctttgaacttgggttagggtctgtgtttagcctgagaggtccttgtagggaagcttgtatcagaagttctaatgggtttgagttctcaggccatatatagcatcatgttagtgtttgagttgtgataaaaattatggggttttttgttaggcctaaattaaaagaaattatttttcttttcaacaatgaatctgaaattcttagtataaccaaatctgatgcatttacaattttatgtacacattggtgtgtttcattttttagaaactgtgaagcctcattcagatagtattaaaatacaggattttccttttcattaatgagtcctatgatgtaagtgttatattgatgttaaaatgaagtagttttgtaccctgggtgcataaaattgtcagagagaattaaaggagaaagaactcaaacttcatcagagatcttgatttaattcatgtgaagagtgtggattacccccaacccccaaccccatgactctaatacacattagagtgtattaactagggatggtgtgtttatttctgccttagggcactagctttccaaataacttttggtatgggcttgagccatccctgtattcatgcacagagtttcaaggcagaaatttgagctaccctgtaacttaacagttgaaaaaaaccctgcttcctgtgttatctgtcttacttacactgccatagcttgcagtttagcacttgtctttcttttacctaaggaagtaatttgttgagggaactagcccttttgcttattgaaactttgcagggtggcactagtggaacgtagtactactcccatgtgtgcctacattttttcttttatctgaaagtgctccaagccagaaatccttgattatttacagtgcataagagttcttacatgctgtgggtaaaagagtgcagggcatggaacctgtttattttatgcagttcaagaaaactcattgattattgagtacatgttcgttctcatgatattcatttgtccctgatataaaaattgttcatctttcttactctgagaaagccattaggaagtttctaagccccaaactactgttacctgtatctaaaaatagctggtattggtattataaagaaactgttgacaattttgtggtcccctcagtctctgagacttcagtaccaaattgtttttaacctgatacactgtaaatataagttatgattataagtttttatctgaactgcaattcactacattatttcagtgaacagtatatgattgagaatgttttcttttgaatttaactacattagtatacagttaggtttttttaatctgttttacttttgaaatgtgttggtttgtgaattagcatttgttttaactgctattctgtttctcttttatgttatttgtttattttttagtgattcgcctttgccagtctcatctcgtgtctgctttgttaagttccatgatccagactcagcagttgtggcacagcatctgacaaacactgtattcgttgacagagctttgatagtcgtaccatatgcagaaggtttgtgctttgtttaactacctatgtgggcatcctaagatgaccatctacctcagtagatgtagagtgagcattagtagcatgttaaatctaagctattaacatttttaaacccttgttatactgcagtccgtaatttttgcttgcagattttttttaattctaaaaattagaaattaggtctgttattataaggtatttaccttttgttttcttttaaaacatttttaagttgtttaaaaccatgtcccttattgtaactccctgagatacatctacttagttaatttaatgttaagttttatgaaaaagccctgaaggtaaatgattcactccatgtatgcttacagagccttcaaataaatgcatgatgttatttctgttttaaataaatgagtaggttgattttattttcttaaagcttcctcacattgataatctggaaaaaaaaaaaacacattgaatttcagtataccaagggttgcagtgattttggttttcgtgaaagttcaagatttcctgtagcttaggtgccaaatgggcactgggtgttttattttatgccagattttcttgttcattcttgctatatttctagaatatctctaaataataaattcttctctctgttatttgtgtgtgtgatttttatagtggagaaggcaaatgcaaaacccttccagatgcctgaaaaacagtgggtcctctgcagctacaggggattctagacattaactaaaggccagcaagcactcaagtgccccaagtgttttcctggtgtaaccatttgttaactacattttctctctttttacattttaggctgttaaagtaatttgacagaaaaaaatgagcaggttttttggatctaaaaagccactgtgacaagaaattttaataccattttgtaaaattttctaaggcgtattttataattagtttgttcccaatgtactgctacttgatttgcattttggtaactataaattttactcgaatcactgaaatatgataaaactgctggattttaagttaataatttaatatgctgaccaggatttaaatgctttcccctttccttaataaactggtcagtggaagtggaatcttaatattgttcattttagatgctatctgaaatctttgaaaacaaatgtgagcatttacaccataccttgtaaaagttgtgaaatgtctagtccttaacagagaagttgcctctggttttctaaagaaattaacttatatttataaatgggttaagacatgttatgtaatagtacctctgtctccatgatattaaagtgtatgagcccagttttaaggttttgtaatgtatagatagataaatttttgagttagtgtgttttggttaagcaatttctttt

SEQ ID NO: 316709 - DNA, 3824 bp, Homo sapiens
gcgcagtccagatgtcgtcagcaccagcgcctgggctggaggacagagaagccttttccgttgccggtgccggcctagcgtcctggaattacttcaatcaaaggagcgagaacccgagcagcgccatgagcaacactaccgtcgtccccagcactgcaggtccgggccccagcggcgggcccggtggcggaggtggtggtggcggcggaggcggcggcaccgaggtaatccaggtgactaatgtctccccgagcgctagctctgagcagatgcggactctcttcggtttcctaggcaagatcgacgaactgcgcctcttcccgccggatgattcgcctttgccagtctcatctcgtgtctgctttgttaagttccatgatccagactcagcagttgtggcacagcatctgacaaacactgtattcgttgacagagctttgatagtcgtaccatatgcagaaggagttattcctgatgaagctaaagctttgtctctgttggcaccagctaatgcagtggcaggtcttctgcctggtggtggactcctgcctactcctaacccacttacccagattggcgctgttccactggctgctttgggggctcctactcttgatcctgcccttgctgcacttgggcttcctggagcaaacttgaactctcagtctcttgctgcagatcagttgctgaagcttatgagtactgttgatcccaagttgaatcatgtagctgctggtctcgtttcaccaagtctgaaatcggatacctctagtaaagaaatagaggaagctatgaaaagagtacgagaagcacagtccctaatttctgctgctatagaaccagataagaaagaagaaaaaagaaggcattcaagatcaagatcacgttctaggaggaggaggactccctcatcttctagacacaggcggtcaagaagcagatcgagacggcggtcacattctaagtctaggagtcggcgacgatccaaaagcccaaggcggagaagatctcattccagagaaagaggtagaaggtcaaggagcacatcaaaaacaagagacaaaaagaaagaagacaaagaaaagaaacgttctaaaacaccaccaaaaagttacagcacagccagacgttctagaagtgcaagcagagagagacgacgacgaagaagcaggagtggcacaagatctcctaaaaagcctcggtctcctaaaagaaaattgtcccgctcaccatcccctaggagacataaaaaggagaagaagaaagataaagacaaagaaagaagtagggatgaaagagaacgatcaacaagcaagaagaagaagagtaaagataaggaaaaggaccgggaaagaaaatcagagagtgataaagatgtaaaacaggttacacgggattatgatgaagaggaacaggggtatgacagtgagaaagagaaaaaagaagagaagaaaccaatagaaacaggttcccctaaaacaaaggaatgttctgtggaaaagggaactggtgattcactaagagaatccaaagtgaatggggatgatcatcatgaagaagacatggatatgagtgactgaatattgcctctgagggagtccaactgtatacctgcatcagtgtcattcctttgtgtgatttcttaatgctgtatttgttcatctcaaacctagatgtatacagctctgagttataaatggttataaagctcctgttactcatattagttatttacatcaaaaagcttttagaaaatggtacgaggtaaccaattcttgtcatggtgaaatctgattgagtaaccaagcagttttactattctggtgctgcttcataacaaaaatgaaaagctgcatgcatctacagcaggcatggattgtttatgtcgtatgatatcctttattaagtaagttcacttatagtatttctataatttgattcattgccgtaatagagccatgtaggaaatgcactgattgcatgttattgtggcaagaatatcctaaatgtcattaaaatcctccaacatgatggatctacttatggtcttgtttgttgacatgacaaattaacattcttatagttacatctggaaatgagcatttgaaatagataatcctttaagccttgtggcaaaatttttgtggcttttgtttaactttgaaaggttattatgcactaaccttttttggtggctaattagggtttaaatacagaaacaagatttcaaataaaactgtctttggcagtgagtaaatagcatattttgaagtagagttgtatactttttcataagatgtttgggaatttttttcctgaagtaataatttattccacatctacatcagtgaaagctatctacctatcctgagtctatcttaaaggaaaaaaagaaaaaaaccttatctcttgcccttattttgaattttccactctttcattaatttgttttaagctccgtgttggaaaaaaggggtagtgcattttaaattgaccttcatacgcttttaaaataagacaaatctacttgataatgtacctttatttgatctcaagttgtataaaaccaataaatttgtgttactgcagtagtaatcttatgcacacggtgatttcatgttatatatgcaaagtaggcaactgttttcttagttacagaagtttcaagcttcacttttgtgcagtagaaacaaaagtaggctacagtctgtgccatgttgatgtacagtttctgaaattgttttacaagactttgataataaaacccttaaacttatgttcatgttcctgtaaaaccgtatttgtatttatttacgctactgaatgtatgacatttacctcattcattttacaaattctttccctttctgtccacatatttcagtatagtaaaaagaggaagtctatcactgtagtgataattgccatcaaaattgtcaaaaatgatttaatttctatccaaaatagtccttttcttagcttagtatcattttattgcttatttttgtgtgggaatggggttggataaagcaatgaactttagtataaacaaatcccacctatatctagcaaatttatattttcggtgaaatacagatatttgcctttctggagtagtatagaagctgtcaatatgtatctactgtacagtactaaatagtattcatttatgaaatgagtagtgttgggtggctggggttaagggaaaatgagacttggaattgtagcttttatccaagtttgagtataaatagggtttgtttgttttttttaacctaaaaactgaaatgccatatagaaaaacagcattgtttttacagtttgtagtaagtaactttttaaagattttatcaaaaagaattttgtctatagtgagtaaaagaagttctaataatggtcctaatcactgcatttttaaaaaacaaagttcaacacaaatgacatttgttttaaactttagtagataaaaggtgaaccatgtgacatgggcatttttgtaagtcaaaaacaaatttcacatatggtaaacctaatattcacagtgtgttccctcacttgtaatctctgaatacaaatatactagcttttctaaagggaatcatttttttaaaagtagtgccactgacaagatgctacagtgaagattatccattcttaggatatttattttcagtgaacattttctgcacaaaggtagtgttgcactgggacacaagccttttaacagataaccagttgaaatcaaacactgcctccacaccgagttctgttgtgtatttgatagtaaattgatttaaaaataaaagtggtttttgttagaaaaa

SEQ ID NO: 316710 - DNA, 4466 bp, Homo sapiens
gcgcagtccagatgtcgtcagcaccagcgcctgggctggaggacagagaagccttttccgttgccggtgccggcctagcgtcctggaattacttcaatcaaaggagcgagaacccgagcagcgccatgagcaacactaccgtcgtccccagcactgcaggtccgggccccagcggcgggcccggtggcggaggtggtggtggcggcggaggcggcggcaccgaggtaatccaggtgactaatgtctccccgagcgctagctctgagcagatgcggactctcttcggtttcctaggcaagatcgacgaactgcgcctcttcccgccggatgattcgcctttgccagtctcatctcgtgtctgctttgttaagttccatgatccagactcagcagttgtggcacagcatctgacaaacactgtattcgttgacagagctttgatagtcgtaccatatgcagaaggagttattcctgatgaagctaaagctttgtctctgttggcaccagctaatgcagtggcaggtcttctgcctggtggtggactcctgcctactcctaacccacttacccagattggcgctgttccactggctgctttgggggctcctactcttgatcctgcccttgctgcacttgggcttcctggagcaaacttgaactctcagtctcttgctgcagatcagttgctgaagcttatgagtactgttgatcccaagttgaatcatgtagctgctggtctcgtttcaccaagtctgaaatcggatacctctagtaaagaaatagaggaagctatgaaaagagtacgagaagcacagtccctaatttctgctgctatagaaccagataagaaagaagaaaaaagaaggcattcaagatcaagatcacgttctaggaggaggaggactccctcatcttctagacacaggcggtcaagaagcagatcgagacggcggtcacattctaagtctaggagtcggcgacgatccaaaagcccaaggcggagaagatctcattccagagaaagaggtagaaggtcaaggagcacatcaaaaacaagagacaaaaagaaagaagacaaagaaaagaaacgttctaaaacaccaccaaaaagttacagcacagccagacgttctagaagtgcaagcagagagagacgacgacgaagaagcaggagtggcacaagatctcctaaaaagcctcggtctcctaaaagaaaattgtcccgctcaccatcccctaggagacataaaaaggagaagaagaaagataaagacaaagaaagaagtagggatgaaagagaacgatcaacaagcaagaagaagaagagtaaagataaggaaaaggaccgggaaagaaaatcagagagtgataaagatgtaaaacaggttacacgggattatgatgaagaggaacaggggtatgacagtgagaaagagaaaaaagaagagaagaaaccaatagaaacaggttcccctaaaacaaaggaatgttctgtggaaaagggaactggtgattcactaagagaatccaaagtgaatggggatgatcatcatgaagaagacatggatatgagtgactgaatattgcctctgagggagtccaactgtatacctgcatcagtgtcattcctttgtgtgatttcttaatgctgtatttgttcatctcaaacctagatgtatacagctctgagttataaatggttataaagctcctgttactcatattagttatttacatcaaaaagcttttagaaaatggtacgaggtaaccaattcttgtcatggtgaaatctgattgagtaaccaagcagttttactattctggtgctgcttcataacaaaaatgaaaagctgcatgcatctacagcaggcatggattgtttatgtcgtatgatatcctttattaagtaagttcacttatagtatttctataatttgattcattgccgtaatagagccatgtaggaaatgcactgattgcatgttattgtggcaagaatatcctaaatgtcattaaaatcctccaacatgatggatctacttatggtcttgtttgttgacatgacaaattaacattcttatagttacatctggaaatgagcatttgaaatagataatcctttaagccttgtggcaaaatttttgtggcttttgtttaactttgaaaggttattatgcactaaccttttttggtggctaattagggtttaaatacagaaacaagatttcaaataaaactgtctttggcagtgagtaaatagcatattttgaagtagagttgtatactttttcataagatgtttgggaatttttttcctgaagtaataatttattccacatctacatcagtgaaagctatctacctatcctgagtctatcttaaaggaaaaaaagaaaaaaaccttatctcttgcccttattttgaattttccactctttcattaatttgttttaagctccgtgttggaaaaaaggggtagtgcattttaaattgaccttcatacgcttttaaaataagacaaatctacttgataatgtacctttatttgatctcaagttgtataaaaccaataaatttgtgttactgcagtagtaatcttatgcacacggtgatttcatgttatatatgcaaagtaggcaactgttttcttagttacagaagtttcaagcttcacttttgtgcagtagaaacaaaagtaggctacagtctgtgccatgttgatgtacagtttctgaaattgttttacaagactttgataataaaacccttaaacttatgttcatgttcctgtaaaaccgtatttgtatttatttacgctactgaatgtatgacatttacctcattcattttacaaattctttccctttctgtccacatatttcagtatagtaaaaagaggaagtctatcactgtagtgataattgccatcaaaattgtcaaaaatgatttaatttctatccaaaatagtccttttcttagcttagtatcattttattgcttatttttgtgtgggaatggggttggataaagcaatgaactttagtataaacaaatcccacctatatctagcaaatttatattttcggtgaaatacagatatttgcctttctggagtagtatagaagctgtcaatatgtatctactgtacagtactaaatagtattcatttatgaaatgagtagtgttgggtggctggggttaagggaaaatgagacttggaattgtagcttttatccaagtttgagtataaatagggtttgtttgttttttttaacctaaaaactgaaatgccatatagaaaaacagcattgtttttacagtttgtagtaagtaactttttaaagattttatcaaaaagaattttgtctatagtgagtaaaagaagttctaataatggtcctaatcactgcatttttaaaaaacaaagttcaacacaaatgacatttgttttaaactttagtagataaaaggtgaaccatgtgacatgggcatttttgtaagtcaaaaacaaatttcacatatggtaaacctaatattcacagtgtgttccctcacttgtaatctctgaatacaaatatactagcttttctaaagggaatcatttttttaaaagtagtgccactgacaagatgctacagtgaagattatccattcttaggatatttattttcagtgaacattttctgcacaaaggtagtgttgcactgggacacaagccttttaacagataaccagttgaaatcaaacactgcctccacaccgagttctgttgtgtatttgatagtaaattgatttaaaaataaaagtggtttttgttagaaaaaaaaaaaaaaaaaaaaaaaaaaaaaaaaaaaaaaaaaaaaaaaaaaaaacaaaaaacaacgacgacaacaacaacgaagaggcgcccaccccatagagagcggacaccaaccaaggaggaggcaaccacaacaacagcaacccaccggcggagcccccacaagcgggcgcgccccctgcggacacccacagtaagacggacgagcagcgaaaaccgcacacagaccgatacaagcaacgaggagaacgagagcgccagaaaaaaaaatcagcgtcaacgcgagcagacccacttcaagtgacgcatacgcgcgcacaacacaagggtgggacagaccaaacacgactgtgggacaagcacaatgtcacgacgaatcacaggggggagttgcaggcgcctccagagagagagcaccgcctggtcacctaacgctggcgtgaagcacatacaaagtcaaggagcgcgcgcacatagatccacggtcggcgacaaaaagcgaggaagcaaggcgggcggcagcagaagagagaagcaaggcaaacagagagaggagagcaaataagacttactggagcaggcacaatgttatatagcaaatcaccgaaggacggagatcgtaagcagagcagactacacgagatgt

SEQ ID NO: 316711 - DNA, 3956 bp, Homo sapiens
agtgtcgtggttggaggcgaggtggggcggccgtttgttttctcgtggtctcgagctcgcgcgctctcatcccctcccccgcggcgtgcggcggggcggagaaacggcggcggcggcggcggcatcggcagcagtagcagaggctgtagcatcggacaccctcctctctcccgcaatccggttcctcttccccctccttctcactgtttgttgtgtgtttgatgtgttaaagcaggagcgagaacccgagcagcgccatgagcaacactaccgtcgtccccagcactgcaggtccgggccccagcggcgggcccggtggcggaggtggtggtggcggcggaggcggcggcaccgaggtaatccaggtgactaatgtctccccgagcgctagctctgagcagatgcggactctcttcggtttcctaggcaagatcgacgaactgcgcctcttcccgccggatgattcgcctttgccagtctcatctcgtgtctgctttgttaagttccatgatccagactcagcagttgtggcacagcatctgacaaacactgtattcgttgacagagctttgatagtcgtaccatatgcagaaggagttattcctgatgaagctaaagctttgtctctgttggcaccagctaatgcagtggcaggtcttctgcctggtggtggactcctgcctactcctaacccacttacccagattggcgctgttccactggctgctttgggggctcctactcttgatcctgcccttgctgcacttgggcttcctggagcaaacttgaactctcagtctcttgctgcagatcagttgctgaagcttatgagtactgttgatcccaagttgaatcatgtagctgctggtctcgtttcaccaagtctgaaatcggatacctctagtaaagaaatagaggaagctatgaaaagagtacgagaagcacagtccctaatttctgctgctatagaaccagataagaaagaagaaaaaagaaggcattcaagatcaagatcacgttctaggaggaggaggactccctcatcttctagacacaggcggtcaagaagcagatcgagacggcggtcacattctaagtctaggagtcggcgacgatccaaaagcccaaggcggagaagatctcattccagagaaagaggtagaaggtcaaggagcacatcaaaaacaagagacaaaaagaaagaagacaaagaaaagaaacgttctaaaacaccaccaaaaagttacagcacagccagacgttctagaagtgcaagcagagagagacgacgacgaagaagcaggagtggcacaagatctcctaaaaagcctcggtctcctaaaagaaaattgtcccgctcaccatcccctaggagacataaaaaggagaagaagaaagataaagacaaagaaagaagtagggatgaaagagaacgatcaacaagcaagaagaagaagagtaaagataaggaaaaggaccgggaaagaaaatcagagagtgataaagatgtaaaacaggttacacgggattatgatgaagaggaacaggggtatgacagtgagaaagagaaaaaagaagagaagaaaccaatagaaacaggttcccctaaaacaaaggaatgttctgtggaaaagggaactggtgattcactaagagaatccaaagtgaatggggatgatcatcatgaagaagacatggatatgagtgactgaatattgcctctgagggagtccaactgtatacctgcatcagtgtcattcctttgtgtgatttcttaatgctgtatttgttcatctcaaacctagatgtatacagctctgagttataaatggttataaagctcctgttactcatattagttatttacatcaaaaagcttttagaaaatggtacgaggtaaccaattcttgtcatggtgaaatctgattgagtaaccaagcagttttactattctggtgctgcttcataacaaaaatgaaaagctgcatgcatctacagcaggcatggattgtttatgtcgtatgatatcctttattaagtaagttcacttatagtatttctataatttgattcattgccgtaatagagccatgtaggaaatgcactgattgcatgttattgtggcaagaatatcctaaatgtcattaaaatcctccaacatgatggatctacttatggtcttgtttgttgacatgacaaattaacattcttatagttacatctggaaatgagcatttgaaatagataatcctttaagccttgtggcaaaatttttgtggcttttgtttaactttgaaaggttattatgcactaaccttttttggtggctaattagggtttaaatacagaaacaagatttcaaataaaactgtctttggcagtgagtaaatagcatattttgaagtagagttgtatactttttcataagatgtttgggaatttttttcctgaagtaataatttattccacatctacatcagtgaaagctatctacctatcctgagtctatcttaaaggaaaaaaagaaaaaaaccttatctcttgcccttattttgaattttccactctttcattaatttgttttaagctccgtgttggaaaaaaggggtagtgcattttaaattgaccttcatacgcttttaaaataagacaaatctacttgataatgtacctttatttgatctcaagttgtataaaaccaataaatttgtgttactgcagtagtaatcttatgcacacggtgatttcatgttatatatgcaaagtaggcaactgttttcttagttacagaagtttcaagcttcacttttgtgcagtagaaacaaaagtaggctacagtctgtgccatgttgatgtacagtttctgaaattgttttacaagactttgataataaaacccttaaacttatgttcatgttcctgtaaaaccgtatttgtatttatttacgctactgaatgtatgacatttacctcattcattttacaaattctttccctttctgtccacatatttcagtatagtaaaaagaggaagtctatcactgtagtgataattgccatcaaaattgtcaaaaatgatttaatttctatccaaaatagtccttttcttagcttagtatcattttattgcttatttttgtgtgggaatggggttggataaagcaatgaactttagtataaacaaatcccacctatatctagcaaatttatattttcggtgaaatacagatatttgcctttctggagtagtatagaagctgtcaatatgtatctactgtacagtactaaatagtattcatttatgaaatgagtagtgttgggtggctggggttaagggaaaatgagacttggaattgtagcttttatccaagtttgagtataaatagggtttgtttgttttttttaacctaaaaactgaaatgccatatagaaaaacagcattgtttttacagtttgtagtaagtaactttttaaagattttatcaaaaagaattttgtctatagtgagtaaaagaagttctaataatggtcctaatcactgcatttttaaaaaacaaagttcaacacaaatgacatttgttttaaactttagtagataaaaggtgaaccatgtgacatgggcatttttgtaagtcaaaaacaaatttcacatatggtaaacctaatattcacagtgtgttccctcacttgtaatctctgaatacaaatatactagcttttctaaagggaatcatttttttaaaagtagtgccactgacaagatgctacagtgaagattatccattcttaggatatttattttcagtgaacattttctgcacaaaggtagtgttgcactgggacacaagccttttaacagataaccagttgaaatcaaacactgcctccacaccgagttctgttgtgtatttgatagtaaattgatttaaaaataaaagtggtttttgttagaaaaa

SEQ ID NO: 316712 - DNA, 5130 bp, Homo sapiens
agtgtcgtggttggaggcgaggtggggcggccgtttgttttctcgtggtctcgagctcgcgcgctctcatcccctcccccgcggcgtgcggcggggcggagaaacggcggcggcggcggcggcatcggcagcagtagcagaggctgtagcatcggacaccctcctctctcccgcaatccggttcctcttccccctccttctcactgtttgttgtgtgtttgatgtgttaaagcaggagcgagaacccgagcagcgccatgagcaacactaccgtcgtccccagcactgcaggtccgggccccagcggcgggcccggtggcggaggtggtggtggcggcggaggcggcggcaccgaggtaatccaggtgactaatgtctccccgagcgctagctctgagcagatgcggactctcttcggtttcctaggcaagatcgacgaactgcgcctcttcccgccggatgattcgcctttgccagtctcatctcgtgtctgctttgttaagttccatgatccagactcagcagttgtggcacagcatctgacaaacactgtattcgttgacagagctttgatagtcgtaccatatgcagaaggttcttttccctggttcagcctgaactatataccaggccctgctgaaaataccacccaacagttttcttctgcagcttatccagtttctcttaagtgccctgtacatattgtatgttttatgatgagatgcagtttcttaatatgtattacagaaatactactggtatttgcaaatatgtagtttaattgtattattgaactctcattttgggggcttgggcacattaacagattaatccatctgtatagggcttttgctgttggatagaatttaaattgtctacataaatatttgttttaggacccttagattttatctgaatacacagattaggctttaaaaacagatatatatgtcatttttggcttaaggagtttggctaagttagcttttcaactggcactgtatggcagcattttttggtatggttagcatggcacatggcgaaacataaagcattttactgtacaggtaaggaatgtgccatgttgttttacctatctctctttctctctcactcccatgcacacatcctgtgtgtattcagagaccttcagaaacattcatattcattttcatgagtcagcaaaagccctacgcttgattccaacagaatatttcctttacatactttcttctcttaatttttacaaaatttgtatggtaggtgtaaaagaaaatcatagtaactgtaccatattattaacccctaaatcaaactttttttgtcttgtgtatcttgatttttctgtgtgctttatagtgaagcagccgacacgagtcgttgttcataaaacagcttttgaaagttgagagcacacccctggagaaccgactgtgcttgcttacgtttggttcatgacttaaaaatcgagtacaggtgatgaaatcttggcagtgttaacaaaaaagtagtgtgtattgtgctatttttttttactctagaaacttaaccatttgtagagaaaaaggaaacaaattttcacacattgaagttcattctgacataaaattaatgataaataatcatagaaatcaagctttgtattttagcgaacataagtactttcaacaaactcaggtggtgtatcagggagacattttctgggtgtttttgtgtgttttctgtcttagaaaagaatgtgttctaatgcaaggatgtttctctgcaggagttattcctgatgaagctaaagctttgtctctgttggcaccagctaatgcagtggcaggtcttctgcctggtggtggactcctgcctactcctaacccacttacccagattggcgctgttccactggctgctttgggggctcctactcttgatcctgcccttgctgcacttgggcttcctggagcaaacttgaactctcagtctcttgctgcagatcagttgctgaagcttatgagtactgttgatcccaagttgaatcatgtagctgctggtctcgtttcaccaagtctgaaatcggatacctctagtaaagaaatagaggaagctatgaaaagagtacgagaagcacagtccctaatttctgctgctatagaaccagataagaaagaagaaaaaagaaggcattcaagatcaagatcacgttctaggaggaggaggactccctcatcttctagacacaggcggtcaagaagcagatcgagacggcggtcacattctaagtctaggagtcggcgacgatccaaaagcccaaggcggagaagatctcattccagagaaagaggtagaaggtcaaggagcacatcaaaaacaagagacaaaaagaaagaagacaaagaaaagaaacgttctaaaacaccaccaaaaagttacagcacagccagacgttctagaagtgcaagcagagagagacgacgacgaagaagcaggagtggcacaagatctcctaaaaagcctcggtctcctaaaagaaaattgtcccgctcaccatcccctaggagacataaaaaggagaagaagaaagataaagacaaagaaagaagtagggatgaaagagaacgatcaacaagcaagaagaagaagagtaaagataaggaaaaggaccgggaaagaaaatcagagagtgataaagatgtaaaacaggttacacgggattatgatgaagaggaacaggggtatgacagtgagaaagagaaaaaagaagagaagaaaccaatagaaacaggttcccctaaaacaaaggaatgttctgtggaaaagggaactggtgattcactaagagaatccaaagtgaatggggatgatcatcatgaagaagacatggatatgagtgactgaatattgcctctgagggagtccaactgtatacctgcatcagtgtcattcctttgtgtgatttcttaatgctgtatttgttcatctcaaacctagatgtatacagctctgagttataaatggttataaagctcctgttactcatattagttatttacatcaaaaagcttttagaaaatggtacgaggtaaccaattcttgtcatggtgaaatctgattgagtaaccaagcagttttactattctggtgctgcttcataacaaaaatgaaaagctgcatgcatctacagcaggcatggattgtttatgtcgtatgatatcctttattaagtaagttcacttatagtatttctataatttgattcattgccgtaatagagccatgtaggaaatgcactgattgcatgttattgtggcaagaatatcctaaatgtcattaaaatcctccaacatgatggatctacttatggtcttgtttgttgacatgacaaattaacattcttatagttacatctggaaatgagcatttgaaatagataatcctttaagccttgtggcaaaatttttgtggcttttgtttaactttgaaaggttattatgcactaaccttttttggtggctaattagggtttaaatacagaaacaagatttcaaataaaactgtctttggcagtgagtaaatagcatattttgaagtagagttgtatactttttcataagatgtttgggaatttttttcctgaagtaataatttattccacatctacatcagtgaaagctatctacctatcctgagtctatcttaaaggaaaaaaagaaaaaaaccttatctcttgcccttattttgaattttccactctttcattaatttgttttaagctccgtgttggaaaaaaggggtagtgcattttaaattgaccttcatacgcttttaaaataagacaaatctacttgataatgtacctttatttgatctcaagttgtataaaaccaataaatttgtgttactgcagtagtaatcttatgcacacggtgatttcatgttatatatgcaaagtaggcaactgttttcttagttacagaagtttcaagcttcacttttgtgcagtagaaacaaaagtaggctacagtctgtgccatgttgatgtacagtttctgaaattgttttacaagactttgataataaaacccttaaacttatgttcatgttcctgtaaaaccgtatttgtatttatttacgctactgaatgtatgacatttacctcattcattttacaaattctttccctttctgtccacatatttcagtatagtaaaaagaggaagtctatcactgtagtgataattgccatcaaaattgtcaaaaatgatttaatttctatccaaaatagtccttttcttagcttagtatcattttattgcttatttttgtgtgggaatggggttggataaagcaatgaactttagtataaacaaatcccacctatatctagcaaatttatattttcggtgaaatacagatatttgcctttctggagtagtatagaagctgtcaatatgtatctactgtacagtactaaatagtattcatttatgaaatgagtagtgttgggtggctggggttaagggaaaatgagacttggaattgtagcttttatccaagtttgagtataaatagggtttgtttgttttttttaacctaaaaactgaaatgccatatagaaaaacagcattgtttttacagtttgtagtaagtaactttttaaagattttatcaaaaagaattttgtctatagtgagtaaaagaagttctaataatggtcctaatcactgcatttttaaaaaacaaagttcaacacaaatgacatttgttttaaactttagtagataaaaggtgaaccatgtgacatgggcatttttgtaagtcaaaaacaaatttcacatatggtaaacctaatattcacagtgtgttccctcacttgtaatctctgaatacaaatatactagcttttctaaagggaatcatttttttaaaagtagtgccactgacaagatgctacagtgaagattatccattcttaggatatttattttcagtgaacattttctgcacaaaggtagtgttgcactgggacacaagccttttaacagataaccagttgaaatcaaacactgcctccacaccgagttctgttgtgtatttgatagtaaattgatttaaaaataaaagtggtttttgttagaaaaa

SEQ ID NO: 316713 - DNA, 5039 bp, Homo sapiens
agcggactgagaggaagagaccgggaaggcggagcgcggccgccagcaccgctcgagtccgccgaccgcctcctctctcccgcaatccggttcctcttccccctccttctcactgtttgttgtgtgtttgatgtgttaaagcaggagcgagaacccgagcagcgccatgagcaacactaccgtcgtccccagcactgcaggtccgggccccagcggcgggcccggtggcggaggtggtggtggcggcggaggcggcggcaccgaggtaatccaggtgactaatgtctccccgagcgctagctctgagcagatgcggactctcttcggtttcctaggcaagatcgacgaactgcgcctcttcccgccggatgattcgcctttgccagtctcatctcgtgtctgctttgttaagttccatgatccagactcagcagttgtggcacagcatctgacaaacactgtattcgttgacagagctttgatagtcgtaccatatgcagaaggttcttttccctggttcagcctgaactatataccaggccctgctgaaaataccacccaacagttttcttctgcagcttatccagtttctcttaagtgccctgtacatattgtatgttttatgatgagatgcagtttcttaatatgtattacagaaatactactggtatttgcaaatatgtagtttaattgtattattgaactctcattttgggggcttgggcacattaacagattaatccatctgtatagggcttttgctgttggatagaatttaaattgtctacataaatatttgttttaggacccttagattttatctgaatacacagattaggctttaaaaacagatatatatgtcatttttggcttaaggagtttggctaagttagcttttcaactggcactgtatggcagcattttttggtatggttagcatggcacatggcgaaacataaagcattttactgtacaggtaaggaatgtgccatgttgttttacctatctctctttctctctcactcccatgcacacatcctgtgtgtattcagagaccttcagaaacattcatattcattttcatgagtcagcaaaagccctacgcttgattccaacagaatatttcctttacatactttcttctcttaatttttacaaaatttgtatggtaggtgtaaaagaaaatcatagtaactgtaccatattattaacccctaaatcaaactttttttgtcttgtgtatcttgatttttctgtgtgctttatagtgaagcagccgacacgagtcgttgttcataaaacagcttttgaaagttgagagcacacccctggagaaccgactgtgcttgcttacgtttggttcatgacttaaaaatcgagtacaggtgatgaaatcttggcagtgttaacaaaaaagtagtgtgtattgtgctatttttttttactctagaaacttaaccatttgtagagaaaaaggaaacaaattttcacacattgaagttcattctgacataaaattaatgataaataatcatagaaatcaagctttgtattttagcgaacataagtactttcaacaaactcaggtggtgtatcagggagacattttctgggtgtttttgtgtgttttctgtcttagaaaagaatgtgttctaatgcaaggatgtttctctgcaggagttattcctgatgaagctaaagctttgtctctgttggcaccagctaatgcagtggcaggtcttctgcctggtggtggactcctgcctactcctaacccacttacccagattggcgctgttccactggctgctttgggggctcctactcttgatcctgcccttgctgcacttgggcttcctggagcaaacttgaactctcagtctcttgctgcagatcagttgctgaagcttatgagtactgttgatcccaagttgaatcatgtagctgctggtctcgtttcaccaagtctgaaatcggatacctctagtaaagaaatagaggaagctatgaaaagagtacgagaagcacagtccctaatttctgctgctatagaaccagataagaaagaagaaaaaagaaggcattcaagatcaagatcacgttctaggaggaggaggactccctcatcttctagacacaggcggtcaagaagcagatcgagacggcggtcacattctaagtctaggagtcggcgacgatccaaaagcccaaggcggagaagatctcattccagagaaagaggtagaaggtcaaggagcacatcaaaaacaagagacaaaaagaaagaagacaaagaaaagaaacgttctaaaacaccaccaaaaagttacagcacagccagacgttctagaagtgcaagcagagagagacgacgacgaagaagcaggagtggcacaagatctcctaaaaagcctcggtctcctaaaagaaaattgtcccgctcaccatcccctaggagacataaaaaggagaagaagaaagataaagacaaagaaagaagtagggatgaaagagaacgatcaacaagcaagaagaagaagagtaaagataaggaaaaggaccgggaaagaaaatcagagagtgataaagatgtaaaacaggttacacgggattatgatgaagaggaacaggggtatgacagtgagaaagagaaaaaagaagagaagaaaccaatagaaacaggttcccctaaaacaaaggaatgttctgtggaaaagggaactggtgattcactaagagaatccaaagtgaatggggatgatcatcatgaagaagacatggatatgagtgactgaatattgcctctgagggagtccaactgtatacctgcatcagtgtcattcctttgtgtgatttcttaatgctgtatttgttcatctcaaacctagatgtatacagctctgagttataaatggttataaagctcctgttactcatattagttatttacatcaaaaagcttttagaaaatggtacgaggtaaccaattcttgtcatggtgaaatctgattgagtaaccaagcagttttactattctggtgctgcttcataacaaaaatgaaaagctgcatgcatctacagcaggcatggattgtttatgtcgtatgatatcctttattaagtaagttcacttatagtatttctataatttgattcattgccgtaatagagccatgtaggaaatgcactgattgcatgttattgtggcaagaatatcctaaatgtcattaaaatcctccaacatgatggatctacttatggtcttgtttgttgacatgacaaattaacattcttatagttacatctggaaatgagcatttgaaatagataatcctttaagccttgtggcaaaatttttgtggcttttgtttaactttgaaaggttattatgcactaaccttttttggtggctaattagggtttaaatacagaaacaagatttcaaataaaactgtctttggcagtgagtaaatagcatattttgaagtagagttgtatactttttcataagatgtttgggaatttttttcctgaagtaataatttattccacatctacatcagtgaaagctatctacctatcctgagtctatcttaaaggaaaaaaagaaaaaaaccttatctcttgcccttattttgaattttccactctttcattaatttgttttaagctccgtgttggaaaaaaggggtagtgcattttaaattgaccttcatacgcttttaaaataagacaaatctacttgataatgtacctttatttgatctcaagttgtataaaaccaataaatttgtgttactgcagtagtaatcttatgcacacggtgatttcatgttatatatgcaaagtaggcaactgttttcttagttacagaagtttcaagcttcacttttgtgcagtagaaacaaaagtaggctacagtctgtgccatgttgatgtacagtttctgaaattgttttacaagactttgataataaaacccttaaacttatgttcatgttcctgtaaaaccgtatttgtatttatttacgctactgaatgtatgacatttacctcattcattttacaaattctttccctttctgtccacatatttcagtatagtaaaaagaggaagtctatcactgtagtgataattgccatcaaaattgtcaaaaatgatttaatttctatccaaaatagtccttttcttagcttagtatcattttattgcttatttttgtgtgggaatggggttggataaagcaatgaactttagtataaacaaatcccacctatatctagcaaatttatattttcggtgaaatacagatatttgcctttctggagtagtatagaagctgtcaatatgtatctactgtacagtactaaatagtattcatttatgaaatgagtagtgttgggtggctggggttaagggaaaatgagacttggaattgtagcttttatccaagtttgagtataaatagggtttgtttgttttttttaacctaaaaactgaaatgccatatagaaaaacagcattgtttttacagtttgtagtaagtaactttttaaagattttatcaaaaagaattttgtctatagtgagtaaaagaagttctaataatggtcctaatcactgcatttttaaaaaacaaagttcaacacaaatgacatttgttttaaactttagtagataaaaggtgaaccatgtgacatgggcatttttgtaagtcaaaaacaaatttcacatatggtaaacctaatattcacagtgtgttccctcacttgtaatctctgaatacaaatatactagcttttctaaagggaatcatttttttaaaagtagtgccactgacaagatgctacagtgaagattatccattcttaggatatttattttcagtgaacattttctgcacaaaggtagtgttgcactgggacacaagccttttaacagataaccagttgaaatcaaacactgcctccacaccgagttctgttgtgtatttgatagtaaattgatttaaaaataaaagtggtttttgttagaaaaa

SEQ ID NO: 316714 - DNA, 4838 bp, Homo sapiens
agtgtcgtggttggaggcgaggtggggcggccgtttgttttctcgtggtctcgagctcgcgcgctctcatcccctcccccgcggcgtgcggcggggcggagaaacggcggcggcggcggcggcatcggcagcagtagcagaggctgtagcatcggacaccctcctctctcccgcaatccggttcctcttccccctccttctcactgtttgttgtgtgtttgatgtgttaaagcaggagcgagaacccgagcagcgccatgagcaacactaccgtcgtccccagcactgcaggtccgggccccagcggcgggcccggtggcggaggtggtggtggcggcggaggcggcggcaccgaggtaatccaggtgactaatgtctccccgagcgctagctctgagcagatgcggactctcttcggtttcctaggcaagatcgacgaactgcgcctcttcccgccggatgattcgcctttgccagtctcatctcgtgtctgctttgttaagttccatgatccagactcagcagttgtggcacagcatctgacaaacactgtattcgttgacagagctttgatagtcgtaccatatgcagaaggttcttttccctggttcagcctgaactatataccaggccctgctgaaaataccacccaacagttttcttctgcagcttatccagtttctcttaagtgccctgtacatattgtatgttttatgatgagatgcagtttcttaatatgtattacagaaatactactggtatttgcaaatatgtagtttaattgtattattgaactctcattttgggggcttgggcacattaacagattaatccatctgtatagggcttttgctgttggatagaatttaaattgtctacataaatatttgttttaggacccttagattttatctgaatacacagattaggctttaaaaacagatatatatgtcatttttggcttaaggagtttggctaagttagcttttcaactggcactgtatggcagcattttttggtatggttagcatggcacatggcgaaacataaagcattttactgtacaggtaaggaatgtgccatgttgttttacctatctctctttctctctcactcccatgcacacatcctgtgtgtattcagagaccttcagaaacattcatattcattttcatgagtcagcaaaagccctacgcttgattccaacagaatatttcctttacatactttcttctcttaatttttacaaaatttgtatggtaggtgtaaaagaaaatcatagtaactgtaccatattattaacccctaaatcaaactttttttgtcttgtgtatcttgatttttctgtgtgctttatagtgaagcagccgacacgagtcgttgttcataaaacagcttttgaaagttgagagcacacccctggagaaccgactgtgcttgcttacgtttggttcatgacttaaaaatcgagtacaggagttattcctgatgaagctaaagctttgtctctgttggcaccagctaatgcagtggcaggtcttctgcctggtggtggactcctgcctactcctaacccacttacccagattggcgctgttccactggctgctttgggggctcctactcttgatcctgcccttgctgcacttgggcttcctggagcaaacttgaactctcagtctcttgctgcagatcagttgctgaagcttatgagtactgttgatcccaagttgaatcatgtagctgctggtctcgtttcaccaagtctgaaatcggatacctctagtaaagaaatagaggaagctatgaaaagagtacgagaagcacagtccctaatttctgctgctatagaaccagataagaaagaagaaaaaagaaggcattcaagatcaagatcacgttctaggaggaggaggactccctcatcttctagacacaggcggtcaagaagcagatcgagacggcggtcacattctaagtctaggagtcggcgacgatccaaaagcccaaggcggagaagatctcattccagagaaagaggtagaaggtcaaggagcacatcaaaaacaagagacaaaaagaaagaagacaaagaaaagaaacgttctaaaacaccaccaaaaagttacagcacagccagacgttctagaagtgcaagcagagagagacgacgacgaagaagcaggagtggcacaagatctcctaaaaagcctcggtctcctaaaagaaaattgtcccgctcaccatcccctaggagacataaaaaggagaagaagaaagataaagacaaagaaagaagtagggatgaaagagaacgatcaacaagcaagaagaagaagagtaaagataaggaaaaggaccgggaaagaaaatcagagagtgataaagatgtaaaacaggttacacgggattatgatgaagaggaacaggggtatgacagtgagaaagagaaaaaagaagagaagaaaccaatagaaacaggttcccctaaaacaaaggaatgttctgtggaaaagggaactggtgattcactaagagaatccaaagtgaatggggatgatcatcatgaagaagacatggatatgagtgactgaatattgcctctgagggagtccaactgtatacctgcatcagtgtcattcctttgtgtgatttcttaatgctgtatttgttcatctcaaacctagatgtatacagctctgagttataaatggttataaagctcctgttactcatattagttatttacatcaaaaagcttttagaaaatggtacgaggtaaccaattcttgtcatggtgaaatctgattgagtaaccaagcagttttactattctggtgctgcttcataacaaaaatgaaaagctgcatgcatctacagcaggcatggattgtttatgtcgtatgatatcctttattaagtaagttcacttatagtatttctataatttgattcattgccgtaatagagccatgtaggaaatgcactgattgcatgttattgtggcaagaatatcctaaatgtcattaaaatcctccaacatgatggatctacttatggtcttgtttgttgacatgacaaattaacattcttatagttacatctggaaatgagcatttgaaatagataatcctttaagccttgtggcaaaatttttgtggcttttgtttaactttgaaaggttattatgcactaaccttttttggtggctaattagggtttaaatacagaaacaagatttcaaataaaactgtctttggcagtgagtaaatagcatattttgaagtagagttgtatactttttcataagatgtttgggaatttttttcctgaagtaataatttattccacatctacatcagtgaaagctatctacctatcctgagtctatcttaaaggaaaaaaagaaaaaaaccttatctcttgcccttattttgaattttccactctttcattaatttgttttaagctccgtgttggaaaaaaggggtagtgcattttaaattgaccttcatacgcttttaaaataagacaaatctacttgataatgtacctttatttgatctcaagttgtataaaaccaataaatttgtgttactgcagtagtaatcttatgcacacggtgatttcatgttatatatgcaaagtaggcaactgttttcttagttacagaagtttcaagcttcacttttgtgcagtagaaacaaaagtaggctacagtctgtgccatgttgatgtacagtttctgaaattgttttacaagactttgataataaaacccttaaacttatgttcatgttcctgtaaaaccgtatttgtatttatttacgctactgaatgtatgacatttacctcattcattttacaaattctttccctttctgtccacatatttcagtatagtaaaaagaggaagtctatcactgtagtgataattgccatcaaaattgtcaaaaatgatttaatttctatccaaaatagtccttttcttagcttagtatcattttattgcttatttttgtgtgggaatggggttggataaagcaatgaactttagtataaacaaatcccacctatatctagcaaatttatattttcggtgaaatacagatatttgcctttctggagtagtatagaagctgtcaatatgtatctactgtacagtactaaatagtattcatttatgaaatgagtagtgttgggtggctggggttaagggaaaatgagacttggaattgtagcttttatccaagtttgagtataaatagggtttgtttgttttttttaacctaaaaactgaaatgccatatagaaaaacagcattgtttttacagtttgtagtaagtaactttttaaagattttatcaaaaagaattttgtctatagtgagtaaaagaagttctaataatggtcctaatcactgcatttttaaaaaacaaagttcaacacaaatgacatttgttttaaactttagtagataaaaggtgaaccatgtgacatgggcatttttgtaagtcaaaaacaaatttcacatatggtaaacctaatattcacagtgtgttccctcacttgtaatctctgaatacaaatatactagcttttctaaagggaatcatttttttaaaagtagtgccactgacaagatgctacagtgaagattatccattcttaggatatttattttcagtgaacattttctgcacaaaggtagtgttgcactgggacacaagccttttaacagataaccagttgaaatcaaacactgcctccacaccgagttctgttgtgtatttgatagtaaattgatttaaaaataaaagtggtttttgttagaaaaa

SEQ ID NO: 316715 - DNA, 3989 bp, Homo sapiens
agtgtcgtggttggaggcgaggtggggcggccgtttgttttctcgtggtctcgagctcgcgcgctctcatcccctcccccgcggcgtgcggcggggcggagaaacggcggcggcggcggcggcatcggcagcagtagcagaggctgtagcatcggacaccctcctctctcccgcaatccggttcctcttccccctccttctcactgtttgttgtgtgtttgatgtgttaaagcaggagcgagaacccgagcagcgccatgagcaacactaccgtcgtccccagcactgcaggtccgggccccagcggcgggcccggtggcggaggtggtggtggcggcggaggcggcggcaccgaggtaatccaggtgactaatgtctccccgagcgctagctctgagcagatgcggactctcttcggtttcctaggcaagatcgacgaactgcgcctcttcccgccggagaaattggaatcctctaagaatctactgttatgtgattcgcctttgccagtctcatctcgtgtctgctttgttaagttccatgatccagactcagcagttgtggcacagcatctgacaaacactgtattcgttgacagagctttgatagtcgtaccatatgcagaaggagttattcctgatgaagctaaagctttgtctctgttggcaccagctaatgcagtggcaggtcttctgcctggtggtggactcctgcctactcctaacccacttacccagattggcgctgttccactggctgctttgggggctcctactcttgatcctgcccttgctgcacttgggcttcctggagcaaacttgaactctcagtctcttgctgcagatcagttgctgaagcttatgagtactgttgatcccaagttgaatcatgtagctgctggtctcgtttcaccaagtctgaaatcggatacctctagtaaagaaatagaggaagctatgaaaagagtacgagaagcacagtccctaatttctgctgctatagaaccagataagaaagaagaaaaaagaaggcattcaagatcaagatcacgttctaggaggaggaggactccctcatcttctagacacaggcggtcaagaagcagatcgagacggcggtcacattctaagtctaggagtcggcgacgatccaaaagcccaaggcggagaagatctcattccagagaaagaggtagaaggtcaaggagcacatcaaaaacaagagacaaaaagaaagaagacaaagaaaagaaacgttctaaaacaccaccaaaaagttacagcacagccagacgttctagaagtgcaagcagagagagacgacgacgaagaagcaggagtggcacaagatctcctaaaaagcctcggtctcctaaaagaaaattgtcccgctcaccatcccctaggagacataaaaaggagaagaagaaagataaagacaaagaaagaagtagggatgaaagagaacgatcaacaagcaagaagaagaagagtaaagataaggaaaaggaccgggaaagaaaatcagagagtgataaagatgtaaaacaggttacacgggattatgatgaagaggaacaggggtatgacagtgagaaagagaaaaaagaagagaagaaaccaatagaaacaggttcccctaaaacaaaggaatgttctgtggaaaagggaactggtgattcactaagagaatccaaagtgaatggggatgatcatcatgaagaagacatggatatgagtgactgaatattgcctctgagggagtccaactgtatacctgcatcagtgtcattcctttgtgtgatttcttaatgctgtatttgttcatctcaaacctagatgtatacagctctgagttataaatggttataaagctcctgttactcatattagttatttacatcaaaaagcttttagaaaatggtacgaggtaaccaattcttgtcatggtgaaatctgattgagtaaccaagcagttttactattctggtgctgcttcataacaaaaatgaaaagctgcatgcatctacagcaggcatggattgtttatgtcgtatgatatcctttattaagtaagttcacttatagtatttctataatttgattcattgccgtaatagagccatgtaggaaatgcactgattgcatgttattgtggcaagaatatcctaaatgtcattaaaatcctccaacatgatggatctacttatggtcttgtttgttgacatgacaaattaacattcttatagttacatctggaaatgagcatttgaaatagataatcctttaagccttgtggcaaaatttttgtggcttttgtttaactttgaaaggttattatgcactaaccttttttggtggctaattagggtttaaatacagaaacaagatttcaaataaaactgtctttggcagtgagtaaatagcatattttgaagtagagttgtatactttttcataagatgtttgggaatttttttcctgaagtaataatttattccacatctacatcagtgaaagctatctacctatcctgagtctatcttaaaggaaaaaaagaaaaaaaccttatctcttgcccttattttgaattttccactctttcattaatttgttttaagctccgtgttggaaaaaaggggtagtgcattttaaattgaccttcatacgcttttaaaataagacaaatctacttgataatgtacctttatttgatctcaagttgtataaaaccaataaatttgtgttactgcagtagtaatcttatgcacacggtgatttcatgttatatatgcaaagtaggcaactgttttcttagttacagaagtttcaagcttcacttttgtgcagtagaaacaaaagtaggctacagtctgtgccatgttgatgtacagtttctgaaattgttttacaagactttgataataaaacccttaaacttatgttcatgttcctgtaaaaccgtatttgtatttatttacgctactgaatgtatgacatttacctcattcattttacaaattctttccctttctgtccacatatttcagtatagtaaaaagaggaagtctatcactgtagtgataattgccatcaaaattgtcaaaaatgatttaatttctatccaaaatagtccttttcttagcttagtatcattttattgcttatttttgtgtgggaatggggttggataaagcaatgaactttagtataaacaaatcccacctatatctagcaaatttatattttcggtgaaatacagatatttgcctttctggagtagtatagaagctgtcaatatgtatctactgtacagtactaaatagtattcatttatgaaatgagtagtgttgggtggctggggttaagggaaaatgagacttggaattgtagcttttatccaagtttgagtataaatagggtttgtttgttttttttaacctaaaaactgaaatgccatatagaaaaacagcattgtttttacagtttgtagtaagtaactttttaaagattttatcaaaaagaattttgtctatagtgagtaaaagaagttctaataatggtcctaatcactgcatttttaaaaaacaaagttcaacacaaatgacatttgttttaaactttagtagataaaaggtgaaccatgtgacatgggcatttttgtaagtcaaaaacaaatttcacatatggtaaacctaatattcacagtgtgttccctcacttgtaatctctgaatacaaatatactagcttttctaaagggaatcatttttttaaaagtagtgccactgacaagatgctacagtgaagattatccattcttaggatatttattttcagtgaacattttctgcacaaaggtagtgttgcactgggacacaagccttttaacagataaccagttgaaatcaaacactgcctccacaccgagttctgttgtgtatttgatagtaaattgatttaaaaataaaagtggtttttgttagaaaaa

SEQ ID NO: 316716 - DNA, 3597 bp, Homo sapiens
gcgcagtccagatgtcgtcagcaccagcgcctgggctggaggacagagaagccttttccgttgccggtgccggcctagcgtcctggaattacttcaatcaatgattcgcctttgccagtctcatctcgtgtctgctttgttaagttccatgatccagactcagcagttgtggcacagcatctgacaaacactgtattcgttgacagagctttgatagtcgtaccatatgcagaaggagttattcctgatgaagctaaagctttgtctctgttggcaccagctaatgcagtggcaggtcttctgcctggtggtggactcctgcctactcctaacccacttacccagattggcgctgttccactggctgctttgggggctcctactcttgatcctgcccttgctgcacttgggcttcctggagcaaacttgaactctcagtctcttgctgcagatcagttgctgaagcttatgagtactgttgatcccaagttgaatcatgtagctgctggtctcgtttcaccaagtctgaaatcggatacctctagtaaagaaatagaggaagctatgaaaagagtacgagaagcacagtccctaatttctgctgctatagaaccagataagaaagaagaaaaaagaaggcattcaagatcaagatcacgttctaggaggaggaggactccctcatcttctagacacaggcggtcaagaagcagatcgagacggcggtcacattctaagtctaggagtcggcgacgatccaaaagcccaaggcggagaagatctcattccagagaaagaggtagaaggtcaaggagcacatcaaaaacaagagacaaaaagaaagaagacaaagaaaagaaacgttctaaaacaccaccaaaaagttacagcacagccagacgttctagaagtgcaagcagagagagacgacgacgaagaagcaggagtggcacaagatctcctaaaaagcctcggtctcctaaaagaaaattgtcccgctcaccatcccctaggagacataaaaaggagaagaagaaagataaagacaaagaaagaagtagggatgaaagagaacgatcaacaagcaagaagaagaagagtaaagataaggaaaaggaccgggaaagaaaatcagagagtgataaagatgtaaaacaggttacacgggattatgatgaagaggaacaggggtatgacagtgagaaagagaaaaaagaagagaagaaaccaatagaaacaggttcccctaaaacaaaggaatgttctgtggaaaagggaactggtgattcactaagagaatccaaagtgaatggggatgatcatcatgaagaagacatggatatgagtgactgaatattgcctctgagggagtccaactgtatacctgcatcagtgtcattcctttgtgtgatttcttaatgctgtatttgttcatctcaaacctagatgtatacagctctgagttataaatggttataaagctcctgttactcatattagttatttacatcaaaaagcttttagaaaatggtacgaggtaaccaattcttgtcatggtgaaatctgattgagtaaccaagcagttttactattctggtgctgcttcataacaaaaatgaaaagctgcatgcatctacagcaggcatggattgtttatgtcgtatgatatcctttattaagtaagttcacttatagtatttctataatttgattcattgccgtaatagagccatgtaggaaatgcactgattgcatgttattgtggcaagaatatcctaaatgtcattaaaatcctccaacatgatggatctacttatggtcttgtttgttgacatgacaaattaacattcttatagttacatctggaaatgagcatttgaaatagataatcctttaagccttgtggcaaaatttttgtggcttttgtttaactttgaaaggttattatgcactaaccttttttggtggctaattagggtttaaatacagaaacaagatttcaaataaaactgtctttggcagtgagtaaatagcatattttgaagtagagttgtatactttttcataagatgtttgggaatttttttcctgaagtaataatttattccacatctacatcagtgaaagctatctacctatcctgagtctatcttaaaggaaaaaaagaaaaaaaccttatctcttgcccttattttgaattttccactctttcattaatttgttttaagctccgtgttggaaaaaaggggtagtgcattttaaattgaccttcatacgcttttaaaataagacaaatctacttgataatgtacctttatttgatctcaagttgtataaaaccaataaatttgtgttactgcagtagtaatcttatgcacacggtgatttcatgttatatatgcaaagtaggcaactgttttcttagttacagaagtttcaagcttcacttttgtgcagtagaaacaaaagtaggctacagtctgtgccatgttgatgtacagtttctgaaattgttttacaagactttgataataaaacccttaaacttatgttcatgttcctgtaaaaccgtatttgtatttatttacgctactgaatgtatgacatttacctcattcattttacaaattctttccctttctgtccacatatttcagtatagtaaaaagaggaagtctatcactgtagtgataattgccatcaaaattgtcaaaaatgatttaatttctatccaaaatagtccttttcttagcttagtatcattttattgcttatttttgtgtgggaatggggttggataaagcaatgaactttagtataaacaaatcccacctatatctagcaaatttatattttcggtgaaatacagatatttgcctttctggagtagtatagaagctgtcaatatgtatctactgtacagtactaaatagtattcatttatgaaatgagtagtgttgggtggctggggttaagggaaaatgagacttggaattgtagcttttatccaagtttgagtataaatagggtttgtttgttttttttaacctaaaaactgaaatgccatatagaaaaacagcattgtttttacagtttgtagtaagtaactttttaaagattttatcaaaaagaattttgtctatagtgagtaaaagaagttctaataatggtcctaatcactgcatttttaaaaaacaaagttcaacacaaatgacatttgttttaaactttagtagataaaaggtgaaccatgtgacatgggcatttttgtaagtcaaaaacaaatttcacatatggtaaacctaatattcacagtgtgttccctcacttgtaatctctgaatacaaatatactagcttttctaaagggaatcatttttttaaaagtagtgccactgacaagatgctacagtgaagattatccattcttaggatatttattttcagtgaacattttctgcacaaaggtagtgttgcactgggacacaagccttttaacagataaccagttgaaatcaaacactgcctccacaccgagttctgttgtgtatttgatagtaaattgatttaaaaataaaagtggtttttgttagaaaaa

SEQ ID NO: 316717 - DNA, 3894 bp, Homo sapiens
accagagattttcctttgtttgaataatatacagatttgtgatatttcacagttgttcttgagaaggatttttataaatgttgaaatttgaattagagtgtatgactttttatcctttttgtctcacttttattttgaaaattatttctatcgcaagaatattaagtggatgaattgtaaagaaaaaatagttcaaagaagctaagaagtaagataaagtgtactactaaaacagacaattggaataataataatagtcttgtgctttttggaagacttattggtggagaagtgacaattcaaatgtcattatcagtaaatatcatatattgagaattttatgatgtcacttaaatactaaacaggaaattggaatcctctaagaatctactgttatgtgattcgcctttgccagtctcatctcgtgtctgctttgttaagttccatgatccagactcagcagttgtggcacagcatctgacaaacactgtattcgttgacagagctttgatagtcgtaccatatgcagaaggagttattcctgatgaagctaaagctttgtctctgttggcaccagctaatgcagtggcaggtcttctgcctggtggtggactcctgcctactcctaacccacttacccagattggcgctgttccactggctgctttgggggctcctactcttgatcctgcccttgctgcacttgggcttcctggagcaaacttgaactctcagtctcttgctgcagatcagttgctgaagcttatgagtactgttgatcccaagttgaatcatgtagctgctggtctcgtttcaccaagtctgaaatcggatacctctagtaaagaaatagaggaagctatgaaaagagtacgagaagcacagtccctaatttctgctgctatagaaccagataagaaagaagaaaaaagaaggcattcaagatcaagatcacgttctaggaggaggaggactccctcatcttctagacacaggcggtcaagaagcagatcgagacggcggtcacattctaagtctaggagtcggcgacgatccaaaagcccaaggcggagaagatctcattccagagaaagaggtagaaggtcaaggagcacatcaaaaacaagagacaaaaagaaagaagacaaagaaaagaaacgttctaaaacaccaccaaaaagttacagcacagccagacgttctagaagtgcaagcagagagagacgacgacgaagaagcaggagtggcacaagatctcctaaaaagcctcggtctcctaaaagaaaattgtcccgctcaccatcccctaggagacataaaaaggagaagaagaaagataaagacaaagaaagaagtagggatgaaagagaacgatcaacaagcaagaagaagaagagtaaagataaggaaaaggaccgggaaagaaaatcagagagtgataaagatgtaaaacaggttacacgggattatgatgaagaggaacaggggtatgacagtgagaaagagaaaaaagaagagaagaaaccaatagaaacaggttcccctaaaacaaaggaatgttctgtggaaaagggaactggtgattcactaagagaatccaaagtgaatggggatgatcatcatgaagaagacatggatatgagtgactgaatattgcctctgagggagtccaactgtatacctgcatcagtgtcattcctttgtgtgatttcttaatgctgtatttgttcatctcaaacctagatgtatacagctctgagttataaatggttataaagctcctgttactcatattagttatttacatcaaaaagcttttagaaaatggtacgaggtaaccaattcttgtcatggtgaaatctgattgagtaaccaagcagttttactattctggtgctgcttcataacaaaaatgaaaagctgcatgcatctacagcaggcatggattgtttatgtcgtatgatatcctttattaagtaagttcacttatagtatttctataatttgattcattgccgtaatagagccatgtaggaaatgcactgattgcatgttattgtggcaagaatatcctaaatgtcattaaaatcctccaacatgatggatctacttatggtcttgtttgttgacatgacaaattaacattcttatagttacatctggaaatgagcatttgaaatagataatcctttaagccttgtggcaaaatttttgtggcttttgtttaactttgaaaggttattatgcactaaccttttttggtggctaattagggtttaaatacagaaacaagatttcaaataaaactgtctttggcagtgagtaaatagcatattttgaagtagagttgtatactttttcataagatgtttgggaatttttttcctgaagtaataatttattccacatctacatcagtgaaagctatctacctatcctgagtctatcttaaaggaaaaaaagaaaaaaaccttatctcttgcccttattttgaattttccactctttcattaatttgttttaagctccgtgttggaaaaaaggggtagtgcattttaaattgaccttcatacgcttttaaaataagacaaatctacttgataatgtacctttatttgatctcaagttgtataaaaccaataaatttgtgttactgcagtagtaatcttatgcacacggtgatttcatgttatatatgcaaagtaggcaactgttttcttagttacagaagtttcaagcttcacttttgtgcagtagaaacaaaagtaggctacagtctgtgccatgttgatgtacagtttctgaaattgttttacaagactttgataataaaacccttaaacttatgttcatgttcctgtaaaaccgtatttgtatttatttacgctactgaatgtatgacatttacctcattcattttacaaattctttccctttctgtccacatatttcagtatagtaaaaagaggaagtctatcactgtagtgataattgccatcaaaattgtcaaaaatgatttaatttctatccaaaatagtccttttcttagcttagtatcattttattgcttatttttgtgtgggaatggggttggataaagcaatgaactttagtataaacaaatcccacctatatctagcaaatttatattttcggtgaaatacagatatttgcctttctggagtagtatagaagctgtcaatatgtatctactgtacagtactaaatagtattcatttatgaaatgagtagtgttgggtggctggggttaagggaaaatgagacttggaattgtagcttttatccaagtttgagtataaatagggtttgtttgttttttttaacctaaaaactgaaatgccatatagaaaaacagcattgtttttacagtttgtagtaagtaactttttaaagattttatcaaaaagaattttgtctatagtgagtaaaagaagttctaataatggtcctaatcactgcatttttaaaaaacaaagttcaacacaaatgacatttgttttaaactttagtagataaaaggtgaaccatgtgacatgggcatttttgtaagtcaaaaacaaatttcacatatggtaaacctaatattcacagtgtgttccctcacttgtaatctctgaatacaaatatactagcttttctaaagggaatcatttttttaaaagtagtgccactgacaagatgctacagtgaagattatccattcttaggatatttattttcagtgaacattttctgcacaaaggtagtgttgcactgggacacaagccttttaacagataaccagttgaaatcaaacactgcctccacaccgagttctgttgtgtatttgatagtaaattgatttaaaaataaaagtggtttttgttagaaaaa

SEQ ID NO: 316718 - DNA, 3977 bp, Homo sapiens
agtgtcgtggttggaggcgaggtggggcggccgtttgttttctcgtggtctcgagctcgcgcgctctcatcccctcccccgcggcgtgcggcggggcggagaaacggcggcggcggcggcggcatcggcagcagtagcagaggctgtagcatcggacaccctcctctctcccgcaatccggttcctcttccccctccttctcactgtttgttgtgtgtttgatgtgttaaagcaggagcgagaacccgagcagcgccatgagcaacactaccgtcgtccccagcactgcaggtccgggccccagcggcgggcccggtggcggaggtggtggtggcggcggaggcggcggcaccgaggtaatccaggtgactaatgtctccccgagcgctagctctgagcagatgcggactctcttcggtttcctaggcaagatcgacgaactgcgcctcttcccgccggatgattcgcctttgccagtctcatctcgtgtctgctttgttaagttccatgatccagactcagcagttgtggcacagcatctgacaaacactgtattcgttgacagagctttgatagtcgtaccatatgcagaaggagttattcctgatgaagctaaagctttgtctctgttggcaccagctaatgcagtggcaggtcttctgcctggtggtggactcctgcctactcctaacccacttacccagattggcgctgttccactggctgctttgggggctcctactcttgatcctgcccttgctgcacttgggcttcctggagcaaacttgaactctcagtctcttgctgcagatcagttgctgaagcttatgagtactgttgatcccaagttgaatcatgtagctgctggtctcgtttcaccaagtctgaaatcggatacctctagtaaagaaatagaggaagctatgaaaagagtacgagaagcacagtccctaatttctgctgctatagaaccagataagaaagaagaaaaaagaaggcattcaagatcaagatcacgttctaggaggaggaggactccctcatcttctagacacaggcggtcaagaagcagatcgagacggcggtcacattctaagtctaggagtcggcgacgatccaaaagcccaaggcggagaagatctcattccagagaaagaggtagaaggtcaaggagcacatcaaaaacaagagacaaaaagaaagaagacaaagaaaagaaacgttctaaaacaccaccaaaaagttacagcacagccagacgttctagaagtgcaagcagtttgcacatttgtgattctagagagagacgacgacgaagaagcaggagtggcacaagatctcctaaaaagcctcggtctcctaaaagaaaattgtcccgctcaccatcccctaggagacataaaaaggagaagaagaaagataaagacaaagaaagaagtagggatgaaagagaacgatcaacaagcaagaagaagaagagtaaagataaggaaaaggaccgggaaagaaaatcagagagtgataaagatgtaaaacaggttacacgggattatgatgaagaggaacaggggtatgacagtgagaaagagaaaaaagaagagaagaaaccaatagaaacaggttcccctaaaacaaaggaatgttctgtggaaaagggaactggtgattcactaagagaatccaaagtgaatggggatgatcatcatgaagaagacatggatatgagtgactgaatattgcctctgagggagtccaactgtatacctgcatcagtgtcattcctttgtgtgatttcttaatgctgtatttgttcatctcaaacctagatgtatacagctctgagttataaatggttataaagctcctgttactcatattagttatttacatcaaaaagcttttagaaaatggtacgaggtaaccaattcttgtcatggtgaaatctgattgagtaaccaagcagttttactattctggtgctgcttcataacaaaaatgaaaagctgcatgcatctacagcaggcatggattgtttatgtcgtatgatatcctttattaagtaagttcacttatagtatttctataatttgattcattgccgtaatagagccatgtaggaaatgcactgattgcatgttattgtggcaagaatatcctaaatgtcattaaaatcctccaacatgatggatctacttatggtcttgtttgttgacatgacaaattaacattcttatagttacatctggaaatgagcatttgaaatagataatcctttaagccttgtggcaaaatttttgtggcttttgtttaactttgaaaggttattatgcactaaccttttttggtggctaattagggtttaaatacagaaacaagatttcaaataaaactgtctttggcagtgagtaaatagcatattttgaagtagagttgtatactttttcataagatgtttgggaatttttttcctgaagtaataatttattccacatctacatcagtgaaagctatctacctatcctgagtctatcttaaaggaaaaaaagaaaaaaaccttatctcttgcccttattttgaattttccactctttcattaatttgttttaagctccgtgttggaaaaaaggggtagtgcattttaaattgaccttcatacgcttttaaaataagacaaatctacttgataatgtacctttatttgatctcaagttgtataaaaccaataaatttgtgttactgcagtagtaatcttatgcacacggtgatttcatgttatatatgcaaagtaggcaactgttttcttagttacagaagtttcaagcttcacttttgtgcagtagaaacaaaagtaggctacagtctgtgccatgttgatgtacagtttctgaaattgttttacaagactttgataataaaacccttaaacttatgttcatgttcctgtaaaaccgtatttgtatttatttacgctactgaatgtatgacatttacctcattcattttacaaattctttccctttctgtccacatatttcagtatagtaaaaagaggaagtctatcactgtagtgataattgccatcaaaattgtcaaaaatgatttaatttctatccaaaatagtccttttcttagcttagtatcattttattgcttatttttgtgtgggaatggggttggataaagcaatgaactttagtataaacaaatcccacctatatctagcaaatttatattttcggtgaaatacagatatttgcctttctggagtagtatagaagctgtcaatatgtatctactgtacagtactaaatagtattcatttatgaaatgagtagtgttgggtggctggggttaagggaaaatgagacttggaattgtagcttttatccaagtttgagtataaatagggtttgtttgttttttttaacctaaaaactgaaatgccatatagaaaaacagcattgtttttacagtttgtagtaagtaactttttaaagattttatcaaaaagaattttgtctatagtgagtaaaagaagttctaataatggtcctaatcactgcatttttaaaaaacaaagttcaacacaaatgacatttgttttaaactttagtagataaaaggtgaaccatgtgacatgggcatttttgtaagtcaaaaacaaatttcacatatggtaaacctaatattcacagtgtgttccctcacttgtaatctctgaatacaaatatactagcttttctaaagggaatcatttttttaaaagtagtgccactgacaagatgctacagtgaagattatccattcttaggatatttattttcagtgaacattttctgcacaaaggtagtgttgcactgggacacaagccttttaacagataaccagttgaaatcaaacactgcctccacaccgagttctgttgtgtatttgatagtaaattgatttaaaaataaaagtggtttttgttagaaaaa

SEQ ID NO: 316719 - DNA, 3989 bp, Homo sapiens
agtgtcgtggttggaggcgaggtggggcggccgtttgttttctcgtggtctcgagctcgcgcgctctcatcccctcccccgcggcgtgcggcggggcggagaaacggcggcggcggcggcggcatcggcagcagtagcagaggctgtagcatcggacaccctcctctctcccgcaatccggttcctcttccccctccttctcactgtttgttgtgtgtttgatgtgttaaagcaggagcgagaacccgagcagcgccatgagcaacactaccgtcgtccccagcactgcaggtccgggccccagcggcgggcccggtggcggaggtggtggtggcggcggaggcggcggcaccgaggtaatccaggtgactaatgtctccccgagcgctagctctgagcagatgcggactctcttcggtttcctaggcaagatcgacgaactgcgcctcttcccgccggatgattcgcctttgccagtctcatctcgtgtctgctttgttaagttccatgatccagactcagcagttgtggcacagcatctgacaaacactgtattcgttgacagagctttgatagtcgtaccatatgcagaaggagttattcctgatgaagctaaagctttgtctctgttggcaccagctaatgcagtggcaggtcttctgcctggtggtggactcctgcctactcctaacccacttacccagattggcgctgttccactggctgctttgggggctcctactcttgatcctgcccttgctgcacttgggcttcctggagcaaacttgaactctcagtctcttgctgcagatcagttgctgaagcttatgagtactgttgatcccaagttgaatcatgtagctgctggtctcgtttcaccaagtctgaaatcggatacctctagtaaagaaatagaggaagctatgaaaagagtacgagaagcacagtccctaatttctgctgctatagaaccagataagaaagaagaaaaaagaaggcattcaagatcaagatcacgttctaggaggaggaggactccctcatcttctagacacaggcggtcaagaagcagatcgagacggcggtcacattctaagtctaggagtcggcgacgatccaaaagcccaaggcggagaagatctcattccagagaaagaggtagaaggtcaaggagcacatcaaaaacaagagacaaaaagaaagaagacaaagaaaagaaacgttctaaaacaccaccaaaaagttacagcacagccagacgttctagaagtgcaagcagagtatatttgaagtaacatggaattcaagagagagagagacgacgacgaagaagcaggagtggcacaagatctcctaaaaagcctcggtctcctaaaagaaaattgtcccgctcaccatcccctaggagacataaaaaggagaagaagaaagataaagacaaagaaagaagtagggatgaaagagaacgatcaacaagcaagaagaagaagagtaaagataaggaaaaggaccgggaaagaaaatcagagagtgataaagatgtaaaacaggttacacgggattatgatgaagaggaacaggggtatgacagtgagaaagagaaaaaagaagagaagaaaccaatagaaacaggttcccctaaaacaaaggaatgttctgtggaaaagggaactggtgattcactaagagaatccaaagtgaatggggatgatcatcatgaagaagacatggatatgagtgactgaatattgcctctgagggagtccaactgtatacctgcatcagtgtcattcctttgtgtgatttcttaatgctgtatttgttcatctcaaacctagatgtatacagctctgagttataaatggttataaagctcctgttactcatattagttatttacatcaaaaagcttttagaaaatggtacgaggtaaccaattcttgtcatggtgaaatctgattgagtaaccaagcagttttactattctggtgctgcttcataacaaaaatgaaaagctgcatgcatctacagcaggcatggattgtttatgtcgtatgatatcctttattaagtaagttcacttatagtatttctataatttgattcattgccgtaatagagccatgtaggaaatgcactgattgcatgttattgtggcaagaatatcctaaatgtcattaaaatcctccaacatgatggatctacttatggtcttgtttgttgacatgacaaattaacattcttatagttacatctggaaatgagcatttgaaatagataatcctttaagccttgtggcaaaatttttgtggcttttgtttaactttgaaaggttattatgcactaaccttttttggtggctaattagggtttaaatacagaaacaagatttcaaataaaactgtctttggcagtgagtaaatagcatattttgaagtagagttgtatactttttcataagatgtttgggaatttttttcctgaagtaataatttattccacatctacatcagtgaaagctatctacctatcctgagtctatcttaaaggaaaaaaagaaaaaaaccttatctcttgcccttattttgaattttccactctttcattaatttgttttaagctccgtgttggaaaaaaggggtagtgcattttaaattgaccttcatacgcttttaaaataagacaaatctacttgataatgtacctttatttgatctcaagttgtataaaaccaataaatttgtgttactgcagtagtaatcttatgcacacggtgatttcatgttatatatgcaaagtaggcaactgttttcttagttacagaagtttcaagcttcacttttgtgcagtagaaacaaaagtaggctacagtctgtgccatgttgatgtacagtttctgaaattgttttacaagactttgataataaaacccttaaacttatgttcatgttcctgtaaaaccgtatttgtatttatttacgctactgaatgtatgacatttacctcattcattttacaaattctttccctttctgtccacatatttcagtatagtaaaaagaggaagtctatcactgtagtgataattgccatcaaaattgtcaaaaatgatttaatttctatccaaaatagtccttttcttagcttagtatcattttattgcttatttttgtgtgggaatggggttggataaagcaatgaactttagtataaacaaatcccacctatatctagcaaatttatattttcggtgaaatacagatatttgcctttctggagtagtatagaagctgtcaatatgtatctactgtacagtactaaatagtattcatttatgaaatgagtagtgttgggtggctggggttaagggaaaatgagacttggaattgtagcttttatccaagtttgagtataaatagggtttgtttgttttttttaacctaaaaactgaaatgccatatagaaaaacagcattgtttttacagtttgtagtaagtaactttttaaagattttatcaaaaagaattttgtctatagtgagtaaaagaagttctaataatggtcctaatcactgcatttttaaaaaacaaagttcaacacaaatgacatttgttttaaactttagtagataaaaggtgaaccatgtgacatgggcatttttgtaagtcaaaaacaaatttcacatatggtaaacctaatattcacagtgtgttccctcacttgtaatctctgaatacaaatatactagcttttctaaagggaatcatttttttaaaagtagtgccactgacaagatgctacagtgaagattatccattcttaggatatttattttcagtgaacattttctgcacaaaggtagtgttgcactgggacacaagccttttaacagataaccagttgaaatcaaacactgcctccacaccgagttctgttgtgtatttgatagtaaattgatttaaaaataaaagtggtttttgttagaaaaa

SEQ ID NO: 316720 - DNA, 3906 bp, Homo sapiens
agtgtcgtggttggaggcgaggtggggcggccgtttgttttctcgtggtctcgagctcgcgcgctctcatcccctcccccgcggcgtgcggcggggcggagaaacggcggcggcggcggcggcatcggcagcagtagcagaggctgtagcatcggacaccctcctctctcccgcaatccggttcctcttccccctccttctcactgtttgttgtgtgtttgatgtgttaaagcaggagcgagaacccgagcagcgccatgagcaacactaccgtcgtccccagcactgcaggtccgggccccagcggcgggcccggtggcggaggtggtggtggcggcggaggcggcggcaccgaggtaatccaggtgactaatgtctccccgagcgctagctctgagcagatgcggactctcttcggtttcctaggcaagatcgacgaactgcgcctcttcccgccggatgattcgcctttgccagtctcatctcgtgtctgctttgttaagttccatgatccagactcagcagttgtggcacagcatctgacaaacactgtattcgttgacagagctttgatagtcgtaccatatgcagaaggagttattcctgatgaagctaaagctttgtctctgttggcaccagctaatgcagtggcaggtcttctgcctggtggtggactcctgcctactcctaacccacttacccagattggcgctgttccactggctgctttgggggctcctactcttgatcctgcccttgctgcacttgggcttcctggagcaaacttgaactctcagtctcttgctgcagatcagttgctgaagcttatgagtactgttgatcccaagttgaatcatgtagctgctggtctcgtttcaccaagtctgaaatcggatacctctagtaaagaaatagaggaagctatgaaaagagtacgagaagcacagtccctaatttctgctgctatagaaccagataagaaagaagaaaaaagaaggcattcaagatcaagatcacgttctaggaggaggaggactccctcatcttctagacacaggcggtcaagaagcagatcgagacggcggtcacattctaagtctaggagtcggcgacgatccaaaagcccaaggcggagaagatctcattccagagaaagaggtagaaggtcaaggagcacatcaaaaacaagagacaaaaagaaagaagacaaagaaaagaaacgttctaaaagagagacgacgacgaagaagcaggagtggcacaagatctcctaaaaagcctcggtctcctaaaagaaaattgtcccgctcaccatcccctaggagacataaaaaggagaagaagaaagataaagacaaagaaagaagtagggatgaaagagaacgatcaacaagcaagaagaagaagagtaaagataaggaaaaggaccgggaaagaaaatcagagagtgataaagatgtaaaacaggttacacgggattatgatgaagaggaacaggggtatgacagtgagaaagagaaaaaagaagagaagaaaccaatagaaacaggttcccctaaaacaaaggaatgttctgtggaaaagggaactggtgattcactaagagaatccaaagtgaatggggatgatcatcatgaagaagacatggatatgagtgactgaatattgcctctgagggagtccaactgtatacctgcatcagtgtcattcctttgtgtgatttcttaatgctgtatttgttcatctcaaacctagatgtatacagctctgagttataaatggttataaagctcctgttactcatattagttatttacatcaaaaagcttttagaaaatggtacgaggtaaccaattcttgtcatggtgaaatctgattgagtaaccaagcagttttactattctggtgctgcttcataacaaaaatgaaaagctgcatgcatctacagcaggcatggattgtttatgtcgtatgatatcctttattaagtaagttcacttatagtatttctataatttgattcattgccgtaatagagccatgtaggaaatgcactgattgcatgttattgtggcaagaatatcctaaatgtcattaaaatcctccaacatgatggatctacttatggtcttgtttgttgacatgacaaattaacattcttatagttacatctggaaatgagcatttgaaatagataatcctttaagccttgtggcaaaatttttgtggcttttgtttaactttgaaaggttattatgcactaaccttttttggtggctaattagggtttaaatacagaaacaagatttcaaataaaactgtctttggcagtgagtaaatagcatattttgaagtagagttgtatactttttcataagatgtttgggaatttttttcctgaagtaataatttattccacatctacatcagtgaaagctatctacctatcctgagtctatcttaaaggaaaaaaagaaaaaaaccttatctcttgcccttattttgaattttccactctttcattaatttgttttaagctccgtgttggaaaaaaggggtagtgcattttaaattgaccttcatacgcttttaaaataagacaaatctacttgataatgtacctttatttgatctcaagttgtataaaaccaataaatttgtgttactgcagtagtaatcttatgcacacggtgatttcatgttatatatgcaaagtaggcaactgttttcttagttacagaagtttcaagcttcacttttgtgcagtagaaacaaaagtaggctacagtctgtgccatgttgatgtacagtttctgaaattgttttacaagactttgataataaaacccttaaacttatgttcatgttcctgtaaaaccgtatttgtatttatttacgctactgaatgtatgacatttacctcattcattttacaaattctttccctttctgtccacatatttcagtatagtaaaaagaggaagtctatcactgtagtgataattgccatcaaaattgtcaaaaatgatttaatttctatccaaaatagtccttttcttagcttagtatcattttattgcttatttttgtgtgggaatggggttggataaagcaatgaactttagtataaacaaatcccacctatatctagcaaatttatattttcggtgaaatacagatatttgcctttctggagtagtatagaagctgtcaatatgtatctactgtacagtactaaatagtattcatttatgaaatgagtagtgttgggtggctggggttaagggaaaatgagacttggaattgtagcttttatccaagtttgagtataaatagggtttgtttgttttttttaacctaaaaactgaaatgccatatagaaaaacagcattgtttttacagtttgtagtaagtaactttttaaagattttatcaaaaagaattttgtctatagtgagtaaaagaagttctaataatggtcctaatcactgcatttttaaaaaacaaagttcaacacaaatgacatttgttttaaactttagtagataaaaggtgaaccatgtgacatgggcatttttgtaagtcaaaaacaaatttcacatatggtaaacctaatattcacagtgtgttccctcacttgtaatctctgaatacaaatatactagcttttctaaagggaatcatttttttaaaagtagtgccactgacaagatgctacagtgaagattatccattcttaggatatttattttcagtgaacattttctgcacaaaggtagtgttgcactgggacacaagccttttaacagataaccagttgaaatcaaacactgcctccacaccgagttctgttgtgtatttgatagtaaattgatttaaaaataaaagtggtttttgttagaaaaa

SEQ ID NO: 316721 - DNA, 3260 bp, Homo sapiens
tacctggagtgatgctctgagcatggaaagagggtgctcactacgtctatgatctgtccctgggtgcacttggtcttcctggagcaaacttgaactctcagtctcttgctgcagatcagttgctgaagcttatgagtactgttgatcccaagttgaatcatgtagctgctggtctcgtttcaccaagtctgaaatcggatacctctagtaaagaaatagaggaagctatgaaaagagtacgagaagcacagtccctaatttctgctgctatagaaccagataagaaagaagaaaaaagaaggcattcaagatcaagatcacgttctaggaggaggaggactccctcatcttctagacacaggcggtcaagaagcagatcgagacggcggtcacattctaagtctaggagtcggcgacgatccaaaagcccaaggcggagaagatctcattccagagaaagaggtagaaggtcaaggagcacatcaaaaacaagagacaaaaagaaagaagacaaagaaaagaaacgttctaaaacaccaccaaaaagttacagcacagccagacgttctagaagtgcaagcagagagagacgacgacgaagaagcaggagtggcacaagatctcctaaaaagcctcggtctcctaaaagaaaattgtcccgctcaccatcccctaggagacataaaaaggagaagaagaaagataaagacaaagaaagaagtagggatgaaagagaacgatcaacaagcaagaagaagaagagtaaagataaggaaaaggaccgggaaagaaaatcagagagtgataaagatgtaaaacaggttacacgggattatgatgaagaggaacaggggtatgacagtgagaaagagaaaaaagaagagaagaaaccaatagaaacaggttcccctaaaacaaaggaatgttctgtggaaaagggaactggtgattcactaagagaatccaaagtgaatggggatgatcatcatgaagaagacatggatatgagtgactgaatattgcctctgagggagtccaactgtatacctgcatcagtgtcattcctttgtgtgatttcttaatgctgtatttgttcatctcaaacctagatgtatacagctctgagttataaatggttataaagctcctgttactcatattagttatttacatcaaaaagcttttagaaaatggtacgaggtaaccaattcttgtcatggtgaaatctgattgagtaaccaagcagttttactattctggtgctgcttcataacaaaaatgaaaagctgcatgcatctacagcaggcatggattgtttatgtcgtatgatatcctttattaagtaagttcacttatagtatttctataatttgattcattgccgtaatagagccatgtaggaaatgcactgattgcatgttattgtggcaagaatatcctaaatgtcattaaaatcctccaacatgatggatctacttatggtcttgtttgttgacatgacaaattaacattcttatagttacatctggaaatgagcatttgaaatagataatcctttaagccttgtggcaaaatttttgtggcttttgtttaactttgaaaggttattatgcactaaccttttttggtggctaattagggtttaaatacagaaacaagatttcaaataaaactgtctttggcagtgagtaaatagcatattttgaagtagagttgtatactttttcataagatgtttgggaatttttttcctgaagtaataatttattccacatctacatcagtgaaagctatctacctatcctgagtctatcttaaaggaaaaaaagaaaaaaaccttatctcttgcccttattttgaattttccactctttcattaatttgttttaagctccgtgttggaaaaaaggggtagtgcattttaaattgaccttcatacgcttttaaaataagacaaatctacttgataatgtacctttatttgatctcaagttgtataaaaccaataaatttgtgttactgcagtagtaatcttatgcacacggtgatttcatgttatatatgcaaagtaggcaactgttttcttagttacagaagtttcaagcttcacttttgtgcagtagaaacaaaagtaggctacagtctgtgccatgttgatgtacagtttctgaaattgttttacaagactttgataataaaacccttaaacttatgttcatgttcctgtaaaaccgtatttgtatttatttacgctactgaatgtatgacatttacctcattcattttacaaattctttccctttctgtccacatatttcagtatagtaaaaagaggaagtctatcactgtagtgataattgccatcaaaattgtcaaaaatgatttaatttctatccaaaatagtccttttcttagcttagtatcattttattgcttatttttgtgtgggaatggggttggataaagcaatgaactttagtataaacaaatcccacctatatctagcaaatttatattttcggtgaaatacagatatttgcctttctggagtagtatagaagctgtcaatatgtatctactgtacagtactaaatagtattcatttatgaaatgagtagtgttgggtggctggggttaagggaaaatgagacttggaattgtagcttttatccaagtttgagtataaatagggtttgtttgttttttttaacctaaaaactgaaatgccatatagaaaaacagcattgtttttacagtttgtagtaagtaactttttaaagattttatcaaaaagaattttgtctatagtgagtaaaagaagttctaataatggtcctaatcactgcatttttaaaaaacaaagttcaacacaaatgacatttgttttaaactttagtagataaaaggtgaaccatgtgacatgggcatttttgtaagtcaaaaacaaatttcacatatggtaaacctaatattcacagtgtgttccctcacttgtaatctctgaatacaaatatactagcttttctaaagggaatcatttttttaaaagtagtgccactgacaagatgctacagtgaagattatccattcttaggatatttattttcagtgaacattttctgcacaaaggtagtgttgcactgggacacaagccttttaacagataaccagttgaaatcaaacactgcctccacaccgagttctgttgtgtatttgatagtaaattgatttaaaaataaaagtggtttttgttagaaaaa

SEQ ID NO: 316722 - DNA, 3907 bp, Homo sapiens
agtgtcgtggttggaggcgaggtggggcggccgtttgttttctcgtggtctcgagctcgcgcgctctcatcccctcccccgcggcgtgcggcggggcggagaaacggcggcggcggcggcggcatcggcagcagtagcagaggctgtagcatcggacaccctcctctctcccgcaatccggttcctcttccccctccttctcactgtttgttgtgtgtttgatgtgttaaagcaggagcgagaacccgagcagcgccatgagcaacactaccgtcgtccccagcactgcaggtccgggccccagcggcgggcccggtggcggaggtggtggtggcggcggaggcggcggcaccgaggtaatccaggtgactaatgtctccccgagcgctagctctgagcagatgcggactctcttcggtttcctaggcaagatcgacgaactgcgcctcttcccgccggatgattcgcctttgccagtctcatctcgtgtctgctttgttaagttccatgatccagactcagcagttgtggcacagcatctgacaaacactgtattcgttgacagagctttgatagtcgtaccatatgcagaaggagttattcctgatgaagctaaagctttgtctctgttggcaccagctaatgcagtggcaggtcttctgcctggtggtggactcctgcctactcctaacccacttacccagattggcgctgttccactggctgctttgggggctcctactcttgatcctgcccttgctgcacttgggcttcctggagcaaacttgaactctcagtctcttgctgcagatcagttgctgaagcttatgagtactgttgatcccaagttgaatcatgtagctgctggtctcgtttcaccaagtctgaaatcggatacctctagtaaagaaatagaggaagctatgaaaagagtacgagaagcacagtccctaatttctgctgctatagaaccagataagaaagaagaaaaaagaaggcattcaagatcaagatcacgttctaggaggaggaggactccctcatcttctagacacaggcggtcaagaagcagatcgagacggcggtcacattctaagtctaggagtcggcgacgatccaaaagcccaaggcggagaagatctcattccagagaaagaggtagaaggtcaaggagcacatcaaaaacaagagacaaaaagaaagaagacaaagaaaagaaacgttctaaaacaccaccaaaaagttacagcacagccagacgttctagaagtgcaagcagagagagacgacgacgaagaagcaggagtggcacaagatctcctaaaaagcctcggtctcctaaaagaaaattgtcccgctcaccatcccctaggagacataaaaaggagaagaagaaagataaagacaaagaaagaagtagggatgaaagagaacgatcaacaagcaagaagaagaagagtaaagataaggaaaaggaccgggaaagaaaatcagagagtgataaagatgtaaaacaggttacacgggattatgatgaagaggaacaggggtatgacagtgagaaagagaaaaaagaagagaagaaaccaatagaaacaggttcccctaaaacaaaggaatgttctgtggtcatcatgaagaagacatggatatgagtgactgaatattgcctctgagggagtccaactgtatacctgcatcagtgtcattcctttgtgtgatttcttaatgctgtatttgttcatctcaaacctagatgtatacagctctgagttataaatggttataaagctcctgttactcatattagttatttacatcaaaaagcttttagaaaatggtacgaggtaaccaattcttgtcatggtgaaatctgattgagtaaccaagcagttttactattctggtgctgcttcataacaaaaatgaaaagctgcatgcatctacagcaggcatggattgtttatgtcgtatgatatcctttattaagtaagttcacttatagtatttctataatttgattcattgccgtaatagagccatgtaggaaatgcactgattgcatgttattgtggcaagaatatcctaaatgtcattaaaatcctccaacatgatggatctacttatggtcttgtttgttgacatgacaaattaacattcttatagttacatctggaaatgagcatttgaaatagataatcctttaagccttgtggcaaaatttttgtggcttttgtttaactttgaaaggttattatgcactaaccttttttggtggctaattagggtttaaatacagaaacaagatttcaaataaaactgtctttggcagtgagtaaatagcatattttgaagtagagttgtatactttttcataagatgtttgggaatttttttcctgaagtaataatttattccacatctacatcagtgaaagctatctacctatcctgagtctatcttaaaggaaaaaaagaaaaaaaccttatctcttgcccttattttgaattttccactctttcattaatttgttttaagctccgtgttggaaaaaaggggtagtgcattttaaattgaccttcatacgcttttaaaataagacaaatctacttgataatgtacctttatttgatctcaagttgtataaaaccaataaatttgtgttactgcagtagtaatcttatgcacacggtgatttcatgttatatatgcaaagtaggcaactgttttcttagttacagaagtttcaagcttcacttttgtgcagtagaaacaaaagtaggctacagtctgtgccatgttgatgtacagtttctgaaattgttttacaagactttgataataaaacccttaaacttatgttcatgttcctgtaaaaccgtatttgtatttatttacgctactgaatgtatgacatttacctcattcattttacaaattctttccctttctgtccacatatttcagtatagtaaaaagaggaagtctatcactgtagtgataattgccatcaaaattgtcaaaaatgatttaatttctatccaaaatagtccttttcttagcttagtatcattttattgcttatttttgtgtgggaatggggttggataaagcaatgaactttagtataaacaaatcccacctatatctagcaaatttatattttcggtgaaatacagatatttgcctttctggagtagtatagaagctgtcaatatgtatctactgtacagtactaaatagtattcatttatgaaatgagtagtgttgggtggctggggttaagggaaaatgagacttggaattgtagcttttatccaagtttgagtataaatagggtttgtttgttttttttaacctaaaaactgaaatgccatatagaaaaacagcattgtttttacagtttgtagtaagtaactttttaaagattttatcaaaaagaattttgtctatagtgagtaaaagaagttctaataatggtcctaatcactgcatttttaaaaaacaaagttcaacacaaatgacatttgttttaaactttagtagataaaaggtgaaccatgtgacatgggcatttttgtaagtcaaaaacaaatttcacatatggtaaacctaatattcacagtgtgttccctcacttgtaatctctgaatacaaatatactagcttttctaaagggaatcatttttttaaaagtagtgccactgacaagatgctacagtgaagattatccattcttaggatatttattttcagtgaacattttctgcacaaaggtagtgttgcactgggacacaagccttttaacagataaccagttgaaatcaaacactgcctccacaccgagttctgttgtgtatttgatagtaaattgatttaaaaataaaagtggtttttgttagaaaaa

SEQ ID NO: 316723 - DNA, 3873 bp, Homo sapiens
agtgtcgtggttggaggcgaggtggggcggccgtttgttttctcgtggtctcgagctcgcgcgctctcatcccctcccccgcggcgtgcggcggggcggagaaacggcggcggcggcggcggcatcggcagcagtagcagaggctgtagcatcggacaccctcctctctcccgcaatccggttcctcttccccctccttctcactgtttgttgtgtgtttgatgtgttaaagcaggagcgagaacccgagcagcgccatgagcaacactaccgtcgtccccagcactgcaggtccgggccccagcggcgggcccggtggcggaggtggtggtggcggcggaggcggcggcaccgaggtaatccaggtgactaatgtctccccgagcgctagctctgagcagatgcggactctcttcggtttcctaggcaagatcgacgaactgcgcctcttcccgccggatgattcgcctttgccagtctcatctcgtgtctgctttgttaagttccatgatccagactcagcagttgtggcacagcatctgacaaacactgtattcgttgacagagctttgatagtcgtaccatatgcagaaggagttattcctgatgaagctaaagctttgtctctgttggcaccagctaatgcagtggcaggtcttctgcctggtggtggactcctgcctactcctaacccacttacccagattggcgctgttccactggctgctttgggggctcctactcttgatcctgcccttgctgcacttgggcttcctggagcaaacttgaactctcagtctcttgctgcagatcagttgctgaagcttatgagtactgttgatcccaagttgaatcatgtagctgctggtctcgtttcaccaagtctgaaatcggatacctctagtaaagaaatagaggaagctatgaaaagagtacgagaagcacagtccctaatttctgctgctatagaaccagataagaaagaagaaaaaagaaggcattcaagatcaagatcacgttctaggaggaggaggactccctcatcttctagacacaggcggtcaagaagcagatcgagacggcggtcacattctaagtctaggagtcggcgacgatccaaaagcccaaggcggagaagatctcattccagagaaagaggtagaaggtcaaggagcacatcaaaaacaagagacaaaaagaaagaagacaaagaaaagaaacgttctaaaacaccaccaaaaagttacagcacagccagacgttctagaagtgcaagcagagagagacgacgacgaagaagcaggagtggcacaagatctcctaaaaagcctcggtctcctaaaagaaaattgtcccgctcaccatcccctaggagacataaaaaggagaagaagaaagataaagacaaagaaagaagtagggatgaaagagaacgatcaacaagcaagaagaagaagagtaaagataaggaaaaggaccgggaaagaaaatcagagagtgataaagatgtaaaaaggttcccctaaaacaaaggaatgttctgtggaaaagggaactggtgattcactaagagaatccaaagtgaatggggatgatcatcatgaagaagacatggatatgagtgactgaatattgcctctgagggagtccaactgtatacctgcatcagtgtcattcctttgtgtgatttcttaatgctgtatttgttcatctcaaacctagatgtatacagctctgagttataaatggttataaagctcctgttactcatattagttatttacatcaaaaagcttttagaaaatggtacgaggtaaccaattcttgtcatggtgaaatctgattgagtaaccaagcagttttactattctggtgctgcttcataacaaaaatgaaaagctgcatgcatctacagcaggcatggattgtttatgtcgtatgatatcctttattaagtaagttcacttatagtatttctataatttgattcattgccgtaatagagccatgtaggaaatgcactgattgcatgttattgtggcaagaatatcctaaatgtcattaaaatcctccaacatgatggatctacttatggtcttgtttgttgacatgacaaattaacattcttatagttacatctggaaatgagcatttgaaatagataatcctttaagccttgtggcaaaatttttgtggcttttgtttaactttgaaaggttattatgcactaaccttttttggtggctaattagggtttaaatacagaaacaagatttcaaataaaactgtctttggcagtgagtaaatagcatattttgaagtagagttgtatactttttcataagatgtttgggaatttttttcctgaagtaataatttattccacatctacatcagtgaaagctatctacctatcctgagtctatcttaaaggaaaaaaagaaaaaaaccttatctcttgcccttattttgaattttccactctttcattaatttgttttaagctccgtgttggaaaaaaggggtagtgcattttaaattgaccttcatacgcttttaaaataagacaaatctacttgataatgtacctttatttgatctcaagttgtataaaaccaataaatttgtgttactgcagtagtaatcttatgcacacggtgatttcatgttatatatgcaaagtaggcaactgttttcttagttacagaagtttcaagcttcacttttgtgcagtagaaacaaaagtaggctacagtctgtgccatgttgatgtacagtttctgaaattgttttacaagactttgataataaaacccttaaacttatgttcatgttcctgtaaaaccgtatttgtatttatttacgctactgaatgtatgacatttacctcattcattttacaaattctttccctttctgtccacatatttcagtatagtaaaaagaggaagtctatcactgtagtgataattgccatcaaaattgtcaaaaatgatttaatttctatccaaaatagtccttttcttagcttagtatcattttattgcttatttttgtgtgggaatggggttggataaagcaatgaactttagtataaacaaatcccacctatatctagcaaatttatattttcggtgaaatacagatatttgcctttctggagtagtatagaagctgtcaatatgtatctactgtacagtactaaatagtattcatttatgaaatgagtagtgttgggtggctggggttaagggaaaatgagacttggaattgtagcttttatccaagtttgagtataaatagggtttgtttgttttttttaacctaaaaactgaaatgccatatagaaaaacagcattgtttttacagtttgtagtaagtaactttttaaagattttatcaaaaagaattttgtctatagtgagtaaaagaagttctaataatggtcctaatcactgcatttttaaaaaacaaagttcaacacaaatgacatttgttttaaactttagtagataaaaggtgaaccatgtgacatgggcatttttgtaagtcaaaaacaaatttcacatatggtaaacctaatattcacagtgtgttccctcacttgtaatctctgaatacaaatatactagcttttctaaagggaatcatttttttaaaagtagtgccactgacaagatgctacagtgaagattatccattcttaggatatttattttcagtgaacattttctgcacaaaggtagtgttgcactgggacacaagccttttaacagataaccagttgaaatcaaacactgcctccacaccgagttctgttgtgtatttgatagtaaattgatttaaaaataaaagtggtttttgttagaaaaa

SEQ ID NO: 316724 - DNA, 3323 bp, Homo sapiens
agtgtcgtggttggaggcgaggtggggcggccgtttgttttctcgtggtctcgagctcgcgcgctctcatcccctcccccgcggcgtgcggcggggcggagaaacggcggcggcggcggcggcatcggcagcagtagcagaggctgtagcatcggacaccctcctctctcccgcaatccggttcctcttccccctccttctcactgtttgttgtgtgtttgatgtgttaaagcaggagcgagaacccgagcagcgccatgagcaacactaccgtcgtccccagcactgcaggtccgggccccagcggcgggcccggtggcggaggtggtggtggcggcggaggcggcggcaccgaggtaatccaggtgactaatgtctccccgagcgctagctctgagcagatgcggactctcttcggtttcctgcggtcaagaagcagatcgagacggcggtcacattctaagtctaggagtcggcgacgatccaaaagcccaaggcggagaagatctcattccagagaaagaggtagaaggtcaaggagcacatcaaaaacaagagacaaaaagaaagaagacaaagaaaagaaacgttctaaaacaccaccaaaaagttacagcacagccagacgttctagaagtgcaagcagagagagacgacgacgaagaagcaggagtggcacaagatctcctaaaaagcctcggtctcctaaaagaaaattgtcccgctcaccatcccctaggagacataaaaaggagaagaagaaagataaagacaaagaaagaagtagggatgaaagagaacgatcaacaagcaagaagaagaagagtaaagataaggaaaaggaccgggaaagaaaatcagagagtgataaagatgtaaaacaggttacacgggattatgatgaagaggaacaggggtatgacagtgagaaagagaaaaaagaagagaagaaaccaatagaaacaggttcccctaaaacaaaggaatgttctgtggaaaagggaactggtgattcactaagagaatccaaagtgaatggggatgatcatcatgaagaagacatggatatgagtgactgaatattgcctctgagggagtccaactgtatacctgcatcagtgtcattcctttgtgtgatttcttaatgctgtatttgttcatctcaaacctagatgtatacagctctgagttataaatggttataaagctcctgttactcatattagttatttacatcaaaaagcttttagaaaatggtacgaggtaaccaattcttgtcatggtgaaatctgattgagtaaccaagcagttttactattctggtgctgcttcataacaaaaatgaaaagctgcatgcatctacagcaggcatggattgtttatgtcgtatgatatcctttattaagtaagttcacttatagtatttctataatttgattcattgccgtaatagagccatgtaggaaatgcactgattgcatgttattgtggcaagaatatcctaaatgtcattaaaatcctccaacatgatggatctacttatggtcttgtttgttgacatgacaaattaacattcttatagttacatctggaaatgagcatttgaaatagataatcctttaagccttgtggcaaaatttttgtggcttttgtttaactttgaaaggttattatgcactaaccttttttggtggctaattagggtttaaatacagaaacaagatttcaaataaaactgtctttggcagtgagtaaatagcatattttgaagtagagttgtatactttttcataagatgtttgggaatttttttcctgaagtaataatttattccacatctacatcagtgaaagctatctacctatcctgagtctatcttaaaggaaaaaaagaaaaaaaccttatctcttgcccttattttgaattttccactctttcattaatttgttttaagctccgtgttggaaaaaaggggtagtgcattttaaattgaccttcatacgcttttaaaataagacaaatctacttgataatgtacctttatttgatctcaagttgtataaaaccaataaatttgtgttactgcagtagtaatcttatgcacacggtgatttcatgttatatatgcaaagtaggcaactgttttcttagttacagaagtttcaagcttcacttttgtgcagtagaaacaaaagtaggctacagtctgtgccatgttgatgtacagtttctgaaattgttttacaagactttgataataaaacccttaaacttatgttcatgttcctgtaaaaccgtatttgtatttatttacgctactgaatgtatgacatttacctcattcattttacaaattctttccctttctgtccacatatttcagtatagtaaaaagaggaagtctatcactgtagtgataattgccatcaaaattgtcaaaaatgatttaatttctatccaaaatagtccttttcttagcttagtatcattttattgcttatttttgtgtgggaatggggttggataaagcaatgaactttagtataaacaaatcccacctatatctagcaaatttatattttcggtgaaatacagatatttgcctttctggagtagtatagaagctgtcaatatgtatctactgtacagtactaaatagtattcatttatgaaatgagtagtgttgggtggctggggttaagggaaaatgagacttggaattgtagcttttatccaagtttgagtataaatagggtttgtttgttttttttaacctaaaaactgaaatgccatatagaaaaacagcattgtttttacagtttgtagtaagtaactttttaaagattttatcaaaaagaattttgtctatagtgagtaaaagaagttctaataatggtcctaatcactgcatttttaaaaaacaaagttcaacacaaatgacatttgttttaaactttagtagataaaaggtgaaccatgtgacatgggcatttttgtaagtcaaaaacaaatttcacatatggtaaacctaatattcacagtgtgttccctcacttgtaatctctgaatacaaatatactagcttttctaaagggaatcatttttttaaaagtagtgccactgacaagatgctacagtgaagattatccattcttaggatatttattttcagtgaacattttctgcacaaaggtagtgttgcactgggacacaagccttttaacagataaccagttgaaatcaaacactgcctccacaccgagttctgttgtgtatttgatagtaaattgatttaaaaataaaagtggtttttgttagaaaaa

SEQ ID NO: 316725 - DNA, 3546 bp, Homo sapiens
agtgtcgtggttggaggcgaggtggggcggccgtttgttttctcgtggtctcgagctcgcgcgctctcatcccctcccccgcggcgtgcggcggggcggagaaacggcggcggcggcggcggcatcggcagcagtagcagaggctgtagcatcggacaccctcctctctcccgcaatccggttcctcttccccctccttctcactgtttgttgtgtgtttgatgtgttaaagcaggagcgagaacccgagcagcgccatgagcaacactaccgtcgtccccagcactgcaggtccgggccccagcggcgggcccggtggcggaggtggtggtggcggcggaggcggcggcaccgaggtaatccaggtgactaatgtctccccgagcgctagctctgagcagatgcggactctcttcggtttcctaggcaagatcgacgaactgcgcctcttcccgccggatgattcgcctttgccagtctcatctcgtgtctgctttgttaagttccatgatccagactcagcagttgtggcacagcatctgacaaacactgtattcgttgacagagctttgatagtcgtaccatatgcagaaggagttattcctgatgaagctaaagctttgtctctgttggcaccagctaatgcagtggcaggtcttctgcctggtggtggactcctgcctactcctaacccacttacccagattggcgctgttccactggctgctttgggggctcctactcttgatcctgcccttgctgcacttgggcttcctggagcaaacttgaactctcagtctcttgctgcagatcagttgctgaagcttatgagtactgttgatcccaagttgaatcatgtagctgctggtctcgtttcaccaagtctgaaatcggatacctctagtaaagaaatagaggaagctatgaaaagagtacgagaagcacagtccctaatttctgctgctatagaaccagataagaaagaagaaaaaagaaggcattcaagatcaagatcacgttctaggaggaggaggactccctcatcttctagacacaggcggtcaagaagcagatcgagacggcggtcacattctaagtctaggagtcggcgacgatccaaaagcccaaggcggagaagatctcattccagagaaagaggtagaaggtcaaggagcacatcaaaaacaagagacaaaaagaaagaagacaaagaaaagaaacgttctaaaacaccaccaaaaagttacagcacagccagacgttctagaagtgcaagcagagagagacgacgacgaagaagcaggagtggcacaagatctcctaaaaagcctcggtctcctaaaagaaaattgtcccgctcaccatcccctaggagacataaaaaggagaagaagaaagataaagacaaagaaagaagtagggatgaaagagaacgatcaacaagcaagaagaagaagagtaaagataaggaaaaggaccgggaaagaaaatcagagagtgataaagatgtaaaacaggttacacgggattatgatgaagaggaacaggggtatgacagtgagaaagagaaaaaagaagagaagaaaccaatagaaacaggttcccctaaaacaaaggaatgttctgtggaaaagggaactggtgattcactaagagaatccaaagtgaatggggatgatcatcatgaagaagacatggatatgagtgactgaatattgcctctgagggagtccaactgtatacctgcatcagtgtcattcctttgtgtgatttcttaatgctgtatttgttcatctcaaacctagatgtatacagctctgagttataaatggttataaagctcctgttactcatattagttatttacatcaaaaagcttttagaaaatggtacgaggtaaccaattcttgtcatggtgaaatctgattgagtaaccaagcagttttactattctggtgctgcttcataacaaaaatgaaaagctgcatgcatctacagcaggcatggattgtttatgtcgtatgatatcctttattaagtaagttcacttatagtatttctataatttgattcattgccgtaatagagccatgtaggaaatgcactgattgcatgttattgtggcaagaatatcctaaatgtcattaaaatcctccaacatgatggatctacttatggtcttgtttgttgacatgacaaattaacattcttatagttacatctggaaatgagcatttgaaatagataatcctttaagccttgtggcaaaatttttgtggcttttgtttaactttgaaaggttattatgcactaaccttttttggtggctaattagggtttaaatacagaaacaagatttcaaataaaactgtctttggcagtgagtaaatagcatattttgaagtagagttgtatactttttcataagatgtttgggaatttttttcctgaagtaataatttattccacatctacatcagtgaaagctatctacctatcctgagtctatcttaaaggaaaaaaagaaaaaaaccttatctcttgcccttattttgaattttccactctttcattaatttgttttaagctccgtgttggaaaaaaggggtagtgcattttaaattgaccttcatacgcttttaaaataagacaaatctacttgataatgtacctttatttgatctcaagttgtataaaaccaataaatttgtgttactgcagtagtaatcttatgcacacggtgatttcatgttatatatgcaaagtaggcaactgttttcttagttacagaagtttcaagcttcacttttgtgcagtagaaacaaaagtaggctacagtctgtgccatgttgatgtacagtttctgaaattgttttacaagactttgataataaaacccttaaaaaaaaaaaaaaaaaaaaaaaaaaaaaaaaaaaaaaaaaaaaaaaaaaacaaaaaacaacgacgacaacaacaacgaagaggcgcccaccccatagagagcggacaccaaccaaggaggaggcaaccacaacaacagcaacccaccggcggagcccccacaagcgggcgcgccccctgcggacacccacagtaagacggacgagcagcgaaaaccgcacacagaccgatacaagcaacgaggagaacgagagcgccagaaaaaaaaatcagcgtcaacgcgagcagacccacttcaagtgacgcatacgcgcgcacaacacaagggtgggacagaccaaacacgactgtgggacaagcacaatgtcacgacgaatcacaggggggagttgcaggcgcctccagagagagagcaccgcctggtcacctaacgctggcgtgaagcacatacaaagtcaaggagcgcgcgcacatagatccacggtcggcgacaaaaagcgaggaagcaaggcgggcggcagcagaagagagaagcaaggcaaacagagagaggagagcaaataagacttactggagcaggcacaatgttatatagcaaatcaccgaaggacggagatcgtaagcagagcagactacacgagatgt

SEQ ID NO: 316726 - DNA, 2957 bp, Homo sapiens
agtgtcgtggttggaggcgaggtggggcggccgtttgttttctcgtggtctcgagctcgcgcgctctcatcccctcccccgcggcgtgcggcggggcggagaaacggcggcggcggcggcggcatcggcagcagtagcagaggctgtagcatcggacaccctcctctctcccgcaatccggttcctcttccccctccttctcactgtttgttgtgtgtttgatgtgttaaagcaggagcgagaacccgagcagcgccatgagcaacactaccgtcgtccccagcactgcaggtccgggccccagcggcgggcccggtggcggaggtggtggtggcggcggaggcggcggcaccgaggtaatccaggtgactaatgtctccccgagcgctagctctgagcagatgcggactctcttcggtttcctaggcaagatcgacgaactgcgcctcttcccgccggatgattcgcctttgccagtctcatctcgtgtctgctttgttaagttccatgatccagactcagcagttgtggcacagcatctgacaaacactgtattcgttgacagagctttgatagtcgtaccatatgcagaaggagttattcctgatgaagctaaagctttgtctctgttggcaccagctaatgcagtggcaggtcttctgcctggtggtggactcctgcctactcctaacccacttacccagattggcgctgttccactggctgctttgggggctcctactcttgatcctgcccttgctgcacttgggcttcctggagcaaacttgaactctcagtctcttgctgcagatcagttgctgaagcttatgagtactgttgatcccaagttgaatcatgtagctgctggtctcgtttcaccaagtctgaaatcggatacctctagtaaagaaatagaggaagctatgaaaagagtacgagaagcacagtccctaatttctgctgctatagaaccagataagaaagaagaaaaaagaaggcattcaagatcaagatcacgttctaggaggaggaggactccctcatcttctagacacaggcggtcaagaagcagatcgagacggcggtcacattctaagtctaggagtcggcgacgatccaaaagcccaaggcggagaagatctcattccagagaaagaggtagaaggtcaaggagcacatcaaaaacaagagacaaaaagaaagaagacaaagaaaagaaacgttctaaaacaccaccaaaaagttacagcacagccagacgttctagaagtgcaagcagagagagacgacgacgaagaagcaggagtggcacaagatctcctaaaaagcctcggtctcctaaaagaaaattgtcccgctcaccatcccctaggagacataaaaaggagaagaagaaagataaagacaaagaaagaagtagggatgaaagagaacgatcaacaagcaagaagaagaagagtaaagataaggaaaaggaccgggaaagaaaatcagagagtgataaagatgtaaaacaggttacacgggattatgatgaagaggaacaggggtatgacagtgagaaagagaaaaaagaagagaagaaaccaatagaaacaggttcccctaaaacaaaggaatgttctgtggaaaagggaactggtgattcactaagagaatccaaagtgaatggggatgatcatcatgaagaagacatggatatgagtgactgaatattgcctctgagggagtccaactgtatacctgcatcagtgtcattcctttgtgtgatttcttaatgctgtatttgttcatctcaaacctagatgtatacagctctgagttataaatggttataaagctcctgttactcatattagttatttacatcaaaaagcttttagaaaatggtacgaggtaaccaattcttgtcatggtgaaatctgattgagtaaccaagcagttttactattctggtgctgcttcataacaaaaatgaaaagctgcatgcatctacagcaggcatggattgtttatgtcgtatgatatcctttattaagtaagttcacttatagtatttctataatttgattcattgccgtaatagagccatgtaggaaatgcactgattgcatgttattgtggcaagaatatcctaaatgtcattaaaatcctccaacatgatggatctacttatggtcttgtttgttgacatgacaaattaacattcttatagttacatctggaaatgagcatttgaaatagataatcctttaagccttgtggcaaaatttttgtggcttttgtttaactttgaaaggttattatgcactaaccttttttggtggctaattagggtttaaatacagaaacaagatttcaaataaaactgtctttggcagtgagtaaatagcatattttgaagtagagttgtatactttttcataagatgtttgggaatttttttcctgaagtaataatttattccacatctacatcagtgaaagctatctacctatcctgagtctatcttaaaggaaaaaaagaaaaaaaccttatctcttgcccttattttgaattttccactctttcattaatttgttttaagctccgtgttggaaaaaaggggtagtgcattttaaattgaccttcatacgcttttaaaataagacaaatctacttgataatgtacctttatttgatctcaagttgtataaaaccaataaatttgtgttactgcagtagtaatcttatgcacacggtgatttcatgttatatatgcaaagtaggcaactgttttcttagttacagaagtttcaagcttcacttttgtgcagtagaaacaaaagtaggctacagtctgtgccatgttgatgtacagtttctgaaattgttttacaagactttgataataaaacccttaaactgccgaattcttcgtcggatgcaaattccctataggatgagatgcaggcgtg

SEQ ID NO: 316727 - DNA, 2838 bp, Homo sapiens
tgtttccctttgtctcaatgaagctgagcttctttcccatgattaggaatttgcatttccttttctgtgaactgcctattcatcttctgtcaattttttattggtgactttaatctttcatattgatttataggacccctttagaatcaatattaaaaacatttatacaatgcaacatcaaattatcattctcagccaggagcggtggtgtgcacctgtagtcccagctatttggaaggatcacctgagcctaggagacataaaaaggagaagaagaaagataaagacaaagaaagaagtagggatgaaagagaacgatcaacaagcaagaagaagaagagtaaagataaggaaaaggaccgggaaagaaaatcagagagtgataaagatgtaaaacaggttacacgggattatgatgaagaggaacaggggtatgacagtgagaaagagaaaaaagaagagaagaaaccaatagaaacaggttcccctaaaacaaaggaatgttctgtggaaaagggaactggtgattcactaagagaatccaaagtgaatggggatgatcatcatgaagaagacatggatatgagtgactgaatattgcctctgagggagtccaactgtatacctgcatcagtgtcattcctttgtgtgatttcttaatgctgtatttgttcatctcaaacctagatgtatacagctctgagttataaatggttataaagctcctgttactcatattagttatttacatcaaaaagcttttagaaaatggtacgaggtaaccaattcttgtcatggtgaaatctgattgagtaaccaagcagttttactattctggtgctgcttcataacaaaaatgaaaagctgcatgcatctacagcaggcatggattgtttatgtcgtatgatatcctttattaagtaagttcacttatagtatttctataatttgattcattgccgtaatagagccatgtaggaaatgcactgattgcatgttattgtggcaagaatatcctaaatgtcattaaaatcctccaacatgatggatctacttatggtcttgtttgttgacatgacaaattaacattcttatagttacatctggaaatgagcatttgaaatagataatcctttaagccttgtggcaaaatttttgtggcttttgtttaactttgaaaggttattatgcactaaccttttttggtggctaattagggtttaaatacagaaacaagatttcaaataaaactgtctttggcagtgagtaaatagcatattttgaagtagagttgtatactttttcataagatgtttgggaatttttttcctgaagtaataatttattccacatctacatcagtgaaagctatctacctatcctgagtctatcttaaaggaaaaaaagaaaaaaaccttatctcttgcccttattttgaattttccactctttcattaatttgttttaagctccgtgttggaaaaaaggggtagtgcattttaaattgaccttcatacgcttttaaaataagacaaatctacttgataatgtacctttatttgatctcaagttgtataaaaccaataaatttgtgttactgcagtagtaatcttatgcacacggtgatttcatgttatatatgcaaagtaggcaactgttttcttagttacagaagtttcaagcttcacttttgtgcagtagaaacaaaagtaggctacagtctgtgccatgttgatgtacagtttctgaaattgttttacaagactttgataataaaacccttaaacttatgttcatgttcctgtaaaaccgtatttgtatttatttacgctactgaatgtatgacatttacctcattcattttacaaattctttccctttctgtccacatatttcagtatagtaaaaagaggaagtctatcactgtagtgataattgccatcaaaattgtcaaaaatgatttaatttctatccaaaatagtccttttcttagcttagtatcattttattgcttatttttgtgtgggaatggggttggataaagcaatgaactttagtataaacaaatcccacctatatctagcaaatttatattttcggtgaaatacagatatttgcctttctggagtagtatagaagctgtcaatatgtatctactgtacagtactaaatagtattcatttatgaaatgagtagtgttgggtggctggggttaagggaaaatgagacttggaattgtagcttttatccaagtttgagtataaatagggtttgtttgttttttttaacctaaaaactgaaatgccatatagaaaaacagcattgtttttacagtttgtagtaagtaactttttaaagattttatcaaaaagaattttgtctatagtgagtaaaagaagttctaataatggtcctaatcactgcatttttaaaaaacaaagttcaacacaaatgacatttgttttaaactttagtagataaaaggtgaaccatgtgacatgggcatttttgtaagtcaaaaacaaatttcacatatggtaaacctaatattcacagtgtgttccctcacttgtaatctctgaatacaaatatactagcttttctaaagggaatcatttttttaaaagtagtgccactgacaagatgctacagtgaagattatccattcttaggatatttattttcagtgaacattttctgcacaaaggtagtgttgcactgggacacaagccttttaacagataaccagttgaaatcaaacactgcctccacaccgagttctgttgtgtatttgatagtaaattgatttaaaaataaaagtggtttttgttagaaaaa

SEQ ID NO: 316728 - DNA, 2893 bp, Homo sapiens
  misc_feature (217)..(217): n is a, c, g, or t
  misc_feature (241)..(241): n is a, c, g, or t
ttgaaaggaaagtgcaatgaaatttgttgaaccttaaaaggggaaacttagacaccccccctcaagcgcaggaccaagtgcagagtggactctttctggatgttgtagtcagacagggtgcgtccatcttccagctgtttcccagcaaagatcaacctctgctgatcaggagggatgccttccttatcttggatctttgccttgacattctcgatgntgtcactgggctccacctcgaggntgatggtcttaccagtcagggtcttcacgaagatctgcatcccacctctgagacggagcaccaggtgcagggtggactctttctgctctccgaattcggcacgaggaaagaagtagggatgaaagagaacgatcaacaagcaagaagaagaagagtaaagataaggaaaaggaccgggaaagaaaatcagagagtgataaagatgtaaaacaggttacacgggattatgatgaagaggaacaggggtatgacagtgagaaagagaaaaaagaagagaagaaaccaatagaaacaggttcccctaaaacaaaggaatgttctgtggaaaagggaactggtgattcactaagagaatccaaagtgaatggggatgatcatcatgaagaagacatggatatgagtgactgaatattgcctctgagggagtccaactgtatacctgcatcagtgtcattcctttgtgtgatttcttaatgctgtatttgttcatctcaaacctagatgtatacagctctgagttataaatggttataaagctcctgttactcatattagttatttacatcaaaaagcttttagaaaatggtacgaggtaaccaattcttgtcatggtgaaatctgattgagtaaccaagcagttttactattctggtgctgcttcataacaaaaatgaaaagctgcatgcatctacagcaggcatggattgtttatgtcgtatgatatcctttattaagtaagttcacttatagtatttctataatttgattcattgccgtaatagagccatgtaggaaatgcactgattgcatgttattgtggcaagaatatcctaaatgtcattaaaatcctccaacatgatggatctacttatggtcttgtttgttgacatgacaaattaacattcttatagttacatctggaaatgagcatttgaaatagataatcctttaagccttgtggcaaaatttttgtggcttttgtttaactttgaaaggttattatgcactaaccttttttggtggctaattagggtttaaatacagaaacaagatttcaaataaaactgtctttggcagtgagtaaatagcatattttgaagtagagttgtatactttttcataagatgtttgggaatttttttcctgaagtaataatttattccacatctacatcagtgaaagctatctacctatcctgagtctatcttaaaggaaaaaaagaaaaaaaccttatctcttgcccttattttgaattttccactctttcattaatttgttttaagctccgtgttggaaaaaaggggtagtgcattttaaattgaccttcatacgcttttaaaataagacaaatctacttgataatgtacctttatttgatctcaagttgtataaaaccaataaatttgtgttactgcagtagtaatcttatgcacacggtgatttcatgttatatatgcaaagtaggcaactgttttcttagttacagaagtttcaagcttcacttttgtgcagtagaaacaaaagtaggctacagtctgtgccatgttgatgtacagtttctgaaattgttttacaagactttgataataaaacccttaaacttatgttcatgttcctgtaaaaccgtatttgtatttatttacgctactgaatgtatgacatttacctcattcattttacaaattctttccctttctgtccacatatttcagtatagtaaaaagaggaagtctatcactgtagtgataattgccatcaaaattgtcaaaaatgatttaatttctatccaaaatagtccttttcttagcttagtatcattttattgcttatttttgtgtgggaatggggttggataaagcaatgaactttagtataaacaaatcccacctatatctagcaaatttatattttcggtgaaatacagatatttgcctttctggagtagtatagaagctgtcaatatgtatctactgtacagtactaaatagtattcatttatgaaatgagtagtgttgggtggctggggttaagggaaaatgagacttggaattgtagcttttatccaagtttgagtataaatagggtttgtttgttttttttaacctaaaaactgaaatgccatatagaaaaacagcattgtttttacagtttgtagtaagtaactttttaaagattttatcaaaaagaattttgtctatagtgagtaaaagaagttctaataatggtcctaatcactgcatttttaaaaaacaaagttcaacacaaatgacatttgttttaaactttagtagataaaaggtgaaccatgtgacatgggcatttttgtaagtcaaaaacaaatttcacatatggtaaacctaatattcacagtgtgttccctcacttgtaatctctgaatacaaatatactagcttttctaaagggaatcatttttttaaaagtagtgccactgacaagatgctacagtgaagattatccattcttaggatatttattttcagtgaacattttctgcacaaaggtagtgttgcactgggacacaagccttttaacagataaccagttgaaatcaaacactgcctccacaccgagttctgttgtgtatttgatagtaaattgatttaaaaataaaagtggtttttgttagaaaaa

SEQ ID NO: 316729 - DNA, 2448 bp, Homo sapiens
cggacgcgtgggtcgacccacgcgtccgaagaggaacaggggtatgacagtgagaaagagaaaaaagaagagaagaaaccaatagaaacaggttcccctaaaacaaaggaatgttctgtggaaaagggaactggtgattcactaagagaatccaaagtgaatggggatgatcatcatgaagaagacatggatatgagtgactgaatattgcctctgagggagtccaactgtatacctgcatcagtgtcattcctttgtgtgatttcttaatgctgtatttgttcatctcaaacctagatgtatacagctctgagttataaatggttataaagctcctgttactcatattagttatttacatcaaaaagcttttagaaaatggtacgaggtaaccaattcttgtcatggtgaaatctgattgagtaaccaagcagttttactattctggtgctgcttcataacaaaaatgaaaagctgcatgcatctacagcaggcatggattgtttatgtcgtatgatatcctttattaagtaagttcacttatagtatttctataatttgattcattgccgtaatagagccatgtaggaaatgcactgattgcatgttattgtggcaagaatatcctaaatgtcattaaaatcctccaacatgatggatctacttatggtcttgtttgttgacatgacaaattaacattcttatagttacatctggaaatgagcatttgaaatagataatcctttaagccttgtggcaaaatttttgtggcttttgtttaactttgaaaggttattatgcactaaccttttttggtggctaattagggtttaaatacagaaacaagatttcaaataaaactgtctttggcagtgagtaaatagcatattttgaagtagagttgtatactttttcataagatgtttgggaatttttttcctgaagtaataatttattccacatctacatcagtgaaagctatctacctatcctgagtctatcttaaaggaaaaaaagaaaaaaaccttatctcttgcccttattttgaattttccactctttcattaatttgttttaagctccgtgttggaaaaaaggggtagtgcattttaaattgaccttcatacgcttttaaaataagacaaatctacttgataatgtacctttatttgatctcaagttgtataaaaccaataaatttgtgttactgcagtagtaatcttatgcacacggtgatttcatgttatatatgcaaagtaggcaactgttttcttagttacagaagtttcaagcttcacttttgtgcagtagaaacaaaagtaggctacagtctgtgccatgttgatgtacagtttctgaaattgttttacaagactttgataataaaacccttaaacttatgttcatgttcctgtaaaaccgtatttgtatttatttacgctactgaatgtatgacatttacctcattcattttacaaattctttccctttctgtccacatatttcagtatagtaaaaagaggaagtctatcactgtagtgataattgccatcaaaattgtcaaaaatgatttaatttctatccaaaatagtccttttcttagcttagtatcattttattgcttatttttgtgtgggaatggggttggataaagcaatgaactttagtataaacaaatcccacctatatctagcaaatttatattttcggtgaaatacagatatttgcctttctggagtagtatagaagctgtcaatatgtatctactgtacagtactaaatagtattcatttatgaaatgagtagtgttgggtggctggggttaagggaaaatgagacttggaattgtagcttttatccaagtttgagtataaatagggtttgtttgttttttttaacctaaaaactgaaatgccatatagaaaaacagcattgtttttacagtttgtagtaagtaactttttaaagattttatcaaaaagaattttgtctatagtgagtaaaagaagttctaataatggtcctaatcactgcatttttaaaaaacaaagttcaacacaaatgacatttgttttaaactttagtagataaaaggtgaaccatgtgacatgggcatttttgtaagtcaaaaacaaatttcacatatggtaaacctaatattcacagtgtgttccctcacttgtaatctctgaatacaaatatactagcttttctaaagggaatcatttttttaaaagtagtgccactgacaagatgctacagtgaagattatccattcttaggatatttattttcagtgaacattttctgcacaaaggtagtgttgcactgggacacaagccttttaacagataaccagttgaaatcaaacactgcctccacaccgagttctgttgtgtatttgatagtaaattgatttaaaaataaaagtggtttttgttagaaaaa

SEQ ID NO: 316730 - DNA, 2488 bp, Homo sapiens
agtgtcgtggttggaggcgaggtggggcggccgtttgttttctcgtggtctcgagctcgcgcgctctcatcccctcccccgcggcgtgcggcggggcggagaaacggcggcggcggcggcggcatcggcagcagtagcagaggctgtagcatcggacaccctcctctctcccgcaatccggttcctcttccccctccttctcactgtttgttgtgtgtttgatgtgttaaagcaggagcgagaacccgagcagcgccatgagcaacactaccgtcgtccccagcactgcaggtccgggccccagcggcgggcccggtggcggaggtggtggtggcggcggaggcggcggcaccgaggtaatccaggtgactaatgtctccccgagcgctagctctgagcagatgcggactctcttcggtttcctaggcaagatcgacgaactgcgcctcttcccgccggatgattcgcctttgccagtctcatctcgtgtctgctttgttaagttccatgatccagactcagcagttgtggcacagcatctgacaaacactgtattcgttgacagagctttgatagtcgtaccatatgcagaaggagttattcctgatgaagctaaagctttgtctctgttggcaccagctaatgcagtggcaggtcttctgcctggtggtggactcctgcctactcctaacccacttacccagattggcgctgttccactggctgctttgggggctcctactcttgatcctgcccttgctgcacttgggcttcctggagcaaacttgaactctcagtctcttgctgcagatcagttgctgaagcttatgagtactgttgatcccaagttgaatcatgtagctgctggtctcgtttcaccaagtctgaaatcggatacctctagtaaagaaatagaggaagctatgaaaagagtacgagaagcacagtccctaatttctgctgctatagaaccagataagaaagaagaaaaaagaaggcattcaagatcaagatcacgttctaggaggaggaggactccctcatcttctagacacaggcggtcaagaagcagatcgagacggcggtcacattctaagtctaggagtcggcgacgatccaaaagcccaaggcggagaagatctcattccagagaaagaggtagaaggtcaaggagcacatcaaaaacaagagacaaaaagaaagaagacaaagaaaagaaacgttctaaaacaccaccaaaaagttacagcacagccagacgttctagaagtgcaagcagagagagacgacgacgaagaagcaggagtggcacaagatctcctaaaaagcctcggtctcctaaaagaaaattgtcccgctcaccatcccctaggagacataaaaaggagaagaagaaagataaagacaaagaaagaagtagggatgaaagagaacgatcaacaagcaagaagaagaagagtaaagataaggaaaaggaccgggaaagaaaatcagagagtgataaagatgtaaaacaggttacacgggattatgatgaagaggaacaggggtatgacagtgagaaagagaaaaaagaagagaagaaaccaatagaaacaggttcccctaaaacaaaggaatgttctgtggaaaagggaactggtgattcactaagagaatccaaagtgaatggggatgatcatcatgaagaagacatggatatgagtgactgaatattgcctctgagggagtccaactgtatacctgcatcagtgtcattcctttgtgtgatttcttaatgctgtatttgttcatctcaaacctagatgtatacagctctgagttataaatggttataaagctcctgttactcatattagttatttacatcaaaaagcttttagaaaatggtacgaggtaaccaattcttgtcatggtgaaatctgattgagtaaccaagcagttttactattctggtgctgcttcataacaaaaatgaaaagctgcatgcatctacagcaggcatggattgtttatgtcgtatgatatcctttattaagtaagttcacttatagtatttctataatttgattcattgccgtaatagagccatgtaggaaatgcactgattgcatgttattgtggcaagaatatcctaaatgtcattaaaatcctccaacatgatggatctacttatggtcttgtttgttgacatgacaaattaacattcttatagttacatctggaaatgagcatttgaaatagataatcctttaagccttgtggcaaaatttttgtggcttttgtttaactttgaaaggttattatgcactaaccttttgggggccactaggggttacatccggaacgagtccattaactgcttggcggggtcaatgccctttgcgggacaggtgccctcatacagtggggattcgggaatattcacagctacgaagacaccgggctacgaagaactccctgtagcccattcgggggggagcttgag

SEQ ID NO: 316731 - DNA, 1891 bp, Homo sapiens
agtgtcgtggttggaggcgaggtggggcggccgtttgttttctcgtggtctcgagctcgcgcgctctcatcccctcccccgcggcgtgcggcggggcggagaaacggcggcggcggcggcggcatcggcagcagtagcagaggctgtagcatcggacaccctcctctctcccgcaatccggttcctcttccccctccttctcactgtttgttgtgtgtttgatgtgttaaagcaggagcgagaacccgagcagcgccatgagcaacactaccgtcgtccccagcactgcaggtccgggccccagcggcgggcccggtggcggaggtggtggtggcggcggaggcggcggcaccgaggtaatccaggtgactaatgtctccccgagcgctagctctgagcagatgcggactctcttcggtttcctaggcaagatcgacgaactgcgcctcttcccgccggatgattcgcctttgccagtctcatctcgtgtctgctttgttaagttccatgatccagactcagcagttgtggcacagcatctgacaaacactgtattcgttgacagagctttgatagtcgtaccatatgcagaaggagttattcctgatgaagctaaagctttgtctctgttggcaccagctaatgcagtggcaggtcttctgcctggtggtggactcctgcctactcctaacccacttacccagattggcgctgttccactggctgctttgggggctcctactcttgatcctgcccttgctgcacttgggcttcctggagcaaacttgaactctcagtctcttgctgcagatcagttgctgaagcttatgagtactgttgatcccaagttgaatcatgtagctgctggtctcgtttcaccaagtctgaaatcggatacctctagtaaagaaatagaggaagctatgaaaagagtacgagaagcacagtccctaatttctgctgctatagaaccagataagaaagaagaaaaaagaaggcattcaagatcaagatcacgttctaggaggaggaggactccctcatcttctagacacaggcggtcaagaagcagatcgagacggcggtcacattctaagtctaggagtcggcgacgatccaaaagcccaaggcggagaagatctcattccagagaaagaggtagaaggtcaaggagcacatcaaaaacaagagacaaaaagaaagaagacaaagaaaagaaacgttctaaaacaccaccaaaaagttacagcacagccagacgttctagaagtgcaagcagagagagacgacgacgaagaagcaggagtggcacaagatctcctaaaaagcctcggtctcctaaaagaaaattgtcccgctcaccatcccctaggagacataaaaaggagaagaagaaagataaagacaaagaaagaagtagggatgaaagagaacgatcaacaagcaagaagaagaagagtaaagataaggaaaaggaccgggaaagaaaatcagagagtgataaagatgtaaaacaggttacacgggattatgatgaagaggaacaggggtatgacagtgagaaagagaaaaaagaagagaagaaaccaatagaaacaggttcccctaaaacaaaggaatgttctgtggaaaagggaactggtgattcactaagagaatccaaagtgaatggggatgatcatcatgaagaagacatggatatgagtgactgaatattgcctctgagggagtccaactgtataccggttaatggtctccttgggtgaatcactaggccgtttggcacctcaaccaattttacggctggtttaaggggatagccgtacacataaatttatcaagtttaaatgtcggccactttcgggaaagttgacccgtattggggtaacaa

SEQ ID NO: 316732 - DNA, 1730 bp, Homo sapiens
cggacgcgtgggtcgacccacgcgtccgaaggaaagaaagaaaaaaaccttatctcttgcccttaagatagactcaggataggtagatagctttcactgagtctatcttaaaggaaagaaagaaacaagatttcaaataaaactgtctttggcagtgagtaaatagcatattttgaagtagagttgtatactttttcataagatgtttgggaatttttttcctgaagtaataatttattccacatctacatcagtgaaagctatctacctatcctgagtctatcttaaaggaaaaaaagaaaaaaaccttatctcttgcccttattttgaattttccactctttcattaatttgttttaagctccgtgttggaaaaaaggggtagtgcattttaaattgaccttcatacgcttttaaaataagacaaatctacttgataatgtacctttatttgatctcaagttgtataaaaccaataaatttgtgttactgcagtagtaatcttatgcacacggtgatttcatgttatatatgcaaagtaggcaactgttttcttagttacagaagtttcaagcttcacttttgtgcagtagaaacaaaagtaggctacagtctgtgccatgttgatgtacagtttctgaaattgttttacaagactttgataataaaacccttaaacttatgttcatgttcctgtaaaaccgtatttgtatttatttacgctactgaatgtatgacatttacctcattcattttacaaattctttccctttctgtccacatatttcagtatagtaaaaagaggaagtctatcactgtagtgataattgccatcaaaattgtcaaaaatgatttaatttctatccaaaatagtccttttcttagcttagtatcattttattgcttatttttgtgtgggaatggggttggataaagcaatgaactttagtataaacaaatcccacctatatctagcaaatttatattttcggtgaaatacagatatttgcctttctggagtagtatagaagctgtcaatatgtatctactgtacagtactaaatagtattcatttatgaaatgagtagtgttgggtggctggggttaagggaaaatgagacttggaattgtagcttttatccaagtttgagtataaatagggtttgtttgttttttttaacctaaaaactgaaatgccatatagaaaaacagcattgtttttacagtttgtagtaagtaactttttaaagattttatcaaaaagaattttgtctatagtgagtaaaagaagttctaataatggtcctaatcactgcatttttaaaaaacaaagttcaacacaaatgacatttgttttaaactttagtagataaaaggtgaaccatgtgacatgggcatttttgtaagtcaaaaacaaatttcacatatggtaaacctaatattcacagtgtgttccctcacttgtaatctctgaatacaaatatactagcttttctaaagggaatcatttttttaaaagtagtgccactgacaagatgctacagtgaagattatccattcttaggatatttattttcagtgaacattttctgcacaaaggtagtgttgcactgggacacaagccttttaacagataaccagttgaaatcaaacactgcctccacaccgagttctgttgtgtatttgatagtaaattgatttaaaaataaaagtggtttttgttagaaaaa

SEQ ID NO: 316733 - DNA, 1874 bp, Homo sapiens
agtgtcgtggttggaggcgaggtggggcggccgtttgttttctcgtggtctcgagctcgcgcgctctcatcccctcccccgcggcgtgcggcggggcggagaaacggcggcggcggcggcggcatcggcagcagtagcagaggctgtagcatcggacaccctcctctctcccgcaatccggttcctcttccccctccttctcactgtttgttgtgtgtttgatgtgttaaagcaggagcgagaacccgagcagcgccatgagcaacactaccgtcgtccccagcactgcaggtccgggccccagcggcgggcccggtggcggaggtggtggtggcggcggaggcggcggcaccgaggtaatccaggtgactaatgtctccccgagcgctagctctgagcagatgcggactctcttcggtttcctaggcaagatcgacgaactgcgcctcttcccgccggatgattcgcctttgccagtctcatctcgtgtctgctttgttaagttccatgatccagactcagcagttgtggcacagcatctgacaaacactgtattcgttgacagagctttgatagtcgtaccatatgcagaaggagttattcctgatgaagctaaagctttgtctctgttggcaccagctaatgcagtggcaggtcttctgcctggtggtggactcctgcctactcctaacccacttacccagattggcgctgttccactggctgctttgggggctcctactcttgatcctgcccttgctgcacttgggcttcctggagcaaacttgaactctcagtctcttgctgcagatcagttgctgaagcttatgagtactgttgatcccaagttgaatcatgtagctgctggtctcgtttcaccaagtctgaaatcggatacctctagtaaagaaatagaggaagctatgaaaagagtacgagaagcacagtccctaatttctgctgctatagaaccagataagaaagaagaaaaaagaaggcattcaagatcaagatcacgttctaggaggaggaggactccctcatcttctagacacaggcggtcaagaagcagatcgagacggcggtcacattctaagtctaggagtcggcgacgatccaaaagcccaaggcggagaagatctcattccagagaaagaggtagaaggtcaaggagcacatcaaaaacaagagacaaaaagaaagaagacaaagaaaagaaacgttctaaaacaccaccaaaaagttacagcacagccagacgttctagaagtgcaagcagagagagacgacgacgaagaagcaggagtggcacaagatctcctaaaaagcctcggtctcctaaaagaaaattgtcccgctcaccatcccctaggagacataaaaaggagaagaagaaagataaagacaaagaaagaagtagggatgaaagagaacgatcaacaagcaagaagaagaagagtaaagataaggaaaaggaccgggaaagaaagaagaaaaaagaggcattccaggatcaagatcacgttctaggaggaggaggatccctcatcttctagaaacagggcggtcaagaagcggatcggagacggggggcaccatctaagtctaggagtcggggaggatccaaagcccagggggagagatctcattcggagaagagtagaggtccaggggccatccaacagagcccaacggcaggagcccacgcacgaacgtgttaccgaacaacacaacaaaaacatgggcggcccccccgcaacgtcacacacacggtggggggcccggatagacgtgggaccgccaacacgcgcgcagtggggctccacaaagcgggcgccgtcgacacacgagggggctggtataggacgcacacg

SEQ ID NO: 316734 - DNA, 803 bp, Homo sapiens
agtgtcgtggttggaggcgaggtggggcggccgtttgttttctcgtggtctcgagctcgcgcgctctcatcccctcccccgcggcgtgcggcggggcggagaaacggcggcggcggcggcggcatcggcagcagtagcagaggctgtagcatcggacaccctcctctctcccgcaatccggttcctcttccccctccttctcactgtttgttgtgtgtttgatgtgttaaagcaggagcgagaacccgagcagcgccatgagcaacactaccgtcgtccccagcactgcaggtccgggccccagcggcgggcccggtggcggaggtggtggtggcggcggaggcggcggcaccgaggtaatccaggtgactaatgtctccccgagcgctagctctgagcagatgcggactctcttcggtttcctaggcaagatcgacgaactgcgcctcttcccgccggagtgagtatcgtccaccatcactgttcctgctaacgccgcctcagcctgggcctaacacacacaatttccttaggcccctgtcgctgcttccccgggccaggctgcttgagtggctggtggctggtggatttacttaagacggttgtgttccaggcctacaaaaaaatgcagagaggcagggccagggctttttggaattaggaaacactggctgttattctcgggaaattttttttttccgccttaaattgtgccaacgtggtcgtttggctttggggacttaacgcaagactaaccgcagtctgtacgtcgtatataggttaaatcccttttttaaaaaact

SEQ ID NO: 316735 - DNA, 249 bp, Homo sapiens
gtagtttttcttttcagcagttacagttcttaagaatgttttaatgtattctccttctgacttgtgacttaaacaccattaaggactgaacattttagtcctataaacaagttagttttgtagcctgtgttacttctccaaggttttgaagttggatctttgctgtactacttatatcctgtgaaattgagtcaggctcatcatctaaacaagttaaacctgttgctgtacattttactgtcattctag

SEQ ID NO: 316736 - DNA, 3902 bp, Homo sapiens
agtgtcgtggttggaggcgaggtggggcggccgtttgttttctcgtggtctcgagctcgcgcgctctcatcccctcccccgcggcgtgcggcggggcggagaaacggcggcggcggcggcggcatcggcagcagtagcagaggctgtagcatcggacaccctcctctctcccgcaatccggttcctcttccccctccttctcactgtttgttgtgtgtttgatgtgttaaagcaggagcgagaacccgagcagcgccatgagcaacactaccgtcgtccccagcactgcaggtccgggccccagcggcgggcccggtggcggaggtggtggtggcggcggaggcggcggcaccgaggtaatccaggtgactaatgtctccccgagcgctagctctgagcagatgcggactctcttcggtttcctaggcaagatcgacgaactgcgcctcttcccgccggatgattcgcctttgccagtctcatctcgtgtctgctttgttaagttccatgatccagactcagcagttgtggcacagcatctgacaaacactgtattcgttgacagagctttgatagtcgtaccatatgcagaaggagttattcctgatgaagctaaagctttgtctctgttggcaccagctaatgcagtggcaggtcttctgcctggtggtggactcctgcctactcctaacccacttacccagattggcgctgttccactggctgctttgggggctcctactcttgatcctgcccttgctgcacttgggcttcctggagcaaacttgaactctcagtctcttgctgcagatcagttgctgaagcttatgagtactgttgatcccaagttgaatcatgtagctgctggtctcgtttcaccaagtctgaaatcggatacctctagtaaagaaatagaggaagctatgaaaagagtacgagaagcacagtccctaatttctgctgctatagaaccagataagaaagaagaaaaaagaaggcattcaagatcaagatcacgttctaggaggaggaggactccctcatcttctagacacaggcggtcaagaagcagatcgagacggcggtcacattctaagtctaggagtcggcgacgatccaaaagcccaaggcggagaagatctcattccagagaaagaggtagaaggtcaaggagcacatcaaaaacaagagacaaaaagaaagaagacaaagaaaagaaacgttctaaaacaccaccaaaaagttacagcacagccagacgttctagaagtgcaagcagagagagacgacgacgaagaagcaggagtggcacaagatctcctaaaaagcctcggtctcctaaaagaaaattgtcccgctcaccatcccctaggagacataaaaaggagaagaagaaagataaagacaaagaaagaagtagggatgaaagagaacgatcaacaagcaagaagaagaagagtaaagataaggaaaaggaccgggaaagaaaatcagagagtgataaagatgtaaaacaggttacacgggattatgatgaagaggaacaggggtatgacagtgagaaagagaaaaaagaagagaagaaaccaatagaaacaggttcccctaaaacaaaggaatgttctgtggaaaagggaactggtgattcactaagagaatccaaagtgaatggggatgatcatcatgaagaagacatggatatgagtgactgaatattgcctctgagggagtccaactgtatacctgcatcagtgtcattcctttgtgtgatttcttaatgctgtatttgttcatctcaaacctagatgtatacagctctgagttataaatggttataaagctcctgttactcatattagttatttacatcaaaaagcttttagaaaatggtacgaggtaaccaattcttgtcatggtgaaatctgattgagtaaccaagcagttttactattctggtgctgcttcataacaaaaatgttattaagtaagttcacttatagtatttctataatttgattcattgccgtaatagagccatgtaggaaatgcactgattgcatgttattgtggcaagaatatcctaaatgtcattaaaatcctccaacatgatggatctacttatggtcttgtttgttgacatgacaaattaacattcttatagttacatctggaaatgagcatttgaaatagataatcctttaagccttgtggcaaaatttttgtggcttttgtttaactttgaaaggttattatgcactaaccttttttggtggctaattagggtttaaatacagaaacaagatttcaaataaaactgtctttggcagtgagtaaatagcatattttgaagtagagttgtatactttttcataagatgtttgggaatttttttcctgaagtaataatttattccacatctacatcagtgaaagctatctacctatcctgagtctatcttaaaggaaaaaaagaaaaaaaccttatctcttgcccttattttgaattttccactctttcattaatttgttttaagctccgtgttggaaaaaaggggtagtgcattttaaattgaccttcatacgcttttaaaataagacaaatctacttgataatgtacctttatttgatctcaagttgtataaaaccaataaatttgtgttactgcagtagtaatcttatgcacacggtgatttcatgttatatatgcaaagtaggcaactgttttcttagttacagaagtttcaagcttcacttttgtgcagtagaaacaaaagtaggctacagtctgtgccatgttgatgtacagtttctgaaattgttttacaagactttgataataaaacccttaaacttatgttcatgttcctgtaaaaccgtatttgtatttatttacgctactgaatgtatgacatttacctcattcattttacaaattctttccctttctgtccacatatttcagtatagtaaaaagaggaagtctatcactgtagtgataattgccatcaaaattgtcaaaaatgatttaatttctatccaaaatagtccttttcttagcttagtatcattttattgcttatttttgtgtgggaatggggttggataaagcaatgaactttagtataaacaaatcccacctatatctagcaaatttatattttcggtgaaatacagatatttgcctttctggagtagtatagaagctgtcaatatgtatctactgtacagtactaaatagtattcatttatgaaatgagtagtgttgggtggctggggttaagggaaaatgagacttggaattgtagcttttatccaagtttgagtataaatagggtttgtttgttttttttaacctaaaaactgaaatgccatatagaaaaacagcattgtttttacagtttgtagtaagtaactttttaaagattttatcaaaaagaattttgtctatagtgagtaaaagaagttctaataatggtcctaatcactgcatttttaaaaaacaaagttcaacacaaatgacatttgttttaaactttagtagataaaaggtgaaccatgtgacatgggcatttttgtaagtcaaaaacaaatttcacatatggtaaacctaatattcacagtgtgttccctcacttgtaatctctgaatacaaatatactagcttttctaaagggaatcatttttttaaaagtagtgccactgacaagatgctacagtgaagattatccattcttaggatatttattttcagtgaacattttctgcacaaaggtagtgttgcactgggacacaagccttttaacagataaccagttgaaatcaaacactgcctccacaccgagttctgttgtgtatttgatagtaaattgatttaaaaataaaagtggtttttgttagaaaaa

SEQ ID NO: 316737 - DNA, 3260 bp, Homo sapiens
ggaacgctatacaggacacagtataccaggaaacagctatcatcacggaaagctatactcagggagacaggattaccctggaacagattgaactcgcagaactctttcagcaggatcaattgctgaagctgatgaatactgtagctcccaagttgaatcatgtagctgctggtctcgtttcaccaagtctgaaatcggatacctctagtaaagaaatagaggaagctatgaaaagagtacgagaagcacagtccctaatttctgctgctatagaaccagataagaaagaagaaaaaagaaggcattcaagatcaagatcacgttctaggaggaggaggactccctcatcttctagacacaggcggtcaagaagcagatcgagacggcggtcacattctaagtctaggagtcggcgacgatccaaaagcccaaggcggagaagatctcattccagagaaagaggtagaaggtcaaggagcacatcaaaaacaagagacaaaaagaaagaagacaaagaaaagaaacgttctaaaacaccaccaaaaagttacagcacagccagacgttctagaagtgcaagcagagagagacgacgacgaagaagcaggagtggcacaagatctcctaaaaagcctcggtctcctaaaagaaaattgtcccgctcaccatcccctaggagacataaaaaggagaagaagaaagataaagacaaagaaagaagtagggatgaaagagaacgatcaacaagcaagaagaagaagagtaaagataaggaaaaggaccgggaaagaaaatcagagagtgataaagatgtaaaacaggttacacgggattatgatgaagaggaacaggggtatgacagtgagaaagagaaaaaagaagagaagaaaccaatagaaacaggttcccctaaaacaaaggaatgttctgtggaaaagggaactggtgattcactaagagaatccaaagtgaatggggatgatcatcatgaagaagacatggatatgagtgactgaatattgcctctgagggagtccaactgtatacctgcatcagtgtcattcctttgtgtgatttcttaatgctgtatttgttcatctcaaacctagatgtatacagctctgagttataaatggttataaagctcctgttactcatattagttatttacatcaaaaagcttttagaaaatggtacgaggtaaccaattcttgtcatggtgaaatctgattgagtaaccaagcagttttactattctggtgctgcttcataacaaaaatgaaaagctgcatgcatctacagcaggcatggattgtttatgtcgtatgatatcctttattaagtaagttcacttatagtatttctataatttgattcattgccgtaatagagccatgtaggaaatgcactgattgcatgttattgtggcaagaatatcctaaatgtcattaaaatcctccaacatgatggatctacttatggtcttgtttgttgacatgacaaattaacattcttatagttacatctggaaatgagcatttgaaatagataatcctttaagccttgtggcaaaatttttgtggcttttgtttaactttgaaaggttattatgcactaaccttttttggtggctaattagggtttaaatacagaaacaagatttcaaataaaactgtctttggcagtgagtaaatagcatattttgaagtagagttgtatactttttcataagatgtttgggaatttttttcctgaagtaataatttattccacatctacatcagtgaaagctatctacctatcctgagtctatcttaaaggaaaaaaagaaaaaaaccttatctcttgcccttattttgaattttccactctttcattaatttgttttaagctccgtgttggaaaaaaggggtagtgcattttaaattgaccttcatacgcttttaaaataagacaaatctacttgataatgtacctttatttgatctcaagttgtataaaaccaataaatttgtgttactgcagtagtaatcttatgcacacggtgatttcatgttatatatgcaaagtaggcaactgttttcttagttacagaagtttcaagcttcacttttgtgcagtagaaacaaaagtaggctacagtctgtgccatgttgatgtacagtttctgaaattgttttacaagactttgataataaaacccttaaacttatgttcatgttcctgtaaaaccgtatttgtatttatttacgctactgaatgtatgacatttacctcattcattttacaaattctttccctttctgtccacatatttcagtatagtaaaaagaggaagtctatcactgtagtgataattgccatcaaaattgtcaaaaatgatttaatttctatccaaaatagtccttttcttagcttagtatcattttattgcttatttttgtgtgggaatggggttggataaagcaatgaactttagtataaacaaatcccacctatatctagcaaatttatattttcggtgaaatacagatatttgcctttctggagtagtatagaagctgtcaatatgtatctactgtacagtactaaatagtattcatttatgaaatgagtagtgttgggtggctggggttaagggaaaatgagacttggaattgtagcttttatccaagtttgagtataaatagggtttgtttgttttttttaacctaaaaactgaaatgccatatagaaaaacagcattgtttttacagtttgtagtaagtaactttttaaagattttatcaaaaagaattttgtctatagtgagtaaaagaagttctaataatggtcctaatcactgcatttttaaaaaacaaagttcaacacaaatgacatttgttttaaactttagtagataaaaggtgaaccatgtgacatgggcatttttgtaagtcaaaaacaaatttcacatatggtaaacctaatattcacagtgtgttccctcacttgtaatctctgaatacaaatatactagcttttctaaagggaatcatttttttaaaagtagtgccactgacaagatgctacagtgaagattatccattcttaggatatttattttcagtgaacattttctgcacaaaggtagtgttgcactgggacacaagccttttaacagataaccagttgaaatcaaacactgcctccacaccgagttctgttgtgtatttgatagtaaattgatttaaaaataaaagtggtttttgttagaaaaa

SEQ ID NO: 316738 - DNA, 3903 bp, Homo sapiens
agtgtcgtggttggaggcgaggtggggcggccgtttgttttctcgtggtctcgagctcgcgcgctctcatcccctcccccgcggcgtgcggcggggcggagaaacggcggcggcggcggcggcatcggcagcagtagcagaggctgtagcatcggacaccctcctctctcccgcaatccggttcctcttccccctccttctcactgtttgttgtgtgtttgatgtgttaaagcaggagcgagaacccgagcagcgccatgagcaacactaccgtcgtccccagcactgcaggtccgggccccagcggcgggcccggtggcggaggtggtggtggcggcggaggcggcggcaccgaggtaatccaggtgactaatgtctccccgagcgctagctctgagcagatgcggactctcttcggtttcctaggcaagatcgacgaactgcgcctcttcccgccggatgattcgcctttgccagtctcatctcgtgtctgctttgttaagttccatgatccagactcagcagttgtggcacagcatctgacaaacactgtattcgttgacagagctttgatagtcgtaccatatgcagaaggagttattcctgatgaagctaaagctttgtctctgttggcaccagctaatgcagtggcaggtcttctgcctggtggtggactcctgcctactcctaacccacttacccagattggcgctgttccactggctgctttgggggctcctactcttgatcctgcccttgctgcacttgggcttcctggagcaaacttgaactctcagtctcttgctgcagatcagttgctgaagcttatgagtactgttgatcccaagttgaatcatgtagctgctggtctcgtttcaccaagtctgaaatcggatacctctagtaaagaaatagaggaagctatgaaaagagtacgagaagcacagtccctaatttctgctgctatagaaccagataagaaagaagaaaaaagaaggcattcaagatcaagatcacgttctaggaggaggaggactccctcatcttctagacacaggcggtcaagaagcagatcgagacggcggtcacattctaagtctaggagtcggcgacgatccaaaagcccaaggcggagaagatctcattccagagaaagaggtagaaggtcaaggagcacatcaaaaacaagagacaaaaagaaagaagacaaagaaaagaaacgttctaaaacaccaccaaaaagttacagcacagccagacgttctagaagtgcaagcagagagagacgacgacgaagaagcaggagtggcacaagatctcctaaaaagcctcggtctcctaaaagaaaattgtcccgctcaccatcccctaggagacataaaaaggagaagaagaaagataaagacaaagaaagaagtagggatgaaagagaacgatcaacaagcaagaagaagaagagtaaagataaggaaaaggaccgggaaagaaaatcagagagtgataaagatgtaaaacaggttacacgggattatgatgaagaggaacaggggtatgacagtgagaaagagaaaaaagaagagaagaaaccaatagaaacaggttcccctaaaacaaaggaatgttctgtggaaaagggaactggtgattcactaagagaatccaaagtgaatggggatgatcatcatgaagaagacatggatatgagtgactgaatattgcctctgagggagtccaactgtatacctgcatcagtgtcattcctttgtgtgatttcttaatgctgtatttgttcatctcaaacctagatgtatacagctctgagttataaatggttataaagctcctgttactcatattagttatttacatcaaaaagcttttagaaaatggtacgaggtaaccaattcttgtcatggtgaaatctgattgagtaaccaagcagttttactattctggtgctgcttcataacaaaaatgaaaagctgcatgcatctacagcaggcatggattgtttatgtcgtatgatatcctttattaagtaagttcacttatagtatttctataatttgattcattgccgtaatagagccatgtaggaaatgcactgattgcatgttattgtggcaagaatatcctaaatgtcattaaaatcattcttatagttacatctggaaatgagcatttgaaatagataatcctttaagccttgtggcaaaatttttgtggcttttgtttaactttgaaaggttattatgcactaaccttttttggtggctaattagggtttaaatacagaaacaagatttcaaataaaactgtctttggcagtgagtaaatagcatattttgaagtagagttgtatactttttcataagatgtttgggaatttttttcctgaagtaataatttattccacatctacatcagtgaaagctatctacctatcctgagtctatcttaaaggaaaaaaagaaaaaaaccttatctcttgcccttattttgaattttccactctttcattaatttgttttaagctccgtgttggaaaaaaggggtagtgcattttaaattgaccttcatacgcttttaaaataagacaaatctacttgataatgtacctttatttgatctcaagttgtataaaaccaataaatttgtgttactgcagtagtaatcttatgcacacggtgatttcatgttatatatgcaaagtaggcaactgttttcttagttacagaagtttcaagcttcacttttgtgcagtagaaacaaaagtaggctacagtctgtgccatgttgatgtacagtttctgaaattgttttacaagactttgataataaaacccttaaacttatgttcatgttcctgtaaaaccgtatttgtatttatttacgctactgaatgtatgacatttacctcattcattttacaaattctttccctttctgtccacatatttcagtatagtaaaaagaggaagtctatcactgtagtgataattgccatcaaaattgtcaaaaatgatttaatttctatccaaaatagtccttttcttagcttagtatcattttattgcttatttttgtgtgggaatggggttggataaagcaatgaactttagtataaacaaatcccacctatatctagcaaatttatattttcggtgaaatacagatatttgcctttctggagtagtatagaagctgtcaatatgtatctactgtacagtactaaatagtattcatttatgaaatgagtagtgttgggtggctggggttaagggaaaatgagacttggaattgtagcttttatccaagtttgagtataaatagggtttgtttgttttttttaacctaaaaactgaaatgccatatagaaaaacagcattgtttttacagtttgtagtaagtaactttttaaagattttatcaaaaagaattttgtctatagtgagtaaaagaagttctaataatggtcctaatcactgcatttttaaaaaacaaagttcaacacaaatgacatttgttttaaactttagtagataaaaggtgaaccatgtgacatgggcatttttgtaagtcaaaaacaaatttcacatatggtaaacctaatattcacagtgtgttccctcacttgtaatctctgaatacaaatatactagcttttctaaagggaatcatttttttaaaagtagtgccactgacaagatgctacagtgaagattatccattcttaggatatttattttcagtgaacattttctgcacaaaggtagtgttgcactgggacacaagccttttaacagataaccagttgaaatcaaacactgcctccacaccgagttctgttgtgtatttgatagtaaattgatttaaaaataaaagtggtttttgttagaaaaa

SEQ ID NO: 316739 - DNA, 2838 bp, Homo sapiens
tagagctcggccccattaacattcatttctgagaaacgcaggtagaatgtgcagagcacatcaaaaacaagagacaaaaagaaagaagacaaagaaaagaaacgttctaaaacaccaccaaaaagttacagcacagccagacgttctagaagtgcaagcagagagagacgacgacgaagaagcaggagtggcacaagatctcctaaaaagcctcggtctcctaaaagaaaattgtcccgctcaccatcccctaggagacataaaaaggagaagaagaaagataaagacaaagaaagaagtagggatgaaagagaacgatcaacaagcaagaagaagaagagtaaagataaggaaaaggaccgggaaagaaaatcagagagtgataaagatgtaaaacaggttacacgggattatgatgaagaggaacaggggtatgacagtgagaaagagaaaaaagaagagaagaaaccaatagaaacaggttcccctaaaacaaaggaatgttctgtggaaaagggaactggtgattcactaagagaatccaaagtgaatggggatgatcatcatgaagaagacatggatatgagtgactgaatattgcctctgagggagtccaactgtatacctgcatcagtgtcattcctttgtgtgatttcttaatgctgtatttgttcatctcaaacctagatgtatacagctctgagttataaatggttataaagctcctgttactcatattagttatttacatcaaaaagcttttagaaaatggtacgaggtaaccaattcttgtcatggtgaaatctgattgagtaaccaagcagttttactattctggtgctgcttcataacaaaaatgaaaagctgcatgcatctacagcaggcatggattgtttatgtcgtatgatatcctttattaagtaagttcacttatagtatttctataatttgattcattgccgtaatagagccatgtaggaaatgcactgattgcatgttattgtggcaagaatatcctaaatgtcattaaaatcctccaacatgatggatctacttatggtcttgtttgttgacatgacaaattaacattcttatagttacatctggaaatgagcatttgaaatagataatcctttaagccttgtggcaaaatttttgtggcttttgtttaactttgaaaggttattatgcactaaccttttttggtggctaattagggtttaaatacagaaacaagatttcaaataaaactgtctttggcagtgagtaaatagcatattttgaagtagagttgtatactttttcataagatgtttgggaatttttttcctgaagtaataatttattccacatctacatcagtgaaagctatctacctatcctgagtctatcttaaaggaaaaaaagaaaaaaaccttatctcttgcccttattttgaattttccactctttcattaatttgttttaagctccgtgttggaaaaaaggggtagtgcattttaaattgaccttcatacgcttttaaaataagacaaatctacttgataatgtacctttatttgatctcaagttgtataaaaccaataaatttgtgttactgcagtagtaatcttatgcacacggtgatttcatgttatatatgcaaagtaggcaactgttttcttagttacagaagtttcaagcttcacttttgtgcagtagaaacaaaagtaggctacagtctgtgccatgttgatgtacagtttctgaaattgttttacaagactttgataataaaacccttaaacttatgttcatgttcctgtaaaaccgtatttgtatttatttacgctactgaatgtatgacatttacctcattcattttacaaattctttccctttctgtccacatatttcagtatagtaaaaagaggaagtctatcactgtagtgataattgccatcaaaattgtcaaaaatgatttaatttctatccaaaatagtccttttcttagcttagtatcattttattgcttatttttgtgtgggaatggggttggataaagcaatgaactttagtataaacaaatcccacctatatctagcaaatttatattttcggtgaaatacagatatttgcctttctggagtagtatagaagctgtcaatatgtatctactgtacagtactaaatagtattcatttatgaaatgagtagtgttgggtggctggggttaagggaaaatgagacttggaattgtagcttttatccaagtttgagtataaatagggtttgtttgttttttttaacctaaaaactgaaatgccatatagaaaaacagcattgtttttacagtttgtagtaagtaactttttaaagattttatcaaaaagaattttgtctatagtgagtaaaagaagttctaataatggtcctaatcactgcatttttaaaaaacaaagttcaacacaaatgacatttgttttaaactttagtagataaaaggtgaaccatgtgacatgggcatttttgtaagtcaaaaacaaatttcacatatggtaaacctaatattcacagtgtgttccctcacttgtaatctctgaatacaaatatactagcttttctaaagggaatcatttttttaaaagtagtgccactgacaagatgctacagtgaagattatccattcttaggatatttattttcagtgaacattttctgcacaaaggtagtgttgcactgggacacaagccttttaacagataaccagttgaaatcaaacactgcctccacaccgagttctgttgtgtatttgatagtaaattgatttaaaaataaaagtggtttttgttagaaaaa

SEQ ID NO: 316740 - DNA, 2612 bp, Homo sapiens
agaatcgcttgaacacaggaggaggaggttagcagtgaaccgagatcacaccactgcagtccagcctgggcaacagagctgactcagtctcatcaacaagcaagaagaagaagagtaaagataaggaaaaggaccgggaaagaaaatcagagagtgataaagatgtaaaacaggttacacgggattatgatgaagaggaacaggggtatgacagtgagaaagagaaaaaagaagagaagaaaccaatagaaacaggttcccctaaaacaaaggaatgttctgtggaaaagggaactggtgattcactaagagaatccaaagtgaatggggatgatcatcatgaagaagacatggatatgagtgactgaatattgcctctgagggagtccaactgtatacctgcatcagtgtcattcctttgtgtgatttcttaatgctgtatttgttcatctcaaacctagatgtatacagctctgagttataaatggttataaagctcctgttactcatattagttatttacatcaaaaagcttttagaaaatggtacgaggtaaccaattcttgtcatggtgaaatctgattgagtaaccaagcagttttactattctggtgctgcttcataacaaaaatgaaaagctgcatgcatctacagcaggcatggattgtttatgtcgtatgatatcctttattaagtaagttcacttatagtatttctataatttgattcattgccgtaatagagccatgtaggaaatgcactgattgcatgttattgtggcaagaatatcctaaatgtcattaaaatcctccaacatgatggatctacttatggtcttgtttgttgacatgacaaattaacattcttatagttacatctggaaatgagcatttgaaatagataatcctttaagccttgtggcaaaatttttgtggcttttgtttaactttgaaaggttattatgcactaaccttttttggtggctaattagggtttaaatacagaaacaagatttcaaataaaactgtctttggcagtgagtaaatagcatattttgaagtagagttgtatactttttcataagatgtttgggaatttttttcctgaagtaataatttattccacatctacatcagtgaaagctatctacctatcctgagtctatcttaaaggaaaaaaagaaaaaaaccttatctcttgcccttattttgaattttccactctttcattaatttgttttaagctccgtgttggaaaaaaggggtagtgcattttaaattgaccttcatacgcttttaaaataagacaaatctacttgataatgtacctttatttgatctcaagttgtataaaaccaataaatttgtgttactgcagtagtaatcttatgcacacggtgatttcatgttatatatgcaaagtaggcaactgttttcttagttacagaagtttcaagcttcacttttgtgcagtagaaacaaaagtaggctacagtctgtgccatgttgatgtacagtttctgaaattgttttacaagactttgataataaaacccttaaacttatgttcatgttcctgtaaaaccgtatttgtatttatttacgctactgaatgtatgacatttacctcattcattttacaaattctttccctttctgtccacatatttcagtatagtaaaaagaggaagtctatcactgtagtgataattgccatcaaaattgtcaaaaatgatttaatttctatccaaaatagtccttttcttagcttagtatcattttattgcttatttttgtgtgggaatggggttggataaagcaatgaactttagtataaacaaatcccacctatatctagcaaatttatattttcggtgaaatacagatatttgcctttctggagtagtatagaagctgtcaatatgtatctactgtacagtactaaatagtattcatttatgaaatgagtagtgttgggtggctggggttaagggaaaatgagacttggaattgtagcttttatccaagtttgagtataaatagggtttgtttgttttttttaacctaaaaactgaaatgccatatagaaaaacagcattgtttttacagtttgtagtaagtaactttttaaagattttatcaaaaagaattttgtctatagtgagtaaaagaagttctaataatggtcctaatcactgcatttttaaaaaacaaagttcaacacaaatgacatttgttttaaactttagtagataaaaggtgaaccatgtgacatgggcatttttgtaagtcaaaaacaaatttcacatatggtaaacctaatattcacagtgtgttccctcacttgtaatctctgaatacaaatatactagcttttctaaagggaatcatttttttaaaagtagtgccactgacaagatgctacagtgaagattatccattcttaggatatttattttcagtgaacattttctgcacaaaggtagtgttgcactgggacacaagccttttaacagataaccagttgaaatcaaacactgcctccacaccgagttctgttgtgtatttgatagtaaattgatttaaaaataaaagtggtttttgttagaaaaa

SEQ ID NO: 316741 - DNA, 2844 bp, Homo sapiens
  misc_feature (217)..(217): n is a, c, g, or t
  misc_feature (241)..(241): n is a, c, g, or t
ttgaaaggaaagtgcaatgaaatttgttgaaccttaaaaggggaaacttagacaccccccctcaagcgcaggaccaagtgcagagtggactctttctggatgttgtagtcagacagggtgcgtccatcttccagctgtttcccagcaaagatcaacctctgctgatcaggagggatgccttccttatcttggatctttgccttgacattctcgatgntgtcactgggctccacctcgaggntgatggtcttaccagtcagggtcttcacgaagatctgcatcccacctctgagacggagcaccaggtgcagggtggactctttctgctctccgaattcggcacgaggaaagaagtagggatgaaagagaacgatcaacaagcaagaagaagaagagtaaagataaggaaaaggaccgggaaagaaaatcagagagtgataaagatgtaaaacaggttacacgggattatgatgaagaggaacaggggtatgacagtgagaaagagaaaaaagaagagaagaaaccaatagaaacaggttcccctaaaacaaaggaatgttctgtggtcatcatgaagaagacatggatatgagtgactgaatattgcctctgagggagtccaactgtatacctgcatcagtgtcattcctttgtgtgatttcttaatgctgtatttgttcatctcaaacctagatgtatacagctctgagttataaatggttataaagctcctgttactcatattagttatttacatcaaaaagcttttagaaaatggtacgaggtaaccaattcttgtcatggtgaaatctgattgagtaaccaagcagttttactattctggtgctgcttcataacaaaaatgaaaagctgcatgcatctacagcaggcatggattgtttatgtcgtatgatatcctttattaagtaagttcacttatagtatttctataatttgattcattgccgtaatagagccatgtaggaaatgcactgattgcatgttattgtggcaagaatatcctaaatgtcattaaaatcctccaacatgatggatctacttatggtcttgtttgttgacatgacaaattaacattcttatagttacatctggaaatgagcatttgaaatagataatcctttaagccttgtggcaaaatttttgtggcttttgtttaactttgaaaggttattatgcactaaccttttttggtggctaattagggtttaaatacagaaacaagatttcaaataaaactgtctttggcagtgagtaaatagcatattttgaagtagagttgtatactttttcataagatgtttgggaatttttttcctgaagtaataatttattccacatctacatcagtgaaagctatctacctatcctgagtctatcttaaaggaaaaaaagaaaaaaaccttatctcttgcccttattttgaattttccactctttcattaatttgttttaagctccgtgttggaaaaaaggggtagtgcattttaaattgaccttcatacgcttttaaaataagacaaatctacttgataatgtacctttatttgatctcaagttgtataaaaccaataaatttgtgttactgcagtagtaatcttatgcacacggtgatttcatgttatatatgcaaagtaggcaactgttttcttagttacagaagtttcaagcttcacttttgtgcagtagaaacaaaagtaggctacagtctgtgccatgttgatgtacagtttctgaaattgttttacaagactttgataataaaacccttaaacttatgttcatgttcctgtaaaaccgtatttgtatttatttacgctactgaatgtatgacatttacctcattcattttacaaattctttccctttctgtccacatatttcagtatagtaaaaagaggaagtctatcactgtagtgataattgccatcaaaattgtcaaaaatgatttaatttctatccaaaatagtccttttcttagcttagtatcattttattgcttatttttgtgtgggaatggggttggataaagcaatgaactttagtataaacaaatcccacctatatctagcaaatttatattttcggtgaaatacagatatttgcctttctggagtagtatagaagctgtcaatatgtatctactgtacagtactaaatagtattcatttatgaaatgagtagtgttgggtggctggggttaagggaaaatgagacttggaattgtagcttttatccaagtttgagtataaatagggtttgtttgttttttttaacctaaaaactgaaatgccatatagaaaaacagcattgtttttacagtttgtagtaagtaactttttaaagattttatcaaaaagaattttgtctatagtgagtaaaagaagttctaataatggtcctaatcactgcatttttaaaaaacaaagttcaacacaaatgacatttgttttaaactttagtagataaaaggtgaaccatgtgacatgggcatttttgtaagtcaaaaacaaatttcacatatggtaaacctaatattcacagtgtgttccctcacttgtaatctctgaatacaaatatactagcttttctaaagggaatcatttttttaaaagtagtgccactgacaagatgctacagtgaagattatccattcttaggatatttattttcagtgaacattttctgcacaaaggtagtgttgcactgggacacaagccttttaacagataaccagttgaaatcaaacactgcctccacaccgagttctgttgtgtatttgatagtaaattgatttaaaaataaaagtggtttttgttagaaaaa

SEQ ID NO: 316742 - DNA, 1703 bp, Homo sapiens
  misc_feature (1685)..(1685): n is a, c, g, or t
agtgtcgtggttggaggcgaggtggggcggccgtttgttttctcgtggtctcgagctcgcgcgctctcatcccctcccccgcggcgtgcggcggggcggagaaacggcggcggcggcggcggcatcggcagcagtagcagaggctgtagcatcggacaccctcctctctcccgcaatccggttcctcttccccctccttctcactgtttgttgtgtgtttgatgtgttaaagcaggagcgagaacccgagcagcgccatgagcaacactaccgtcgtccccagcactgcaggtccgggccccagcggcgggcccggtggcggaggtggtggtggcggcggaggcggcggcaccgaggtaatccaggtgactaatgtctccccgagcgctagctctgagcagatgcggactctcttcggtttcctaggcaagatcgacgaactgcgcctcttcccgccggatgattcgcctttgccagtctcatctcgtgtctgctttgttaagttccatgatccagactcagcagttgtggcacagcatctgacaaacactgtattcgttgacagagctttgatagtcgtaccatatgcagaaggagttattcctgatgaagctaaagctttgtctctgttggcaccagctaatgcagtggcaggtcttctgcctggtggtggactcctgcctactcctaacccacttacccagattggcgctgttccactggctgctttgggggctcctactcttgatcctgcccttgctgcacttgggcttcctggagcaaacttgaactctcagtctcttgctgcagatcagttgctgaagcttatgagtactgttgatcccaagttgaatcatgtagctgctggtctcgtttcaccaagtctgaaatcggatacctctagtaaagaaatagaggaagctatgaaaagagtacgagaagcacagtccctaatttctgctgctatagaaccagataagaaagaagaaaaaagaaggcattcaagatcaagatcacgttctaggaggaggaggactccctcatcttctagacacaggcggtcaagaagcagatcgagacggcggtcacattctaagtctaggagtcggcgacgatccaaaagcccaaggcggagaagatctcattccagagaaagaggtagaaggtcaaggagcacatcaaaaacaagagacaaaaagaaagaagacaaagaaaagaaacgttctaaaacaccaccaaaaagttacagcacagccagacgttctagaagtgcaagcagagagagacgacgacgaagaagcaggagtggcacaagatctcctaaaaagcctcggtctcctaaaagaaaattgtcccgctcaccatcccctaggagacataaaaaggagaagaagaaagataaagacaaagaaagaagtagggatgaaagagaacgatcaacaagcaagaagaagaagagtaaagataaggaaaaggaccgggaaagaaaatcagagagtgataaagatgtaaaacaggttacacgggattatgatgaagaggaacaggggtatgacagtgagaaagagaaaaaagaagagaagaaaccaatagaaacaggttcccctaaaacaaaggaatgttctgtggaaaagggaactggtgattcactaagagaatccaaagtgaatggggatgactggagnccctggtatcctctacga

SEQ ID NO: 316743 - DNA, 1944 bp, Homo sapiens
agtgtcgtggttggaggcgaggtggggcggccgtttgttttctcgtggtctcgagctcgcgcgctctcatcccctcccccgcggcgtgcggcggggcggagaaacggcggcggcggcggcggcatcggcagcagtagcagaggctgtagcatcggacaccctcctctctcccgcaatccggttcctcttccccctccttctcactgtttgttgtgtgtttgatgtgttaaagcaggagcgagaacccgagcagcgccatgagcaacactaccgtcgtccccagcactgcaggtccgggccccagcggcgggcccggtggcggaggtggtggtggcggcggaggcggcggcaccgaggtaatccaggtgactaatgtctccccgagcgctagctctgagcagatgcggactctcttcggtttcctaggcaagatcgacgaactgcgcctcttcccgccggatgattcgcctttgccagtctcatctcgtgtctgctttgttaagttccatgatccagactcagcagttgtggcacagcatctgacaaacactgtattcgttgacagagctttgatagtcgtaccatatgcagaaggagttattcctgatgaagctaaagctttgtctctgttggcaccagctaatgcagtggcaggtcttctgcctggtggtggactcctgcctactcctaacccacttacccagattggcgctgttccactggctgctttgggggctcctactcttgatcctgcccttgctgcacttgggcttcctggagcaaacttgaactctcagtctcttgctgcagatcagttgctgaagcttatgagtactgttgatcccaagttgaatcatgtagctgctggtctcgtttcaccaagtctgaaatcggatacctctagtaaagaaatagaggaagctatgaaaagagtacgagaagcacagtccctaatttctgctgctatagaaccagataagaaagaagaaaaaagaaggcattcaagatcaagatcacgttctaggaggaggaggactccctcatcttctagacacaggcggtcaagaagcagatcgagacggcggtcacattctaagtctaggagtcggcgacgatccaaaagcccaaggcggagaagatctcattccagagaaagaggtagaaggtcaaggagcacatcaaaaacaagagacaaaaagaaagaagacaaagaaaagaaacgttctaaaacaccaccaaaaagttacagcacagccagacgttctagaagtgcaagcagagagagacgacgacgaagaagcaggagtggcacaagatctcctaaaaagcctcggtctcctaaaagaaaattgtcccgctcaccatcccctaggagacataaaaaggagaagaagaaagataaagacaaagaaagaagtagggatgaaagagaacgcaacgcaacgacacgaacgaacgacgtacacacgactaacggacacacacggacccgggaacagacacaatccgacgacgtcgactaaacgactgtacaacaccacggttaccccgggacttactgactgaccgacggacacacgggggttattgaacaaggtggacgaaacagacgacaacaacacaacaacacaacagaagggggaggagccgaccccataaaagatactccccctgtcaagaggggcccccacacgggcatatacgcgccgataccccagcagatatatcatcatggaagcacaacacgggggggtcacgcactaaataacgcgagaacgtcagcaacaaaaacaataaagagcacaatgggacaacaaggaggacgcgcacggctataacacaagaagcgagacaagacgcagaacactgggggagacacacacccggccacccgaccacgcgggaacacttaataggcgacacaacggacaaccccataacacg

SEQ ID NO: 316744 - DNA, 6830 bp, Homo sapiens
gagaaggtaaacgagcaagactaatactaatgagaggatcacctgagcccaggagtttgagactacagtagctatgatggtgccactacactccagcctgggtaaaagagtgagacctcatctctttaaaaaaaaattctgccaggagcggtggttcatgcctataatcccaacactttaggaggctgaggctggtggatcacttgaagccaggaattcaagacgaacctgggcaaaaagtgagacccctgtctctacaaaaaaaattaattttttaaaaaaactagctgggcagctggcgtggtggctcacacctgtaatcccagcactttgggaggctgaggtgggtggatcatgcggtcaggagttcgagaccagcctggccaacatagtgaaaccccatctctactaaaaatacaaaaaaaaaaaattaaccaggtgtagtggcgggcgcctataatcccagctacttgggaggccaaggcaggagaatcgctcgaaaccagaaggtggaggtggcagtgagccgagatcacaccattgcactccagcctgggcaacaagagcaaaactctatctcaaaaaaaaaaaaaaaaaactagctggacatggtggcatgtacatacagtcccagctactcaggaggctgaagcaggatgatagcttgattacccaagagttcaaggctgcagtgaactatgattgtgccactgcactccagcctgggcaacagagcaagaccccatctcgtttaaaaaaaaattatattatttgaatgggtatcttgtttgttttaactgtaaatatttacagtacttggttttacttgggagatttgtatagcttacaaatcttgtccctatggattcagttctcttacccacagacacagaaccaaaatcaggagttccacaaggagtggtggtgagtcctgcctttggcaaacacgcacctgcaagctttgctctagggattgaatcccttacccagtggggcccataggctagaggactttgtggaactttggaacttgtcttaacaatggaggaggggataaaataagtttatctttgggctggaatttgtactaatttttctttctcttgtagcaccgaacaagatttgtgatgaaatggagcctggaacaaactcttttcgggtagaatttcctgatttttccagcaccattctacagaaactgaaccagcagcgccagcaaggacaattatgtgacgtctccattgttgtccaaggccacattttccgggcacacaaagccgttcttgctgccagttcaccctacttttgtgaccaggtactcctgaaaaacagcaggagaattgttttgcctgatgtgatgaacccaagagtgtttgagaacattctcctatctagttatacaggacgtctagtaatgcccgctccagaaattgttagttacttgacagcggcaagcttcctccagatgtggcatgtggtagacaaatgcactgaagttttagagggaaaccctacagtcctttgtcagaagctaaatcatggcagtgaccaccagtcaccaagcagcagtagttataatggcctggtagagagctttgagctgggctctgggggtcatactgattttcccaaagcccaagaactgagagatggtgaaaatgaagaggagagcaccaaagacgagctgtcatcccagctcaccgagcacgaatacctgcccagcaactcgtccacagagcatgaccgcctgagcacggaaatggcaagccaggatggggaggagggcgccagcgacagcgccgagttccactacacccggcccatgtacagcaagcccagcatcatggctcacaaacgctggatccacgtgaagcccgagcgcttagaacaggcttgcgagggcatggatgtgcacgcgacctacgacgagcaccaggtcacagagtccatcaacaccgtgcagacagagcacacggtgcagccttcgggagtggaggaggacttccacatcggggagaagaaagtggaagctgagtttgatgaacaggctgatgaaagcaattatgatgagcaggtggatttctatggctcttccatggaagagttttccggagagaggtcagatgggaatctaattgggcacagacaggaggctgccctcgcagcaggttacagtgagaatattgaaatggtaacagggattaaagaagaagcttcccacttaggattctcagccaccgacaagctgtatccttgtcagtgtgggaaaagtttcactcacaagagtcagagagatcggcacatgagcatgcacctcggtcttcggccttacggctgtggggtctgcggtaagaaattcaaaatgaagcaccatctcgtgggccacatgaaaattcacacaggcataaagccgtatgagtgtaatatctgtgcaaagaggtttatgtggagggacagtttccaccggcatgtgacttcttgtactaagtcctacgaagctgcaaaggctgagcagaatacaactgaggctaactaaaaataggatctggcccttgagtggcatgcacaaaaataaactatggtaattaatgcaaatctgggcacagatgatgcgtgctacttgctattatgagagaagcttaaaaaaaaaaaggaagatatttctgaaagaccagctctaagtaggccaattaaaaaaatctaattcctcaaatttgtgtgttccagtcctggcctggaatgggtaatggggtgagttaacccaccgcccagctggcaagggaaaccttctgactggttgtgatcgaaacaggtggacagagacacctgcacttggaactggactccacccaccagttccattttgggtggcagcagctttggatcactcattattacaaggtcatgctgaaattttattttgctcttgctatagatacttaggtaatgtggatttgttttggtagctatttcactgaaggaagtgctacttatataaaagctagaaataatgtgattcctaggatgagaaattggttaacagagctctgttgtctggttttagtctttctaaaggatattttaactaaaactatggagatgctaagagagtgactttctaaatatgaaacagataatttacggtacaaggctgacatagtgcccttgtcagtttctgtaagatgccactactgtcacaaggtgtttcagactcttgataaggcagtgttttgtattttagttctaacattgagtttggacaattttatctaattgtaattctctagggtgccagagataggtatttctcattggtttgctttcccaaatcctgtttggttaattgtagcctccatacagtggggtcttctctgtggctggtagacaccaagctgctgtgactgaccacggtaccacgggctgccacagcccctgctctgtcttagattatggtgctttacaaagagagtggtccatgaccacacttagtgagaaggagccacaagttgtggctgagagttccctgtgaacttgagtagttcatagagtgctaaggtgacactccaccaaccagagtgagagggcagataggcaggattctatgagtggttatacttaagggggacaaaactgcccaagaagaatcttgagaatacactctttcaaggtgggggagatactctttagagggtacactgagctaatactaccagttctttatgagcactggaatgtgtttgtaaaaggagtcctaagtttagcaaggtagtctacagaaccatgctcccacattatagataaagctgcttaaacttaaaagtccacaaagctacgccgaccagaaaaaaaaaattaaaaaaacaaacaagaaaagcaactattctgagaccttttctgcccatcagttagatgatttaggttaaaaagaaaggtaatattgcacatgcttttaagctgtgtaacatacctgaggttatcaccagggtaggacagggtgctactaccatgtcatcttttccacaatcgtactgggttatttacttctaaatagaaacttttttttcttaaaataaaaataatttttcttggatttggggtgaaattttatttgaaaagtttggctttgctgtaatgtaatagacattgctggcaatggcctctgattctcaagctcctaacaccagggtgtttacttgttgaacattgtctggaaagaggaaagaaaatacttatttaccagttaactcttgtaagcaagattacaaacagggatttattcacaacactgtatcattctcgatatataaaaagcactttgtatttaaaactttattataaatatatatatatattgtttttttttaaacctagaaactagatattacctcttggttgtttgccacattaatagcttctcttagtattgaaacgttactggttagcagtcttttctctgtgtacctgacacacgtatactgaggggattgtacaatcaagcctattgtctccttttctttcactcatggtagaggccagtgggttttaggtatgatcctagccattatatttgaggagaaattgttctattactcctactaatttcagtactaaggtggtgatgccattttgttctgccaaaaactgatcaccctctcccatggtattagcagagcattttctgcctgtttggaaggtttgatgtcctgtttctcattgaagactatttacatgatcattaggacattgcaggagaagtctgagaggtaaaaatacagatattctgggagagtcgtggtccttcagttctgctgaaatcagcatagtgcccttgtcatgaggaagagtttctgttcagccaagagtggtggcacgcttgggtggtagttttggaagcagtcagttgtgctaggacttatttaatatgttgtgaagagaagagtgtcttcttgaaagccttatgtgtccatcagctactaaatgtagaacttaaataagttgctcacatctgttcttttagtgttttgtggtatttgaggttttggcaaaaattgggatttttttatcaggcagccagagcctgggaggtggtagggtgtctgaaatgctggccatgttcagagaggcaggagaagggggttgctttcatttgaatattaaaagtgaatttttgtaaactctggtttttacctttttttcatccccacgttgagttggaggaatagtctcttctcttcacctcaatatagctttagaaaatctttatccttcctaataagtttggatggttgtgggtaacattgttcaaacaatctttcagggatcacgtcaatggcctacaaccaagctatttgtcccctactttgagtcttaactgtggtttttcttcaatccccatgggaaagggcttcaaggcaccaccagtggtatttaatattcatacttggggccaggcatggtggctcacgcctgtaatcccagcactttgggaggccgagatgggtggatcacctgaggtcaggagtttgtgaccagcctgaccaacatagtgaaaccccatctctactaaaaatacaaaaattagccaggcgtggtggcgcacacctgtaatcccagctactcgggaggcggaggcaggagaatcacttgaacctgggaggcggaggttgcagtgagccgcgattgcaccaccacactccagcctgcgcgacagatcgagactctgtctcaaaaaaaaaaaaaaaaatttcatacttatgccatgcttttacctttagatacacacgttacagtaatccacgtggtgaagtgcatgtcaccgttaactaaggaaggactgcggtaacttaccctgcagggctgtaggttgcctgcaggcgctccaggcccccagcctgttgattccgatttctaggtctcatcttcctctggtcccttttggccactactttaaaagcttgcccaaagggatcccctccattctagtgggcatttgctgaactaacctgcccctaaggctggcttctaaccaccggggaaagctgcttagcctccagggctccctccttgagaggctcacacacccccaagctgctgtggagtgaatttgagacggagcagaagctgcaaagctgtgctttccctggggaaggggatgtgctgcggcctcctgggtgggcgtggagagggcgccatcacaacgagtccaggtttttgcttttggaaggtctctgataatttaggggtgctggaaaccagcactgtgttatccccaatccctcctgtgccaccagttttgtgatttaggttgctttagtgggtgactaacttttgttcagtgaaaccagggtttgtttggggtttttttctttgctacttacatatttaaaggtacaagtttcttatttcaaatctctactgatagtgccctatggggagatgctggaacacattttgcaaatgtgacttttttttttttttttaatttttgcttgaagcctgtgtcatgttagttgctgctgccttctttccttttgtgaggttcccaatgtttcgtccagaaaagtactttatttatgcaagtcaggtgactcttaggccacaaaaccatttgatgataaacagattatcattaggtgcatatcttattgatattttgtgaaatgttatgcctatgttgcaaaagttgaatagttttgtctttatatattgctgtcttcagtgtacagcatggttttacttaattgaatgttaatgtttaatattttcttcttatagaagagatcatgcccttttgtatgacatgttttaataaatgttatctgtcaactttg

SEQ ID NO: 316745 - DNA, 7015 bp, Homo sapiens
gagaaggtaaacgagcaagactaatactaatgagaggatcacctgagcccaggagtttgagactacagtagctatgatggtgccactacactccagcctgggtaaaagagtgagacctcatctctttaaaaaaaaattctgccaggagcggtggttcatgcctataatcccaacactttaggaggctgaggctggtggatcacttgaagccaggaattcaagacgaacctgggcaaaaagtgagacccctgtctctacaaaaaaaattaattttttaaaaaaactagctgggcagctggcgtggtggctcacacctgtaatcccagcactttgggaggctgaggtgggtggatcatgcggtcaggagttcgagaccagcctggccaacatagtgaaaccccatctctactaaaaatacaaaaaaaaaaaattaaccaggtgtagtggcgggcgcctataatcccagctacttgggaggccaaggcaggagaatcgctcgaaaccagaaggtggaggtggcagtgagccgagatcacaccattgcactccagcctgggcaacaagagcaaaactctatctcaaaaaaaaaaaaaaaaaactagctggacatggtggcatgtacatacagtcccagctactcaggaggctgaagcaggatgatagcttgattacccaagagttcaaggctgcagtgaactatgattgtgccactgcactccagcctgggcaacagagcaagaccccatctcgtttaaaaaaaaattatattatttgaatgggtatcttgtttgttttaactgtaaatatttacagtacttggttttacttgggagatttgtatagcttacaaatcttgtccctatggattcagttctcttacccacagacacagaaccaaaatcaggagttccacaaggagtggtggtgagtcctgcctttggcaaacacgcacctgcaagctttgctctagggattgaatcccttacccagtggggcccataggctagaggactttgtggaactttggaacttgtcttaacaatggaggaggggataaaataagtttatctttgggctggaatttgtactaatttttctttctcttgtagcaccgaacaagatttgtgatgaaatggagcctggaacaaactcttttcgggtagaatttcctgatttttccagcaccattctacagaaactgaaccagcagcgccagcaaggacaattatgtgacgtctccattgttgtccaaggccacattttccgggcacacaaagccgttcttgctgccagttcaccctacttttgtgaccaggtactcctgaaaaacagcaggagaattgttttgcctgatgtgatgaacccaagagtgtttgagaacattctcctatctagttatacaggacgtctagtaatgcccgctccagaaattgttagttacttgacagcggcaagcttcctccagatgtggcatgtggtagacaaatgcactgaagttttagagggaaaccctacagtcctttgtcagaagctaaatcatggcagtgaccaccagtcaccaagcagcagtagttataatggcctggtagagagctttgagctgggctctgggggtcatactgattttcccaaagcccaagaactgagagatggtgaaaatgaagaggagagcaccaaagacgagctgtcatcccagctcaccgagcacgaatacctgcccagcaactcgtccacagagcatgaccgcctgagcacggaaatggcaagccaggatggggaggagggcgccagcgacagcgccgagttccactacacccggcccatgtacagcaagcccagcatcatggctcacaaacgctggatccacgtgaagcccgagcgcttagaacaggcttgcgagggcatggatgtgcacgcgacctacgacgagcaccaggtcacagagtccatcaacaccgtgcagacagagcacacggtgcagccttcgggagtggaggaggacttccacatcggggagaagaaagtggaagctgagtttgatgaacaggctgatgaaagcaattatgatgagcaggtggatttctatggctcttccatggaagagttttccggagagaggtcagatgggaatctaattgggcacagacaggaggctgccctcgcagcaggttacagtgagaatattgaaatggtaacagggattaaagaagaagcttcccacttaggattctcagccaccgacaagctgtatccttgtcagtgtgggaaaagtttcactcacaagagtcagagagatcggcacatgagcatgcacctcggtcttcggccttacggctgtggggtctgcggtaagaaattcaaaatgaagcaccatctcgtgggccacatgaaaattcacacaggcataaagccgtatgagtgtaatatctgtgcaaagaggtttatgtggagggacagtttccaccggcatgtgacttcttgtactaagtcctacgaagctgcaaaggctgagcagaatacaactgaggctaactaaaaataggatctggcccttgagtggcatgcacaaaaataaactatggtaattaatgcaaatctgggcacagatgatgcgtgctacttgctattatgagagaagcttaaaaaaaaaaaggaagatatttctgaaagaccagctctaagtaggccaattaaaaaaatctaattcctcaaatttgtgtgttccagtcctggcctggaatgggtaatggggtgagttaacccaccgcccagctggcaagggaaaccttctgactggttgtgatcgaaacaggtggacagagacacctgcacttggaactggactccacccaccagttccattttgggtggcagcagctttggatcactcattattacaaggtcatgctgaaattttattttgctcttgctatagatacttaggtaatgtggatttgttttggtagctatttcactgaaggaagtgctacttatataaaagctagaaataatgtgattcctaggatgagaaattggttaacagagctctgttgtctggttttagtctttctaaaggatattttaactaaaactatggagatgctaagagagtgactttctaaatatgaaacagataatttacggtacaaggctgacatagtgcccttgtcagtttctgtaagatgccactactgtcacaaggtgtttcagactcttgataaggcagtgttttgtattttagttctaacattgagtttggacaattttatctaattgtaattctctagggtgccagagataggtatttctcattggtttgctttcccaaatcctgtttggttaattgtagcctccatacagtggggtcttctctgtggctggtagacaccaagctgctgtgactgaccacggtaccacgggctgccacagcccctgctctgtcttagattatggtgctttacaaagagagtggtccatgaccacacttagtgagaaggagccacaagttgtggctgagagttccctgtgaacttgagtagttcatagagtgctaaggtgacactccaccaaccagagtgagagggcagataggcaggattctatgagtggttatacttaagggggacaaaactgcccaagaagaatcttgagaatacactctttcaaggtgggggagatactctttagagggtacactgagctaatactaccagttctttatgagcactggaatgtgtttgtaaaaggagtcctaagtttagcaaggtagtctacagaaccatgctcccacattatagataaagctgcttaaacttaaaagtccacaaagctacgccgaccagaaaaaaaaaattaaaaaaacaaacaagaaaagcaactattctgagaccttttctgcccatcagttagatgatttaggttaaaaagaaaggtaatattgcacatgcttttaagctgtgtaacatacctgaggttatcaccagggtaggacagggtgctactaccatgtcatcttttccacaatcgtactgggttatttacttctaaatagaaacttttttttcttaaaataaaaataatttttcttggatttggggtgaaattttatttgaaaagtttggctttgctgtaatgtaatagacattgctggcaatggcctctgattctcaagctcctaacaccagggtgtttacttgttgaacattgtctggaaagaggaaagaaaatacttatttaccagttaactcttgtaagcaagattacaaacagggatttattcacaacactgtatcattctcgatatataaaaagcactttgtatttaaaactttattataaatatatatatatattgtttttttttaaacctagaaactagatattacctcttggttgtttgccacattaatagcttctcttagtattgaaacgttactggttagcagtcttttctctgtgtacctgacacacgtatactgaggggattgtacaatcaagcctattgtctccttttctttcactcatggtagaggccagtgggttttaggtatgatcctagccattatatttgaggagaaattgttctattactcctactaatttcagtactaaggtggtgatgccattttgttctgccaaaaactgatcaccctctcccatggtattagcagagcattttctgcctgtttggaaggtttgatgtcctgtttctcattgaagactatttacatgatcattaggacattgcaggagaagtctgagaggtaaaaatacagatattctgggagagtcgtggtccttcagttctgctgaaatcagcatagtgcccttgtcatgaggaagagtttctgttcagccaagagtggtggcacgcttgggtggtagttttggaagcagtcagttgtgctaggacttatttaatatgttgtgaagagaagagtgtcttcttgaaagccttatgtgtccatcagctactaaatgtagaacttaaataagttgctcacatctgttcttttagtgttttgtggtatttgaggttttggcaaaaattgggatttttttatcaggcagccagagcctgggaggtggtagggtgtctgaaatgctggccatgttcagagaggcaggagaagggggttgctttcatttgaatattaaaagtgaatttttgtaaactctggtttttacctttttttcatccccacgttgagttggaggaatagtctcttctcttcacctcaatatagctttagaaaatctttatccttcctaataagtttggatggttgtgggtaacattgttcaaacaatctttcagggatcacgtcaatggcctacaaccaagctatttgtcccctactttgagtcttaactgtggtttttcttcaatccccatgggaaagggcttcaaggcaccaccagtggtatttaatattcatacttggggccaggcatggtggctcacgcctgtaatcccagcactttgggaggccgagatgggtggatcacctgaggtcaggagtttgtgaccagcctgaccaacatagtgaaaccccatctctactaaaaatacaaaaattagccaggcgtggtggcgcacacctgtaatcccagctactcgggaggcggaggcaggagaatcacttgaacctgggaggcggaggttgcagtgagccgcgattgcaccaccacactccagcctgcgcgacagatcgagactctgtctcaaaaaaaaaaaaaaaaatttcatacttatgccatgcttttacctttagatacacacgttacagtaatccacgtggtgaagtgcatgtcaccgttaactaaggaaggactgcggtaacttaccctgcagggctgtaggttgcctgcaggcgctccaggcccccagcctgttgattccgatttctaggtctcatcttcctctggtcccttttggccactactttaaaagcttgcccaaagggatcccctccattctagtgggcatttgctgaactaacctgcccctaaggctggcttctaaccaccggggaaagctgcttagcctccagggctccctccttgagaggctcacacacccccaagctgctgtggagtgaatttgagacggagcagaagctgcaaagctgtgctttccctggggaaggggatgtgctgcggcctcctgggtgggcgtggagagggcgccatcacaacgagtccaggtttttgcttttggaaggtctctgataatttaggggtgctggaaaccagcactgtgttatccccaatccctcctgtgccaccagttttgtgatttaggttgctttagtgggtgactaacttttgttcagtgaaaccagggtttgtttggggtttttttctttgctacttacatatttaaaggtacaagtttcttatttcaaatctctactgatagtgccctatggggagatgctggaacacattttgcaaatgtgacttttttttttttttttaatttttgcttgaagcctgtgtcatgttagttgctgctgccttctttccttttgtgaggttcccaatgtttcgtccagaaaagtactttatttatgcaagtcaggtgactcttaggccacaaaaccatttgatgataaacagattatcattaggtgcatatcttattgatattttgtgaaatgttatgcctatgttgcaaaagttgaatagttttgtctttatatattgctgtcttcagtgtacagcatggttttacttaattgaatgttaatgtttaatattttcttcttatagaagagatcatgcccttttgtatgacatgttttaataaatgttatctgtcaactttgtaaaagttttgtttttcactatgagtagatgaccacatcttgtttgactctgggttttgccacctgagaatacagttatatggtggcgttttggtaagtaaatgccaaataatctgatccaatgggcagtgagtgactgccaggcaggcatttatagtaatattttagacccccactggcccctt

SEQ ID NO: 316746 - DNA, 5951 bp, Homo sapiens
tgaaggcacaggctgaatctgttgcggcagctgaggctacaacaggcctgcgccggcggcagagaggatatcttgggcgggggatgtgagcgctgagcccttggcagaagtcaatgtgattttaatttgaagcaaaactgaaatgggttcttcttcctcattctattcatgttgctttttgatggccatggcataaggaactctatcccaggaatacagctttgcattagcaccgaacaagatttgtgatgaaatggagcctggaacaaactcttttcgggtagaatttcctgatttttccagcaccattctacagaaactgaaccagcagcgccagcaaggacaattatgtgacgtctccattgttgtccaaggccacattttccgggcacacaaagccgttcttgctgccagttcaccctacttttgtgaccaggtactcctgaaaaacagcaggagaattgttttgcctgatgtgatgaacccaagagtgtttgagaacattctcctatctagttatacaggacgtctagtaatgcccgctccagaaattgttagttacttgacagcggcaagcttcctccagatgtggcatgtggtagacaaatgcactgaagttttagagggaaaccctacagtcctttgtcagaagctaaatcatggcagtgaccaccagtcaccaagcagcagtagttataatggcctggtagagagctttgagctgggctctgggggtcatactgattttcccaaagcccaagaactgagagatggtgaaaatgaagaggagagcaccaaagacgagctgtcatcccagctcaccgagcacgaatacctgcccagcaactcgtccacagagcatgaccgcctgagcacggaaatggcaagccaggatggggaggagggcgccagcgacagcgccgagttccactacacccggcccatgtacagcaagcccagcatcatggctcacaaacgctggatccacgtgaagcccgagcgcttagaacaggcttgcgagggcatggatgtgcacgcgacctacgacgagcaccaggtcacagagtccatcaacaccgtgcagacagagcacacggtgcagccttcgggagtggaggaggacttccacatcggggagaagaaagtggaagctgagtttgatgaacaggctgatgaaagcaattatgatgagcaggtggatttctatggctcttccatggaagagttttccggagagaggtcagatgggaatctaattgggcacagacaggaggctgccctcgcagcaggttacagtgagaatattgaaatggtaacagggattaaagaagaagcttcccacttaggattctcagccaccgacaagctgtatccttgtcagtgtgggaaaagtttcactcacaagagtcagagagatcggcacatgagcatgcacctcggtcttcggccttacggctgtggggtctgcggtaagaaattcaaaatgaagcaccatctcgtgggccacatgaaaattcacacaggcataaagccgtatgagtgtaatatctgtgcaaagaggtttatgtggagggacagtttccaccggcatgtgacttcttgtactaagtcctacgaagctgcaaaggctgagcagaatacaactgaggctaactaaaaataggatctggcccttgagtggcatgcacaaaaataaactatggtaattaatgcaaatctgggcacagatgatgcgtgctacttgctattatgagagaagcttaaaaaaaaaaaggaagatatttctgaaagaccagctctaagtaggccaattaaaaaaatctaattcctcaaatttgtgtgttccagtcctggcctggaatgggtaatggggtgagttaacccaccgcccagctggcaagggaaaccttctgactggttgtgatcgaaacaggtggacagagacacctgcacttggaactggactccacccaccagttccattttgggtggcagcagctttggatcactcattattacaaggtcatgctgaaattttattttgctcttgctatagatacttaggtaatgtggatttgttttggtagctatttcactgaaggaagtgctacttatataaaagctagaaataatgtgattcctaggatgagaaattggttaacagagctctgttgtctggttttagtctttctaaaggatattttaactaaaactatggagatgctaagagagtgactttctaaatatgaaacagataatttacggtacaaggctgacatagtgcccttgtcagtttctgtaagatgccactactgtcacaaggtgtttcagactcttgataaggcagtgttttgtattttagttctaacattgagtttggacaattttatctaattgtaattctctagggtgccagagataggtatttctcattggtttgctttcccaaatcctgtttggttaattgtagcctccatacagtggggtcttctctgtggctggtagacaccaagctgctgtgactgaccacggtaccacgggctgccacagcccctgctctgtcttagattatggtgctttacaaagagagtggtccatgaccacacttagtgagaaggagccacaagttgtggctgagagttccctgtgaacttgagtagttcatagagtgctaaggtgacactccaccaaccagagtgagagggcagataggcaggattctatgagtggttatacttaagggggacaaaactgcccaagaagaatcttgagaatacactctttcaaggtgggggagatactctttagagggtacactgagctaatactaccagttctttatgagcactggaatgtgtttgtaaaaggagtcctaagtttagcaaggtagtctacagaaccatgctcccacattatagataaagctgcttaaacttaaaagtccacaaagctacgccgaccagaaaaaaaaaattaaaaaaacaaacaagaaaagcaactattctgagaccttttctgcccatcagttagatgatttaggttaaaaagaaaggtaatattgcacatgcttttaagctgtgtaacatacctgaggttatcaccagggtaggacagggtgctactaccatgtcatcttttccacaatcgtactgggttatttacttctaaatagaaacttttttttcttaaaataaaaataatttttcttggatttggggtgaaattttatttgaaaagtttggctttgctgtaatgtaatagacattgctggcaatggcctctgattctcaagctcctaacaccagggtgtttacttgttgaacattgtctggaaagaggaaagaaaatacttatttaccagttaactcttgtaagcaagattacaaacagggatttattcacaacactgtatcattctcgatatataaaaagcactttgtatttaaaactttattataaatatatatatatattgtttttttttaaacctagaaactagatattacctcttggttgtttgccacattaatagcttctcttagtattgaaacgttactggttagcagtcttttctctgtgtacctgacacacgtatactgaggggattgtacaatcaagcctattgtctccttttctttcactcatggtagaggccagtgggttttaggtatgatcctagccattatatttgaggagaaattgttctattactcctactaatttcagtactaaggtggtgatgccattttgttctgccaaaaactgatcaccctctcccatggtattagcagagcattttctgcctgtttggaaggtttgatgtcctgtttctcattgaagactatttacatgatcattaggacattgcaggagaagtctgagaggtaaaaatacagatattctgggagagtcgtggtccttcagttctgctgaaatcagcatagtgcccttgtcatgaggaagagtttctgttcagccaagagtggtggcacgcttgggtggtagttttggaagcagtcagttgtgctaggacttatttaatatgttgtgaagagaagagtgtcttcttgaaagccttatgtgtccatcagctactaaatgtagaacttaaataagttgctcacatctgttcttttagtgttttgtggtatttgaggttttggcaaaaattgggatttttttatcaggcagccagagcctgggaggtggtagggtgtctgaaatgctggccatgttcagagaggcaggagaagggggttgctttcatttgaatattaaaagtgaatttttgtaaactctggtttttacctttttttcatccccacgttgagttggaggaatagtctcttctcttcacctcaatatagctttagaaaatctttatccttcctaataagtttggatggttgtgggtaacattgttcaaacaatctttcagggatcacgtcaatggcctacaaccaagctatttgtcccctactttgagtcttaactgtggtttttcttcaatccccatgggaaagggcttcaaggcaccaccagtggtatttaatattcatacttggggccaggcatggtggctcacgcctgtaatcccagcactttgggaggccgagatgggtggatcacctgaggtcaggagtttgtgaccagcctgaccaacatagtgaaaccccatctctactaaaaatacaaaaattagccaggcgtggtggcgcacacctgtaatcccagctactcgggaggcggaggcaggagaatcacttgaacctgggaggcggaggttgcagtgagccgcgattgcaccaccacactccagcctgcgcgacagatcgagactctgtctcaaaaaaaaaaaaaaaaatttcatacttatgccatgcttttacctttagatacacacgttacagtaatccacgtggtgaagtgcatgtcaccgttaactaaggaaggactgcggtaacttaccctgcagggctgtaggttgcctgcaggcgctccaggcccccagcctgttgattccgatttctaggtctcatcttcctctggtcccttttggccactactttaaaagcttgcccaaagggatcccctccattctagtgggcatttgctgaactaacctgcccctaaggctggcttctaaccaccggggaaagctgcttagcctccagggctccctccttgagaggctcacacacccccaagctgctgtggagtgaatttgagacggagcagaagctgcaaagctgtgctttccctggggaaggggatgtgctgcggcctcctgggtgggcgtggagagggcgccatcacaacgagtccaggtttttgcttttggaaggtctctgataatttaggggtgctggaaaccagcactgtgttatccccaatccctcctgtgccaccagttttgtgatttaggttgctttagtgggtgactaacttttgttcagtgaaaccagggtttgtttggggtttttttctttgctacttacatatttaaaggtacaagtttcttatttcaaatctctactgatagtgccctatggggagatgctggaacacattttgcaaatgtgacttttttttttttttttaatttttgcttgaagcctgtgtcatgttagttgctgctgccttctttccttttgtgaggttcccaatgtttcgtccagaaaagtactttatttatgcaagtcaggtgactcttaggccacaaaaccatttgatgataaacagattatcattaggtgcatatcttattgatattttgtgaaatgttatgcctatgttgcaaaagttgaatagttttgtctttatatattgctgtcttcagtgtacagcatggttttacttaattgaatgttaatgtttaatattttcttcttatagaagagatcatgcccttttgtatgacatgttttaataaatgttatctgtcaactttg

SEQ ID NO: 316747 - DNA, 4634 bp, Homo sapiens
tgaaggcacaggctgaatctgttgcggcagctgaggctacaacaggcctgcgccggcggcagagaggatatcttgggcgggggatgtgagcgctgagcccttggcagaagtcaatgtgattttaatttgaagcaaaactgaaatgggttcttcttcctcattctattcatgttgctttttgatggccatggcataaggaactctatcccaggaatacagctttgcattagcaccgaacaagatttgtgatgaaatggagcctggaacaaactcttttcgggtagaatttcctgatttttccagcaccattctacagaaactgaaccagcagcgccagcaaggacaattatgtgacgtctccattgttgtccaaggccacattttccgggcacacaaagccgttcttgctgccagttcaccctacttttgtgaccaggtactcctgaaaaacagcaggagaattgttttgcctgatgtgatgaacccaagagtgtttgagaacattctcctatctagttatacaggacgtctagtaatgcccgctccagaaattgttagttacttgacagcggcaagcttcctccagatgtggcatgtggtagacaaatgcactgaagttttagagggaaaccctacagtcctttgtcagaagctaaatcatggcagtgaccaccagtcaccaagcagcagtagttataatggcctggtagagagctttgagctgggctctgggggtcatactgattttcccaaagcccaagaactgagagatggtgaaaatgaagaggagagcaccaaagacgagctgtcatcccagctcaccgagcacgaatacctgcccagcaactcgtccacagagcatgaccgcctgagcacggaaatggcaagccaggatggggaggagggcgccagcgacagcgccgagttccactacacccggcccatgtacagcaagcccagcatcatggctcacaaacgctggatccacgtgaagcccgagcgcttagaacaggcttgcgagggcatggatgtgcacgcgacctacgacgagcaccaggtcacagagtccatcaacaccgtgcagacagagcacacggtgcagccttcgggagtggaggaggacttccacatcggggagaagaaagtggaagctgagtttgatgaacaggctgatgaaagcaattatgatgagcaggtggatttctatggctcttccatggaagagttttccggagagaggtcagatgggaatctaattgggcacagacaggaggctgccctcgcagcaggttacagtgagaatattgaaatggtaacagggattaaagaagaagcttcccacttaggattctcagccaccgacaagctgtatccttgtcagtgtgggaaaagtttcactcacaagagtcagagagatcggcacatgagcatgcacctcggtcttcggccttacggctgtggggtctgcggtaagaaattcaaaatgaagcaccatctcgtgggccacatgaaaattcacacaggcataaagccgtatgagtgtaatatctgtgcaaagaggtttatgtggagggacagtttccaccggcatgtgacttcttgtactaagtcctacgaagctgcaaaggctgagcagaatacaactgaggctaactaaaaataggatctggcccttgagtggcatgcacaaaaataaactatggtaattaatgcaaatctgggcacagatgatgcgtgctacttgctattatgagagaagcttaaaaaaaaaaaggaagatatttctgaaagaccagctctaagtaggccaattaaaaaaatctaattcctcaaatttgtgtgttccagtcctggcctggaatgggtaatggggtgagttaacccaccgcccagctggcaagggaaaccttctgactggttgtgatcgaaacaggtggacagagacacctgcacttggaactggactccacccaccagttccattttgggtggcagcagctttggatcactcattattacaaggtcatgctgaaattttattttgctcttgctatagatacttaggtaatgtggatttgttttggtagctatttcactgaaggaagtgctacttatataaaagctagaaataatgtgattcctaggatgagaaattggttaacagagctctgttgtctggttttagtctttctaaaggatattttaactaaaactatggagatgctaagagagtgactttctaaatatgaaacagataatttacggtacaaggctgacatagtgcccttgtcagtttctgtaagatgccactactgtcacaaggtgtttcagactcttgataaggcagtgttttgtattttagttctaacattgagtttggacaattttatctaattgtaattctctagggtgccagagataggtatttctcattggtttgctttcccaaatcctgtttggttaattgtagcctccatacagtggggtcttctctgtggctggtagacaccaagctgctgtgactgaccacggtaccacgggctgccacagcccctgctctgtcttagattatggtgctttacaaagagagtggtccatgaccacacttagtgagaaggagccacaagttgtggctgagagttccctgtgaacttgagtagttcatagagtgctaaggtgacactccaccaaccagagtgagagggcagataggcaggattctatgagtggttatacttaagggggacaaaactgcccaagaagaatcttgagaatacactctttcaaggtgggggagatactctttagagggtacactgagctaatactaccagttctttatgagcactggaatgtgtttgtaaaaggagtcctaagtttagcaaggtagtctacagaaccatgctcccacattatagataaagctgcttaaacttaaaagtccacaaagctacgccgaccagaaaaaaaaaattaaaaaaacaaacaagaaaagcaactattctgagaccttttctgcccatcagttagatgatttaggttaaaaagaaaggtaatattgcacatgcttttaagctgtgtaacatacctgaggttatcaccagggtaggacagggtgctactaccatgtcatcttttccacaatcgtactgggttatttacttctaaatagaaacttttttttcttaaaataaaaataatttttcttggatttggggtgaaattttatttgaaaagtttggctttgctgtaatgtaatagacattgctggcaatggcctctgattctcaagctcctaacaccagggtgtttacttgttgaacattgtctggaaagaggaaagaaaatacttatttaccagttaactcttgtaagcaagattacaaacagggatttattcacaacactgtatcattctcgatatataaaaagcactttgtatttaaaactttattataaatatatatatatattgtttttttttaaacctagaaactagatattacctcttggttgtttgccacattaatagcttctcttagtattgaaacgttactggttagcagtcttttctctgtgtacctgacacacgtatactgaggggattgtacaatcaagcctattgtctccttttctttcactcatggtagaggccagtgggttttaggtatgatcctagccattatatttgaggagaaattgttctattactcctactaatttcagtactaaggtggtgatgccattttgttctgccaaaaactgatcaccctctcccatggtattagcagagcattttctgcctgtttggaaggtttgatgtcctgtttctcattgaagactatttacatgatcattaggacattgcaggagaagtctgagaggtaaaaatacagatattctgggagagtcgtggtccttcagttctgctgaaatcagcatagtgcccttgtcatgaggaagagtttctgttcagccaagagtggtggcacgcttgggtggtagttttggaagcagtcagttgtgctaggacttatttaatatgttgtgaagagaagagtgtcttcttgaaagccttatgtgtccatcagctactaaatgtagaacttaaataagttgctcacatctgttcttttagtgttttgtggtatttgaggttcccaatgtttcgtccagaaaagtactttatttatgcaagtcaggtgactcttaggccacaaaaccatttgatgataaacagattatcattaggtgcatatcttattgatattttgtgaaatgttatgcctatgttgcaaaagttgaatagttttgtctttatatattgctgtcttcagtgtacagcatggttttacttaattgaatgttaatgtttaatattttcttcttatagaagagatcatgcccttttgtatgacatgttttaataaatgttatctgtcaactttgtaaaagttttgtttttcactatgagtagatgaccacatcttgtttgactctgggttttgccacctgagaatacagttatatggtggcgttttggtaagtaaatgccaaataatctgatccaatgggcagtgagtgactgccaggcaggcatttatagtaatattttagacccccactggcccctt

SEQ ID NO: 316748 - DNA, 5828 bp, Homo sapiens
tgaaggcacaggctgaatctgttgcggcagctgaggctacaacaggcctgcgccggcggcagagaggatatcttgggcgggggatgtgagcgctgagcccttggcagcaccgaacaagatttgtgatgaaatggagcctggaacaaactcttttcgggtagaatttcctgatttttccagcaccattctacagaaactgaaccagcagcgccagcaaggacaattatgtgacgtctccattgttgtccaaggccacattttccgggcacacaaagccgttcttgctgccagttcaccctacttttgtgaccaggtactcctgaaaaacagcaggagaattgttttgcctgatgtgatgaacccaagagtgtttgagaacattctcctatctagttatacaggacgtctagtaatgcccgctccagaaattgttagttacttgacagcggcaagcttcctccagatgtggcatgtggtagacaaatgcactgaagttttagagggaaaccctacagtcctttgtcagaagctaaatcatggcagtgaccaccagtcaccaagcagcagtagttataatggcctggtagagagctttgagctgggctctgggggtcatactgattttcccaaagcccaagaactgagagatggtgaaaatgaagaggagagcaccaaagacgagctgtcatcccagctcaccgagcacgaatacctgcccagcaactcgtccacagagcatgaccgcctgagcacggaaatggcaagccaggatggggaggagggcgccagcgacagcgccgagttccactacacccggcccatgtacagcaagcccagcatcatggctcacaaacgctggatccacgtgaagcccgagcgcttagaacaggcttgcgagggcatggatgtgcacgcgacctacgacgagcaccaggtcacagagtccatcaacaccgtgcagacagagcacacggtgcagccttcgggagtggaggaggacttccacatcggggagaagaaagtggaagctgagtttgatgaacaggctgatgaaagcaattatgatgagcaggtggatttctatggctcttccatggaagagttttccggagagaggtcagatgggaatctaattgggcacagacaggaggctgccctcgcagcaggttacagtgagaatattgaaatggtaacagggattaaagaagaagcttcccacttaggattctcagccaccgacaagctgtatccttgtcagtgtgggaaaagtttcactcacaagagtcagagagatcggcacatgagcatgcacctcggtcttcggccttacggctgtggggtctgcggtaagaaattcaaaatgaagcaccatctcgtgggccacatgaaaattcacacaggcataaagccgtatgagtgtaatatctgtgcaaagaggtttatgtggagggacagtttccaccggcatgtgacttcttgtactaagtcctacgaagctgcaaaggctgagcagaatacaactgaggctaactaaaaataggatctggcccttgagtggcatgcacaaaaataaactatggtaattaatgcaaatctgggcacagatgatgcgtgctacttgctattatgagagaagcttaaaaaaaaaaaggaagatatttctgaaagaccagctctaagtaggccaattaaaaaaatctaattcctcaaatttgtgtgttccagtcctggcctggaatgggtaatggggtgagttaacccaccgcccagctggcaagggaaaccttctgactggttgtgatcgaaacaggtggacagagacacctgcacttggaactggactccacccaccagttccattttgggtggcagcagctttggatcactcattattacaaggtcatgctgaaattttattttgctcttgctatagatacttaggtaatgtggatttgttttggtagctatttcactgaaggaagtgctacttatataaaagctagaaataatgtgattcctaggatgagaaattggttaacagagctctgttgtctggttttagtctttctaaaggatattttaactaaaactatggagatgctaagagagtgactttctaaatatgaaacagataatttacggtacaaggctgacatagtgcccttgtcagtttctgtaagatgccactactgtcacaaggtgtttcagactcttgataaggcagtgttttgtattttagttctaacattgagtttggacaattttatctaattgtaattctctagggtgccagagataggtatttctcattggtttgctttcccaaatcctgtttggttaattgtagcctccatacagtggggtcttctctgtggctggtagacaccaagctgctgtgactgaccacggtaccacgggctgccacagcccctgctctgtcttagattatggtgctttacaaagagagtggtccatgaccacacttagtgagaaggagccacaagttgtggctgagagttccctgtgaacttgagtagttcatagagtgctaaggtgacactccaccaaccagagtgagagggcagataggcaggattctatgagtggttatacttaagggggacaaaactgcccaagaagaatcttgagaatacactctttcaaggtgggggagatactctttagagggtacactgagctaatactaccagttctttatgagcactggaatgtgtttgtaaaaggagtcctaagtttagcaaggtagtctacagaaccatgctcccacattatagataaagctgcttaaacttaaaagtccacaaagctacgccgaccagaaaaaaaaaattaaaaaaacaaacaagaaaagcaactattctgagaccttttctgcccatcagttagatgatttaggttaaaaagaaaggtaatattgcacatgcttttaagctgtgtaacatacctgaggttatcaccagggtaggacagggtgctactaccatgtcatcttttccacaatcgtactgggttatttacttctaaatagaaacttttttttcttaaaataaaaataatttttcttggatttggggtgaaattttatttgaaaagtttggctttgctgtaatgtaatagacattgctggcaatggcctctgattctcaagctcctaacaccagggtgtttacttgttgaacattgtctggaaagaggaaagaaaatacttatttaccagttaactcttgtaagcaagattacaaacagggatttattcacaacactgtatcattctcgatatataaaaagcactttgtatttaaaactttattataaatatatatatatattgtttttttttaaacctagaaactagatattacctcttggttgtttgccacattaatagcttctcttagtattgaaacgttactggttagcagtcttttctctgtgtacctgacacacgtatactgaggggattgtacaatcaagcctattgtctccttttctttcactcatggtagaggccagtgggttttaggtatgatcctagccattatatttgaggagaaattgttctattactcctactaatttcagtactaaggtggtgatgccattttgttctgccaaaaactgatcaccctctcccatggtattagcagagcattttctgcctgtttggaaggtttgatgtcctgtttctcattgaagactatttacatgatcattaggacattgcaggagaagtctgagaggtaaaaatacagatattctgggagagtcgtggtccttcagttctgctgaaatcagcatagtgcccttgtcatgaggaagagtttctgttcagccaagagtggtggcacgcttgggtggtagttttggaagcagtcagttgtgctaggacttatttaatatgttgtgaagagaagagtgtcttcttgaaagccttatgtgtccatcagctactaaatgtagaacttaaataagttgctcacatctgttcttttagtgttttgtggtatttgaggttttggcaaaaattgggatttttttatcaggcagccagagcctgggaggtggtagggtgtctgaaatgctggccatgttcagagaggcaggagaagggggttgctttcatttgaatattaaaagtgaatttttgtaaactctggtttttacctttttttcatccccacgttgagttggaggaatagtctcttctcttcacctcaatatagctttagaaaatctttatccttcctaataagtttggatggttgtgggtaacattgttcaaacaatctttcagggatcacgtcaatggcctacaaccaagctatttgtcccctactttgagtcttaactgtggtttttcttcaatccccatgggaaagggcttcaaggcaccaccagtggtatttaatattcatacttggggccaggcatggtggctcacgcctgtaatcccagcactttgggaggccgagatgggtggatcacctgaggtcaggagtttgtgaccagcctgaccaacatagtgaaaccccatctctactaaaaatacaaaaattagccaggcgtggtggcgcacacctgtaatcccagctactcgggaggcggaggcaggagaatcacttgaacctgggaggcggaggttgcagtgagccgcgattgcaccaccacactccagcctgcgcgacagatcgagactctgtctcaaaaaaaaaaaaaaaaatttcatacttatgccatgcttttacctttagatacacacgttacagtaatccacgtggtgaagtgcatgtcaccgttaactaaggaaggactgcggtaacttaccctgcagggctgtaggttgcctgcaggcgctccaggcccccagcctgttgattccgatttctaggtctcatcttcctctggtcccttttggccactactttaaaagcttgcccaaagggatcccctccattctagtgggcatttgctgaactaacctgcccctaaggctggcttctaaccaccggggaaagctgcttagcctccagggctccctccttgagaggctcacacacccccaagctgctgtggagtgaatttgagacggagcagaagctgcaaagctgtgctttccctggggaaggggatgtgctgcggcctcctgggtgggcgtggagagggcgccatcacaacgagtccaggtttttgcttttggaaggtctctgataatttaggggtgctggaaaccagcactgtgttatccccaatccctcctgtgccaccagttttgtgatttaggttgctttagtgggtgactaacttttgttcagtgaaaccagggtttgtttggggtttttttctttgctacttacatatttaaaggtacaagtttcttatttcaaatctctactgatagtgccctatggggagatgctggaacacattttgcaaatgtgacttttttttttttttttaatttttgcttgaagcctgtgtcatgttagttgctgctgccttctttccttttgtgaggttcccaatgtttcgtccagaaaagtactttatttatgcaagtcaggtgactcttaggccacaaaaccatttgatgataaacagattatcattaggtgcatatcttattgatattttgtgaaatgttatgcctatgttgcaaaagttgaatagttttgtctttatatattgctgtcttcagtgtacagcatggttttacttaattgaatgttaatgtttaatattttcttcttatagaagagatcatgcccttttgtatgacatgttttaataaatgttatctgtcaactttg

SEQ ID NO: 316749 - DNA, 4191 bp, Homo sapiens
gcggccgctccagcatcagaatggttgaaagaccagctctaagtaggccaattaaaaaaatctaattcctcaaatttgtgtgttccagtcctggcctggaatgggtaatggggtgagttaacccaccgcccagctggcaagggaaaccttctgactggttgtgatcgaaacaggtggacagagacacctgcacttggaactggactccacccaccagttccattttgggtggcagcagctttggatcactcattattacaaggtcatgctgaaattttattttgctcttgctatagatacttaggtaatgtggatttgttttggtagctatttcactgaaggaagtgctacttatataaaagctagaaataatgtgattcctaggatgagaaattggttaacagagctctgttgtctggttttagtctttctaaaggatattttaactaaaactatggagatgctaagagagtgactttctaaatatgaaacagataatttacggtacaaggctgacatagtgcccttgtcagtttctgtaagatgccactactgtcacaaggtgtttcagactcttgataaggcagtgttttgtattttagttctaacattgagtttggacaattttatctaattgtaattctctagggtgccagagataggtatttctcattggtttgctttcccaaatcctgtttggttaattgtagcctccatacagtggggtcttctctgtggctggtagacaccaagctgctgtgactgaccacggtaccacgggctgccacagcccctgctctgtcttagattatggtgctttacaaagagagtggtccatgaccacacttagtgagaaggagccacaagttgtggctgagagttccctgtgaacttgagtagttcatagagtgctaaggtgacactccaccaaccagagtgagagggcagataggcaggattctatgagtggttatacttaagggggacaaaactgcccaagaagaatcttgagaatacactctttcaaggtgggggagatactctttagagggtacactgagctaatactaccagttctttatgagcactggaatgtgtttgtaaaaggagtcctaagtttagcaaggtagtctacagaaccatgctcccacattatagataaagctgcttaaacttaaaagtccacaaagctacgccgaccagaaaaaaaaaattaaaaaaacaaacaagaaaagcaactattctgagaccttttctgcccatcagttagatgatttaggttaaaaagaaaggtaatattgcacatgcttttaagctgtgtaacatacctgaggttatcaccagggtaggacagggtgctactaccatgtcatcttttccacaatcgtactgggttatttacttctaaatagaaacttttttttcttaaaataaaaataatttttcttggatttggggtgaaattttatttgaaaagtttggctttgctgtaatgtaatagacattgctggcaatggcctctgattctcaagctcctaacaccagggtgtttacttgttgaacattgtctggaaagaggaaagaaaatacttatttaccagttaactcttgtaagcaagattacaaacagggatttattcacaacactgtatcattctcgatatataaaaagcactttgtatttaaaactttattataaatatatatatatattgtttttttttaaacctagaaactagatattacctcttggttgtttgccacattaatagcttctcttagtattgaaacgttactggttagcagtcttttctctgtgtacctgacacacgtatactgaggggattgtacaatcaagcctattgtctccttttctttcactcatggtagaggccagtgggttttaggtatgatcctagccattatatttgaggagaaattgttctattactcctactaatttcagtactaaggtggtgatgccattttgttctgccaaaaactgatcaccctctcccatggtattagcagagcattttctgcctgtttggaaggtttgatgtcctgtttctcattgaagactatttacatgatcattaggacattgcaggagaagtctgagaggtaaaaatacagatattctgggagagtcgtggtccttcagttctgctgaaatcagcatagtgcccttgtcatgaggaagagtttctgttcagccaagagtggtggcacgcttgggtggtagttttggaagcagtcagttgtgctaggacttatttaatatgttgtgaagagaagagtgtcttcttgaaagccttatgtgtccatcagctactaaatgtagaacttaaataagttgctcacatctgttcttttagtgttttgtggtatttgaggttttggcaaaaattgggatttttttatcaggcagccagagcctgggaggtggtagggtgtctgaaatgctggccatgttcagagaggcaggagaagggggttgctttcatttgaatattaaaagtgaatttttgtaaactctggtttttacctttttttcatccccacgttgagttggaggaatagtctcttctcttcacctcaatatagctttagaaaatctttatccttcctaataagtttggatggttgtgggtaacattgttcaaacaatctttcagggatcacgtcaatggcctacaaccaagctatttgtcccctactttgagtcttaactgtggtttttcttcaatccccatgggaaagggcttcaaggcaccaccagtggtatttaatattcatacttggggccaggcatggtggctcacgcctgtaatcccagcactttgggaggccgagatgggtggatcacctgaggtcaggagtttgtgaccagcctgaccaacatagtgaaaccccatctctactaaaaatacaaaaattagccaggcgtggtggcgcacacctgtaatcccagctactcgggaggcggaggcaggagaatcacttgaacctgggaggcggaggttgcagtgagccgcgattgcaccaccacactccagcctgcgcgacagatcgagactctgtctcaaaaaaaaaaaaaaaaatttcatacttatgccatgcttttacctttagatacacacgttacagtaatccacgtggtgaagtgcatgtcaccgttaactaaggaaggactgcggtaacttaccctgcagggctgtaggttgcctgcaggcgctccaggcccccagcctgttgattccgatttctaggtctcatcttcctctggtcccttttggccactactttaaaagcttgcccaaagggatcccctccattctagtgggcatttgctgaactaacctgcccctaaggctggcttctaaccaccggggaaagctgcttagcctccagggctccctccttgagaggctcacacacccccaagctgctgtggagtgaatttgagacggagcagaagctgcaaagctgtgctttccctggggaaggggatgtgctgcggcctcctgggtgggcgtggagagggcgccatcacaacgagtccaggtttttgcttttggaaggtctctgataatttaggggtgctggaaaccagcactgtgttatccccaatccctcctgtgccaccagttttgtgatttaggttgctttagtgggtgactaacttttgttcagtgaaaccagggtttgtttggggtttttttctttgctacttacatatttaaaggtacaagtttcttatttcaaatctctactgatagtgccctatggggagatgctggaacacattttgcaaatgtgacttttttttttttttttaatttttgcttgaagcctgtgtcatgttagttgctgctgccttctttccttttgtgaggttcccaatgtttcgtccagaaaagtactttatttatgcaagtcaggtgactcttaggccacaaaaccatttgatgataaacagattatcattaggtgcatatcttattgatattttgtgaaatgttatgcctatgttgcaaaagttgaatagttttgtctttatatattgctgtcttcagtgtacagcatggttttacttaattgaatgttaatgtttaatattttcttcttatagaagagatcatgcccttttgtatgacatgttttaataaatgttatctgtcaactttg

SEQ ID NO: 316750 - DNA, 2277 bp, Homo sapiens
gtgccgctccgagaaacagcgtaaattgttctattactcctactaatttcagtactaaggtggtgatgccattttgttctgccaaaaactgatcaccctctcccatggtattagcagagcattttctgcctgtttggaaggtttgatgtcctgtttctcattgaagactatttacatgatcattaggacattgcaggagaagtctgagaggtaaaaatacagatattctgggagagtcgtggtccttcagttctgctgaaatcagcatagtgcccttgtcatgaggaagagtttctgttcagccaagagtggtggcacgcttgggtggtagttttggaagcagtcagttgtgctaggacttatttaatatgttgtgaagagaagagtgtcttcttgaaagccttatgtgtccatcagctactaaatgtagaacttaaataagttgctcacatctgttcttttagtgttttgtggtatttgaggttttggcaaaaattgggatttttttatcaggcagccagagcctgggaggtggtagggtgtctgaaatgctggccatgttcagagaggcaggagaagggggttgctttcatttgaatattaaaagtgaatttttgtaaactctggtttttacctttttttcatccccacgttgagttggaggaatagtctcttctcttcacctcaatatagctttagaaaatctttatccttcctaataagtttggatggttgtgggtaacattgttcaaacaatctttcagggatcacgtcaatggcctacaaccaagctatttgtcccctactttgagtcttaactgtggtttttcttcaatccccatgggaaagggcttcaaggcaccaccagtggtatttaatattcatacttggggccaggcatggtggctcacgcctgtaatcccagcactttgggaggccgagatgggtggatcacctgaggtcaggagtttgtgaccagcctgaccaacatagtgaaaccccatctctactaaaaatacaaaaattagccaggcgtggtggcgcacacctgtaatcccagctactcgggaggcggaggcaggagaatcacttgaacctgggaggcggaggttgcagtgagccgcgattgcaccaccacactccagcctgcgcgacagatcgagactctgtctcaaaaaaaaaaaaaaaaatttcatacttatgccatgcttttacctttagatacacacgttacagtaatccacgtggtgaagtgcatgtcaccgttaactaaggaaggactgcggtaacttaccctgcagggctgtaggttgcctgcaggcgctccaggcccccagcctgttgattccgatttctaggtctcatcttcctctggtcccttttggccactactttaaaagcttgcccaaagggatcccctccattctagtgggcatttgctgaactaacctgcccctaaggctggcttctaaccaccggggaaagctgcttagcctccagggctccctccttgagaggctcacacacccccaagctgctgtggagtgaatttgagacggagcagaagctgcaaagctgtgctttccctggggaaggggatgtgctgcggcctcctgggtgggcgtggagagggcgccatcacaacgagtccaggtttttgcttttggaaggtctctgataatttaggggtgctggaaaccagcactgtgttatccccaatccctcctgtgccaccagttttgtgatttaggttgctttagtgggtgactaacttttgttcagtgaaaccagggtttgtttggggtttttttctttgctacttacatatttaaaggtacaagtttcttatttcaaatctctactgatagtgccctatggggagatgctggaacacattttgcaaatgtgacttttttttttttttttaatttttgcttgaagcctgtgtcatgttagttgctgctgccttctttccttttgtgaggttcccaatgtttcgtccagaaaagtactttatttatgcaagtcaggtgactcttaggccacaaaaccatttgatgataaacagattatcattaggtgcatatcttattgatattttgtgaaatgttatgcctatgttgcaaaagttgaatagttttgtctttatatattgctgtcttcagtgtacagcatggttttacttaattgaatgttaatgtttaatattttcttcttatagaagagatcatgcccttttgtatgacatgttttaataaatgttatctgtcaactttg

SEQ ID NO: 316751 - DNA, 2134 bp, Homo sapiens
gagtccgcggcgttccccggctgcagccggggagggggccgaggagtgactgagccccgggctgtgcagtccgacgccgactgaggcacgagcgggtgacgctgggcctgcagcgcggagcagaaagcagaacccgcagagtcctccctgctgctgtgtggacgacacgtgggcacaggcagaagtgggccctgtgaccagctgcactggtttcgtggaaggaagctccaggactggcgggatgggctcagcctgtatcaaagtcaccaaatactttctcttcctcttcaacttgatcttctttatcctgggcgcagtgatcctgggcttcggggtgtggatcctggccgacaagagcagtttcatctctgtcctgcaaacctcctccagctcgcttaggatgggggcctatgtcttcatcggcgtgggggcagtcactatgctcatgggcttcctgggctgcatcggcgccgtcaacgaggtccgctgcctgctggggctgtactttgctttcctgctcctgatcctcattgcccaggtgacggccggggccctcttctacttcaacatgggcaagctgaagcaggagatgggcggcatcgtgactgagctcattcgagactacaacagcagtcgcgaggacagcctgcaggatgcctgggactacgtgcaggctcaggtgaagtgctgcggctgggtcagcttctacaactggacagacaacgctgagctcatgaatcgccctgaggtcacctacccctgttcctgcgaagtcaagggggaagaggacaacagcctttctgtgaggaagggcttctgcgaggcccccggcaacaggacccagagtggcaaccaccctgaggactggcctgtgtaccaggagggctgcatggagaaggtgcaggcgtggctgcaggagaacctgggcatcatcctcggcgtgggcgtgggtgtggccatcgtcgagctcctggggatggtcctgtccatctgcttgtgccggcacgtccattccgaagactacagcaaggtccccaagtactgaggcagctgctatccccatctccctgcctggcccccaacctcagggctcccaggggtctccctggctccctcctccaggcctgcctcccacttcactgcgaagaccctcttgcccaccctgactgaaagtagggggctttctggggcctagcgatctctcctggcctatccgctgccagccttgagccctggctgttctgtggttcctctgctcaccgcccatcagggttctcttagcaactcagagaaaaatgctccccacagcgtccctggcgcaggtgggctggacttctacctgccctcaagggtgtgtatattgtataggggcaactgtatgaaaaattggggaggagggggccgggcgcggtggctcacgcctgtaatcccagcactttgggaggccgaggcgggtggatcacgaggtcaggagatcgagaccatcctggctaacatggtgaaaccccgtctctactaaaaatacaaaaaaaatttagccgggcgcggtggcgggcacctgtagtcccagctacttgggaggctgaggcaggagaatggtgtgaacccgggagcggaggttgcagtgagctgagatcgtgctactgcactccagcctgggggacagaaagagactccgtctcaaaaattgaaacactcagaaaaacagttgaggactatttctgcttttgctatgggaaagctttaggcaaatccacagtggtacctgtaccatatgagaagatgctgcgagaccagtcggctgtggtagtgcaggggcttacggaaggtgttgcctttaaacaccccgagaactatgatcttgcaaccctgaaatggattttggagaacaaagcagggatttcattcatcattaagagaccttttttagagccaaagaagcatgtaggtaagtaagtgctttgcttccttgatagctggctggcctccgttttgctagattttcatacactttaatggtttctgttttattgtctttgagaatatgatgtcagacattttcggatgggctgtttagatgttatataatccacaaaaggttcattgagctaaaaaagtggagacttgttttttt

SEQ ID NO: 316752 - DNA, 815 bp, Homo sapiens
  misc_feature (721)..(721): n is a, c, g, or t
  misc_feature (786)..(786): n is a, c, g, or t
  misc_feature (794)..(794): n is a, c, g, or t
gagtccgcggcgttccccggctgcagccggggagggggccgaggagtgactgagccccgggctgtgcagtccgacgccgactgaggcacgagcgggtgacgctgggcctgcagcgcggagcagaaagcagaacccgcagagtcctccctgctgctgtgtggacgacacgtgggcacaggcagaagtgggccctgtgaccagctgcactggtttcgtggaaggaagctccaggactggcgggatgggctcagcctgtatcaaagtcaccaaatactttctcttcctcttcaacttgatcttctttatcctgggcgcagtgatcctgggcttcggggtgtggatcctggccgacaagagcagtttcatctctgtcctgcaaacctcctccagctcgcttaggatgggggcctatgtcttcatcggcgtgggggcagtcactatgctcatgggcttcctgggctgcatcggcgccgtcaacgaggtccgctgcctgctggggctgtactttgctttcctgctcctgatcctcattgcccaggtgacggccggggccctcttctacttcaacatgggcaagctgaagcaggagatgggcggcatcgtgactgagctcattcgagactacaacagcagtcgcgaggacagcctgcaggatgcctgggactacgtgcaggctcagtgaaattgctgcgggctggggtcaagcttctaaaaactgggncaagaacaaaggcttgaagctcaatggaatccgccccttgaaggtcaacctaacccccctggttnccctgccnaaagttcaaaagggggggaaa

SEQ ID NO: 316753 - DNA, 410 bp, Homo sapiens
  misc_feature (313)..(313): n is a, c, g, or t
  misc_feature (317)..(317): n is a, c, g, or t
  misc_feature (382)..(382): n is a, c, g, or t
gagtccgcggcgttccccggctgcagccggggagggggccgaggagtgactgagccccgggctgtgcagtccgacgccgactgaggcacgagcgggtgacgctgggcctgcagcgcggagcagaaagcagaacccgcagagtcctccctgctgctgtgtggacgacacgtgggcacaggcagaagtgggccctgtgaccagctgcactggtttcgtggaaggaagctccaggactggcgggatgggctcagcctgtatcaaagtcaccaaatactttctcttcctcttcaacttgatcttcttttaggttttntgcnttttggttttgttgttttttattaaagttaagtaaacactgcctaaaaacgggtaaggatgaaanaagggggccgggtagaaagctcactttt

SEQ ID NO: 316754 - DNA, 243 bp, Homo sapiens
ctgcactgtgaactgtctgccgtccattctccttgtgccctgcacacctgcgctccttcaacttgaacttccttcctactctgctttgtatttttgctggtcctggttttgatttttctgctgtacttgtagtttatgatggttcggctgggaccaggggcctggaagtggcatatctcagtctctgtcctggggaggtcctccctctgccaggagggcagcctgcctagggtgagccgtgag

SEQ ID NO: 316755 - DNA, 2556 bp, Homo sapiens
gagtccgcggcgttccccggctgcagccggggagggggccgaggagtgactgagccccgggctgtgcagtccgacgccgactgaggcacgagcgggtgacgctgggcctgcagcgcggagcagaaagcagaacccgcagagtcctccctgctgctgtgtggacgacacgtgggcacaggcagaagtgggccctgtgaccagctgcactggtttcgtggaaggaagctccaggactggcgggatgggctcagcctgtatcaaagtcaccaaatactttctcttcctcttcaacttgatcttctttatcctgggcgcagtgatcctgggcttcggggtgtggatcctggccgacaagagcagtttcatctctgtcctgcaaacctcctccagctcgcttaggatgggggcctatgtcttcatcggcgtgggggcagtcactatgctcatgggcttcctgggctgcatcggcgccgtcaacgaggtccgctgcctgctggggctgtactttgctttcctgctcctgatcctcattgcccaggtgacggccggggccctcttctacttcaacatgggcaagctgaagcaggagatgggcggcatcgtgactgagctcattcgagactacaacagcagtcgcgaggacagcctgcaggatgcctgggactacgtgcaggctcaggtgaagtgctgcggctgggtcagcttctacaactggacagacaacgctgagctcatgaatcgccctgaggtcacctacccctgttcctgcgaagtcaagggggaagaggacaacagcctttctgtgaggaagggcttctgcgaggcccccggcaacaggacccagagtggcaaccaccctgaggactggcctgtgtaccaggagggctgcatggagaaggtgcaggcgtggctgcaggagaacctgggcatcatcctcggcgtgggcgtgggtgtggccatcgtcgagctcctggggatggtcctgtccatctgcttgtgccggcacgtccattccgaagactacagcaaggtccccaagtactgaggcagctgctatccccatctccctgcctggcccccaacctcagggctcccaggggtctccctggctccctcctccaggcctgcctcccacttcactgcgaagaccctcttgcccaccctgactgaaagtagggggctttctggggcctagcgatctctcctggcctatccgctgccagccttgagccctggctgttctgtggttcctctgctcaccgcccatcagggttctcttagcaactcagagaaaaatgctccccacagcgtccctggcgcaggtgggctggacttctacctgccctcaagggtgtgtatattgtataggggcaactgtatgaaaaattggggaggagggggccgggcgcggtggctcacgcctgtaatcccagcactttgggaggccgaggcgggtggatcacgaggtcaggagatcgagaccatcctggctaacatggtgaaaccccgtctctactaaaaatacaaaaaaaatttagccgggcgcggtggcgggcacctgtagtcccagctacttgggaggctgaggcaggagaatggtgtgaacccgggagcggaggttgcagtgagctgagatcgtgctactgcactccagcctgggggacagaaagagactccgtctcaaaaaaaaaaaaaaaaaaaaaaaaaattggggagggaagggcgttagataaggcactctgggctgtcaggagactgcctactgggtgggtcaacttatttcccactatgacatttatatctttatttttcacaattatattgaaggcagtgggagaggggagagggtgggttttacctgatattaaggggtggcaccccttccccaggcctgatgcaggtccatctagacagctcagattagcctaggccatgccctagggacacggcctaggggagctgggctggagggggtctgcctgggtaaggggatctggcttggccctgagctgcttagggacaggtgagtccttgggggcatggcacagagctggtcctgtattctccagggtccggagctggccaggggcggggaggaggaggatggcttctcctgggagaaggtgggctggcctttcttggcaagcggtcctctggcccctggggagtggggtgggtgaggctgtgccttgtagggggagaggggagggggctttgtgtgcaccattctgtaaaacacactcaagattctaagactattaaagaggatttataacagtctagtctggaatggtagggatgctgcttcctggggcaggggaggacccagggcagagggtgtgagcagagtggctgggtctgctggagactgctggacccctcactgctctgccctccccgcaggcatctgcttctgcagcctgaaccttaggaccgtgatgggccaggctctgatgggcctgcctgcatgccggggtgcctggagtttgatttggtgctaagagaggtatagattgtacctctcaattcctgcttctgaaacgtggggtaggaggt

SEQ ID NO: 316756 - DNA, 1707 bp, Homo sapiens
gagtccgcggcgttccccggctgcagccggggagggggccgaggagtgactgagccccgggctgtgcagtccgacgccgactgaggcacgagcgggtgacgctgggcctgcagcgcggagcagaaagcagaacccgcagagtcctccctgctgctgtgtggacgacacgtgggcacaggcagaagtgggccctgtgaccagctgcactggtttcgtggaaggaagctccaggactggcgggatgggctcagcctgtatcaaagtcaccaaatactttctcttcctcttcaacttgatcttctttatcctgggcgcagtgatcctgggcttcggggtgtggatcctggccgacaagagcagtttcatctctgtcctgcaaacctcctccagctcgcttaggatgggggcctatgtcttcatcggcgtgggggcagtcactatgctcatgggcttcctgggctgcatcggcgccgtcaacgaggtccgctgcctgctggggctgtactttgctttcctgctcctgatcctcattgcccaggtgacggccggggccctcttctacttcaacatgggcaagctgaagcaggagatgggcggcatcgtgactgagctcattcgagactacaacagcagtcgcgaggacagcctgcaggatgcctgggactacgtgcaggctcaggtgaagtgctgcggctgggtcagcttctacaactggacagacaacgctgagctcatgaatcgccctgaggtcacctacccctgttcctgcgaagtcaagggggaagaggacaacagcctttctgtgaggaagggcttctgcgaggcccccggcaacaggacccagagtggcaaccaccctgaggactggcctgtgtaccaggagggctgcatggagaaggtgcaggcgtggctgcaggagaacctgggcatcatcctcggcgtgggcgtgggtgtggccatcgtcgagctcctggggatggtcctgtccatctgcttgtgccggcacgtccattccgaagactacagcaaggtccccaagtactgaggcagctgctatccccatctccctgcctggcccccaacctcagggctcccaggggtctccctggctccctcctccaggcctgcctcccacttcactgcgaagaccctcttgcccaccctgactgaaagtagggggctttctggggcctagcgatctctcctggcctatccgctgccagccttgagccctggctgttctgtggttcctctgctcaccgcccatcagggttctcttagcaactcagagaaaaatgctccccacagcgtccctggcgcaggtgggctggacttctacctgccctcaagggtgtgtatattgtataggggcaactgtatgaaaaattggggaggagggggccgggcgcggtggctcacgcctgtaatcccagcactttgggaggccgaggcgggtggatcacgaggtcaggagatcgagaccatcctggctaacatggtgaaaccccgtctctactaaaaatacaaaaaaaatttagccgggcgcggtggcgggcacctgtagtcccagctacttgggaggctgaggcaggagaatggtgtgaacccgggagcggaggttgcagtcaactcagctatttcagaggtaccatcccctgttggccacatatagtgcccgtctgtaaagccttcgataaacaaaaaaaa

SEQ ID NO: 316757 - DNA, 2000 bp, Homo sapiens
gagtccgcggcgttccccggctgcagccggggagggggccgaggagtgactgagccccgggctgtgcagtccgacgccgactgaggcacgagcgggtgacgctgggcctgcagcgcggagcagaaagcagaacccgcagagtcctccctgctgctgtgtggacgacacgtgggcacaggcagaagtgggccctgtgaccagctgcactggtttcgtggaaggaagctccaggactggcgggatgggctcagcctgtatcaaagtcaccaaatactttctcttcctcttcaacttgatcttctttatcctgggcgcagtgatcctgggcttcggggtgtggatcctggccgacaagagcagtttcatctctgtcctgcaaacctcctccagctcgcttaggatgggggcctatgtcttcatcggcgtgggggcagtcactatgctcatgggcttcctgggctgcatcggcgccgtcaacgaggtccgctgcctgctggggctgtactttgctttcctgctcctgatcctcattgcccaggtgacggccggggccctcttctacttcaacatgggcaagctgaagcaggagatgggcggcatcgtgactgagctcattcgagactacaacagcagtcgcgaggacagcctgcaggatgcctgggactacgtgcaggctcaggtgaagtgctgcggctgggtcagcttctacaactggacagacaacgctgagctcatgaatcgccctgaggtcacctacccctgttcctgcgaagtcaagggggaagaggacaacagcctttctgtgaggaagggcttctgcgaggcccccggcaacaggacccagagtggcaaccaccctgaggactggcctgtgtaccaggagggctgcatggagaaggtgcaggcgtggctgcaggagaacctgggcatcatcctcggcgtgggcgtgggtgtggccatcgtcgagctcctggggatggtcctgtccatctgcttgtgccggcacgtccattccgaagactacagcaaggtccccaagtactgaggcagctgctatccccatctccctgcctggcccccaacctcagggctcccaggggtctccctggctccctcctccaggcctgcctcccacttcactgcgaagaccctcttgcccaccctgactgaaagtagggggctttctggggcctagcgatctctcctggcctatccgctgccagccttgagccctggctgttctgtggttcctctgctcaccgcccatcagggttctcttagcaactcagagaaaaatgctccccacagcgtccctggcgcagttgggggcatggcacagagctggtcctgtattctccagggtccggagctggccaggggcggggaggaggaggatggcttctcctgggagaaggtgggctggcctttcttggcaagcggtcctctggcccctggggagtggggtgggtgaggctgtgccttgtagggggagaggggagggggctttgtgtgcaccattctgtaaaacacactcaagattctaagactattaaagaggatttataacagtctaagaaaaaaaaaaaaaaaaaaaaaacaacaaaaaaaaaaaaaaaaagagagagaggggcgcgcgcgcgcctcgctaagagaggatattcccccggagaggggcgcccaagtttcacgcgcgcgtgcccccgcgttttttgggcacagagggggcgccccctaattggaggggaggcgcacatatatataagcgacagagcgcacagagggggcgcgcggagggtatataaacaccagcgctgggcgtcacgcggggggaaaaccacggcggccaccacgggggggaacccctcggcgggaaagggcgacacaccctttaacagcggcggggggggggggggacacaacctactgtgggggacacacaacaccttacccccagccgaggagatttttaaccaggcccctaaggaggggacacacttcac

SEQ ID NO: 316758 - DNA, 2472 bp, Homo sapiens
gagtccgcggcgttccccggctgcagccggggagggggccgaggagtgactgagccccgggctgtgcagtccgacgccgactgaggcacgagcgggtgacgctgggcctgcagcgcggagcagaaagcagaacccgcagagtcctccctgctgctgtgtggacgacacgtgggcacaggcagaagtgggccctgtgaccagctgcactggtttcgtggaaggaagctccaggactggcgggatgggctcagcctgtatcaaagtcaccaaatactttctcttcctcttcaacttgatcttctttatcctgggcgcagtgatcctgggcttcggggtgtggatcctggccgacaagagcagtttcatctctgtcctgcaaacctcctccagctcgcttaggatgggggcctatgtcttcatcggcgtgggggcagtcactatgctcatgggcttcctgggctgcatcggcgccgtcaacgaggtccgctgcctgctggggctgtactttgctttcctgctcctgatcctcattgcccaggtgacggccggggccctcttctacttcaacatgggcaagctgaagcaggagatgggcggcatcgtgactgagctcattcgagactacaacagcagtcgcgaggacagcctgcaggatgcctgggactacgtgcaggctcaggtgaagtgctgcggctgggtcagcttctacaactggacagacaacgctgagctcatgaatcgccctgaggtcacctacccctgttcctgcgaagtcaagggggaagaggacaacagcctttctgtgaggaagggcttctgcgaggcccccggcaacaggacccagagtggcaaccaccctgaggactggcctgtgtaccaggagctcctggggatggtcctgtccatctgcttgtgccggcacgtccattccgaagactacagcaaggtccccaagtactgaggcagctgctatccccatctccctgcctggcccccaacctcagggctcccaggggtctccctggctccctcctccaggcctgcctcccacttcactgcgaagaccctcttgcccaccctgactgaaagtagggggctttctggggcctagcgatctctcctggcctatccgctgccagccttgagccctggctgttctgtggttcctctgctcaccgcccatcagggttctcttagcaactcagagaaaaatgctccccacagcgtccctggcgcaggtgggctggacttctacctgccctcaagggtgtgtatattgtataggggcaactgtatgaaaaattggggaggagggggccgggcgcggtggctcacgcctgtaatcccagcactttgggaggccgaggcgggtggatcacgaggtcaggagatcgagaccatcctggctaacatggtgaaaccccgtctctactaaaaatacaaaaaaaatttagccgggcgcggtggcgggcacctgtagtcccagctacttgggaggctgaggcaggagaatggtgtgaacccgggagcggaggttgcagtgagctgagatcgtgctactgcactccagcctgggggacagaaagagactccgtctcaaaaaaaaaaaaaaaaaaaaaaaaaattggggagggaagggcgttagataaggcactctgggctgtcaggagactgcctactgggtgggtcaacttatttcccactatgacatttatatctttatttttcacaattatattgaaggcagtgggagaggggagagggtgggttttacctgatattaaggggtggcaccccttccccaggcctgatgcaggtccatctagacagctcagattagcctaggccatgccctagggacacggcctaggggagctgggctggagggggtctgcctgggtaaggggatctggcttggccctgagctgcttagggacaggtgagtccttgggggcatggcacagagctggtcctgtattctccagggtccggagctggccaggggcggggaggaggaggatggcttctcctgggagaaggtgggctggcctttcttggcaagcggtcctctggcccctggggagtggggtgggtgaggctgtgccttgtagggggagaggggagggggctttgtgtgcaccattctgtaaaacacactcaagattctaagactattaaagaggatttataacagtctagtctggaatggtagggatgctgcttcctggggcaggggaggacccagggcagagggtgtgagcagagtggctgggtctgctggagactgctggacccctcactgctctgccctccccgcaggcatctgcttctgcagcctgaaccttaggaccgtgatgggccaggctctgatgggcctgcctgcatgccggggtgcctggagtttgatttggtgctaagagaggtatagattgtacctctcaattcctgcttctgaaacgtggggtaggaggt

SEQ ID NO: 316759 - DNA, 2706 bp, Homo sapiens
gagtccgcggcgttccccggctgcagccggggagggggccgaggagtgactgagccccgggctgtgcagtccgacgccgactgaggcacgagcgggtgacgctgggcctgcagcgcggagcagaaagcagaacccgcagccccttacccaggagcagcagtggtcatcttctggcacggagcctctccaggatgggcacatggctagagactggatcaggcctcagagggcttcagactgttggtcaggaaagcaacaacttttccagatcatcatcatcatcatcataagtcctccctgctgctgtgtggacgacacgtgggcacaggcagaagtgggccctgtgaccagctgcactggtttcgtggaaggaagctccaggactggcgggatgggctcagcctgtatcaaagtcaccaaatactttctcttcctcttcaacttgatcttctttatcctgggcgcagtgatcctgggcttcggggtgtggatcctggccgacaagagcagtttcatctctgtcctgcaaacctcctccagctcgcttaggatgggggcctatgtcttcatcggcgtgggggcagtcactatgctcatgggcttcctgggctgcatcggcgccgtcaacgaggtccgctgcctgctggggctgtactttgctttcctgctcctgatcctcattgcccaggtgacggccggggccctcttctacttcaacatgggcaagctgaagcaggagatgggcggcatcgtgactgagctcattcgagactacaacagcagtcgcgaggacagcctgcaggatgcctgggactacgtgcaggctcaggtgaagtgctgcggctgggtcagcttctacaactggacagacaacgctgagctcatgaatcgccctgaggtcacctacccctgttcctgcgaagtcaagggggaagaggacaacagcctttctgtgaggaagggcttctgcgaggcccccggcaacaggacccagagtggcaaccaccctgaggactggcctgtgtaccaggagggctgcatggagaaggtgcaggcgtggctgcaggagaacctgggcatcatcctcggcgtgggcgtgggtgtggccatcgtcgagctcctggggatggtcctgtccatctgcttgtgccggcacgtccattccgaagactacagcaaggtccccaagtactgaggcagctgctatccccatctccctgcctggcccccaacctcagggctcccaggggtctccctggctccctcctccaggcctgcctcccacttcactgcgaagaccctcttgcccaccctgactgaaagtagggggctttctggggcctagcgatctctcctggcctatccgctgccagccttgagccctggctgttctgtggttcctctgctcaccgcccatcagggttctcttagcaactcagagaaaaatgctccccacagcgtccctggcgcaggtgggctggacttctacctgccctcaagggtgtgtatattgtataggggcaactgtatgaaaaattggggaggagggggccgggcgcggtggctcacgcctgtaatcccagcactttgggaggccgaggcgggtggatcacgaggtcaggagatcgagaccatcctggctaacatggtgaaaccccgtctctactaaaaatacaaaaaaaatttagccgggcgcggtggcgggcacctgtagtcccagctacttgggaggctgaggcaggagaatggtgtgaacccgggagcggaggttgcagtgagctgagatcgtgctactgcactccagcctgggggacagaaagagactccgtctcaaaaaaaaaaaaaaaaaaaaaaaaaattggggagggaagggcgttagataaggcactctgggctgtcaggagactgcctactgggtgggtcaacttatttcccactatgacatttatatctttatttttcacaattatattgaaggcagtgggagaggggagagggtgggttttacctgatattaaggggtggcaccccttccccaggcctgatgcaggtccatctagacagctcagattagcctaggccatgccctagggacacggcctaggggagctgggctggagggggtctgcctgggtaaggggatctggcttggccctgagctgcttagggacaggtgagtccttgggggcatggcacagagctggtcctgtattctccagggtccggagctggccaggggcggggaggaggaggatggcttctcctgggagaaggtgggctggcctttcttggcaagcggtcctctggcccctggggagtggggtgggtgaggctgtgccttgtagggggagaggggagggggctttgtgtgcaccattctgtaaaacacactcaagattctaagactattaaagaggatttataacagtctagtctggaatggtagggatgctgcttcctggggcaggggaggacccagggcagagggtgtgagcagagtggctgggtctgctggagactgctggacccctcactgctctgccctccccgcaggcatctgcttctgcagcctgaaccttaggaccgtgatgggccaggctctgatgggcctgcctgcatgccggggtgcctggagtttgatttggtgctaagagaggtatagattgtacctctcaattcctgcttctgaaacgtggggtaggaggt

SEQ ID NO: 316760 - DNA, 2468 bp, Homo sapiens
gagccggaccccctaagacttcaagttggaaactcagtggggcttttccagagtcctccctgctgctgtgtggacgacacgtgggcacaggcagaagtgggccctgtgaccagctgcactggtttcgtggaaggaagctccaggactggcgggatgggctcagcctgtatcaaagtcaccaaatactttctcttcctcttcaacttgatcttctttatcctgggcgcagtgatcctgggcttcggggtgtggatcctggccgacaagagcagtttcatctctgtcctgcaaacctcctccagctcgcttaggatgggggcctatgtcttcatcggcgtgggggcagtcactatgctcatgggcttcctgggctgcatcggcgccgtcaacgaggtccgctgcctgctggggctgtactttgctttcctgctcctgatcctcattgcccaggtgacggccggggccctcttctacttcaacatgggcaagctgaagcaggagatgggcggcatcgtgactgagctcattcgagactacaacagcagtcgcgaggacagcctgcaggatgcctgggactacgtgcaggctcaggtgaagtgctgcggctgggtcagcttctacaactggacagacaacgctgagctcatgaatcgccctgaggtcacctacccctgttcctgcgaagtcaagggggaagaggacaacagcctttctgtgaggaagggcttctgcgaggcccccggcaacaggacccagagtggcaaccaccctgaggactggcctgtgtaccaggagggctgcatggagaaggtgcaggcgtggctgcaggagaacctgggcatcatcctcggcgtgggcgtgggtgtggccatcgtcgagctcctggggatggtcctgtccatctgcttgtgccggcacgtccattccgaagactacagcaaggtccccaagtactgaggcagctgctatccccatctccctgcctggcccccaacctcagggctcccaggggtctccctggctccctcctccaggcctgcctcccacttcactgcgaagaccctcttgcccaccctgactgaaagtagggggctttctggggcctagcgatctctcctggcctatccgctgccagccttgagccctggctgttctgtggttcctctgctcaccgcccatcagggttctcttagcaactcagagaaaaatgctccccacagcgtccctggcgcaggtgggctggacttctacctgccctcaagggtgtgtatattgtataggggcaactgtatgaaaaattggggaggagggggccgggcgcggtggctcacgcctgtaatcccagcactttgggaggccgaggcgggtggatcacgaggtcaggagatcgagaccatcctggctaacatggtgaaaccccgtctctactaaaaatacaaaaaaaatttagccgggcgcggtggcgggcacctgtagtcccagctacttgggaggctgaggcaggagaatggtgtgaacccgggagcggaggttgcagtgagctgagatcgtgctactgcactccagcctgggggacagaaagagactccgtctcaaaaaaaaaaaaaaaaaaaaaaaaaattggggagggaagggcgttagataaggcactctgggctgtcaggagactgcctactgggtgggtcaacttatttcccactatgacatttatatctttatttttcacaattatattgaaggcagtgggagaggggagagggtgggttttacctgatattaaggggtggcaccccttccccaggcctgatgcaggtccatctagacagctcagattagcctaggccatgccctagggacacggcctaggggagctgggctggagggggtctgcctgggtaaggggatctggcttggccctgagctgcttagggacaggtgagtccttgggggcatggcacagagctggtcctgtattctccagggtccggagctggccaggggcggggaggaggaggatggcttctcctgggagaaggtgggctggcctttcttggcaagcggtcctctggcccctggggagtggggtgggtgaggctgtgccttgtagggggagaggggagggggctttgtgtgcaccattctgtaaaacacactcaagattctaagactattaaagaggatttataacagtctagtctggaatggtagggatgctgcttcctggggcaggggaggacccagggcagagggtgtgagcagagtggctgggtctgctggagactgctggacccctcactgctctgccctccccgcaggcatctgcttctgcagcctgaaccttaggaccgtgatgggccaggctctgatgggcctgcctgcatgccggggtgcctggagtttgatttggtgctaagagaggtatagattgtacctctcaattcctgcttctgaaacgtggggtaggaggt

SEQ ID NO: 316761 - DNA, 2245 bp, Homo sapiens
gggacggttaggccaggtgtttatacctgctgtgcccactgattttgtactacttcttccccctagaaacctcctccagctcgcttaggatgggggcctatgtcttcatcggcgtgggggcagtcactatgctcatgggcttcctgggctgcatcggcgccgtcaacgaggtccgctgcctgctggggctgtactttgctttcctgctcctgatcctcattgcccaggtgacggccggggccctcttctacttcaacatgggcaagctgaagcaggagatgggcggcatcgtgactgagctcattcgagactacaacagcagtcgcgaggacagcctgcaggatgcctgggactacgtgcaggctcaggtgaagtgctgcggctgggtcagcttctacaactggacagacaacgctgagctcatgaatcgccctgaggtcacctacccctgttcctgcgaagtcaagggggaagaggacaacagcctttctgtgaggaagggcttctgcgaggcccccggcaacaggacccagagtggcaaccaccctgaggactggcctgtgtaccaggagggctgcatggagaaggtgcaggcgtggctgcaggagaacctgggcatcatcctcggcgtgggcgtgggtgtggccatcgtcgagctcctggggatggtcctgtccatctgcttgtgccggcacgtccattccgaagactacagcaaggtccccaagtactgaggcagctgctatccccatctccctgcctggcccccaacctcagggctcccaggggtctccctggctccctcctccaggcctgcctcccacttcactgcgaagaccctcttgcccaccctgactgaaagtagggggctttctggggcctagcgatctctcctggcctatccgctgccagccttgagccctggctgttctgtggttcctctgctcaccgcccatcagggttctcttagcaactcagagaaaaatgctccccacagcgtccctggcgcaggtgggctggacttctacctgccctcaagggtgtgtatattgtataggggcaactgtatgaaaaattggggaggagggggccgggcgcggtggctcacgcctgtaatcccagcactttgggaggccgaggcgggtggatcacgaggtcaggagatcgagaccatcctggctaacatggtgaaaccccgtctctactaaaaatacaaaaaaaatttagccgggcgcggtggcgggcacctgtagtcccagctacttgggaggctgaggcaggagaatggtgtgaacccgggagcggaggttgcagtgagctgagatcgtgctactgcactccagcctgggggacagaaagagactccgtctcaaaaaaaaaaaaaaaaaaaaaaaaaattggggagggaagggcgttagataaggcactctgggctgtcaggagactgcctactgggtgggtcaacttatttcccactatgacatttatatctttatttttcacaattatattgaaggcagtgggagaggggagagggtgggttttacctgatattaaggggtggcaccccttccccaggcctgatgcaggtccatctagacagctcagattagcctaggccatgccctagggacacggcctaggggagctgggctggagggggtctgcctgggtaaggggatctggcttggccctgagctgcttagggacaggtgagtccttgggggcatggcacagagctggtcctgtattctccagggtccggagctggccaggggcggggaggaggaggatggcttctcctgggagaaggtgggctggcctttcttggcaagcggtcctctggcccctggggagtggggtgggtgaggctgtgccttgtagggggagaggggagggggctttgtgtgcaccattctgtaaaacacactcaagattctaagactattaaagaggatttataacagtctagtctggaatggtagggatgctgcttcctggggcaggggaggacccagggcagagggtgtgagcagagtggctgggtctgctggagactgctggacccctcactgctctgccctccccgcaggcatctgcttctgcagcctgaaccttaggaccgtgatgggccaggctctgatgggcctgcctgcatgccggggtgcctggagtttgatttggtgctaagagaggtatagattgtacctctcaattcctgcttctgaaacgtggggtaggaggt

SEQ ID NO: 316762 - DNA, 2252 bp, Homo sapiens
gggccatgctagtgcctgccaggcagggtgatgtcagagttggagacggcgtgtggaaagcccatgaggcacaaaacctcctccagctcgcttaggatgggggcctatgtcttcatcggcgtgggggcagtcactatgctcatgggcttcctgggctgcatcggcgccgtcaacgaggtccgctgcctgctggggctgtactttgctttcctgctcctgatcctcattgcccaggtgacggccggggccctcttctacttcaacatgggcaagctgaagcaggagatgggcggcatcgtgactgagctcattcgagactacaacagcagtcgcgaggacagcctgcaggatgcctgggactacgtgcaggctcaggtgaagtgctgcggctgggtcagcttctacaactggacagacaacgctgagctcatgaatcgccctgaggtcacctacccctgttcctgcgaagtcaagggggaagaggacaacagcctttctgtgaggaagggcttctgcgaggcccccggcaacaggacccagagtggcaaccaccctgaggactggcctgtgtaccaggagggctgcatggagaaggtgcaggcgtggctgcaggagaacctgggcatcatcctcggcgtgggcgtgggtgtggccatcgtcgagctcctggggatggtcctgtccatctgcttgtgccggcacgtccattccgaagactacagcaaggtccccaagtactgaggcagctgctatccccatctccctgcctggcccccaacctcagggctcccaggggtctccctggctccctcctccaggcctgcctcccacttcactgcgaagaccctcttgcccaccctgactgaaagtagggggctttctggggcctagcgatctctcctggcctatccgctgccagccttgagccctggctgttctgtggttcctctgctcaccgcccatcagggttctcttagcaactcagagaaaaatgctccccacagcgtccctggcgcaggtgggctggacttctacctgccctcaagggtgtgtatattgtataggggcaactgtatgaaaaattggggaggagggggccgggcgcggtggctcacgcctgtaatcccagcactttgggaggccgaggcgggtggatcacgaggtcaggagatcgagaccatcctggctaacatggtgaaaccccgtctctactaaaaatacaaaaaaaatttagccgggcgcggtggcgggcacctgtagtcccagctacttgggaggctgaggcaggagaatggtgtgaacccgggagcggaggttgcagtgagctgagatcgtgctactgcactccagcctgggggacagaaagagactccgtctcaaaaaaaaaaaaaaaaaaaaaaaaaattggggagggaagggcgttagataaggcactctgggctgtcaggagactgcctactgggtgggtcaacttatttcccactatgacatttatatctttatttttcacaattatattgaaggcagtgggagaggggagagggtgggttttacctgatattaaggggtggcaccccttccccaggcctgatgcaggtccatctagacagctcagattagcctaggccatgccctagggacacggcctaggggagctgggctggagggggtctgcctgggtaaggggatctggcttggccctgagctgcttagggacaggtgagtccttgggggcatggcacagagctggtcctgtattctccagggtccggagctggccaggggcggggaggaggaggatggcttctcctgggagaaggtgggctggcctttcttggcaagcggtcctctggcccctggggagtggggtgggtgaggctgtgccttgtagggggagaggggagggggctttgtgtgcaccattctgtaaaacacactcaagattctaagactattaaagaggatttataacagtctagtctggaatggtagggatgctgcttcctggggcaggggaggacccagggcagagggtgtgagcagagtggctgggtctgctggagactgctggacccctcactgctctgccctccccgcaggcatctgcttctgcagcctgaaccttaggaccgtgatgggccaggctctgatgggcctgcctgcatgccggggtgcctggagtttgatttggtgctaagagaggtatagattgtacctctcaattcctgcttctgaaacgtggggtaggaggt

SEQ ID NO: 316763 - DNA, 2389 bp, Homo sapiens
acctattggatagcggatgaggggctgtgaccagctgcactggtttcgtggaaggaagctccaggactggcgggatgggctcagcctgtatcaaagtcaccaaatactttctcttcctcttcaacttgatcttctttatcctgggcgcagtgatcctgggcttcggggtgtggatcctggccgacaagagcagtttcatctctgtcctgcaaacctcctccagctcgcttaggatgggggcctatgtcttcatcggcgtgggggcagtcactatgctcatgggcttcctgggctgcatcggcgccgtcaacgaggtccgctgcctgctggggctgtactttgctttcctgctcctgatcctcattgcccaggtgacggccggggccctcttctacttcaacatgggcaagctgaagcaggagatgggcggcatcgtgactgagctcattcgagactacaacagcagtcgcgaggacagcctgcaggatgcctgggactacgtgcaggctcaggtgaagtgctgcggctgggtcagcttctacaactggacagacaacgctgagctcatgaatcgccctgaggtcacctacccctgttcctgcgaagtcaagggggaagaggacaacagcctttctgtgaggaagggcttctgcgaggcccccggcaacaggacccagagtggcaaccaccctgaggactggcctgtgtaccaggagggctgcatggagaaggtgcaggcgtggctgcaggagaacctgggcatcatcctcggcgtgggcgtgggtgtggccatcgtcgagctcctggggatggtcctgtccatctgcttgtgccggcacgtccattccgaagactacagcaaggtccccaagtactgaggcagctgctatccccatctccctgcctggcccccaacctcagggctcccaggggtctccctggctccctcctccaggcctgcctcccacttcactgcgaagaccctcttgcccaccctgactgaaagtagggggctttctggggcctagcgatctctcctggcctatccgctgccagccttgagccctggctgttctgtggttcctctgctcaccgcccatcagggttctcttagcaactcagagaaaaatgctccccacagcgtccctggcgcaggtgggctggacttctacctgccctcaagggtgtgtatattgtataggggcaactgtatgaaaaattggggaggagggggccgggcgcggtggctcacgcctgtaatcccagcactttgggaggccgaggcgggtggatcacgaggtcaggagatcgagaccatcctggctaacatggtgaaaccccgtctctactaaaaatacaaaaaaaatttagccgggcgcggtggcgggcacctgtagtcccagctacttgggaggctgaggcaggagaatggtgtgaacccgggagcggaggttgcagtgagctgagatcgtgctactgcactccagcctgggggacagaaagagactccgtctcaaaaaaaaaaaaaaaaaaaaaaaaaattggggagggaagggcgttagataaggcactctgggctgtcaggagactgcctactgggtgggtcaacttatttcccactatgacatttatatctttatttttcacaattatattgaaggcagtgggagaggggagagggtgggttttacctgatattaaggggtggcaccccttccccaggcctgatgcaggtccatctagacagctcagattagcctaggccatgccctagggacacggcctaggggagctgggctggagggggtctgcctgggtaaggggatctggcttggccctgagctgcttagggacaggtgagtccttgggggcatggcacagagctggtcctgtattctccagggtccggagctggccaggggcggggaggaggaggatggcttctcctgggagaaggtgggctggcctttcttggcaagcggtcctctggcccctggggagtggggtgggtgaggctgtgccttgtagggggagaggggagggggctttgtgtgcaccattctgtaaaacacactcaagattctaagactattaaagaggatttataacagtctagtctggaatggtagggatgctgcttcctggggcaggggaggacccagggcagagggtgtgagcagagtggctgggtctgctggagactgctggacccctcactgctctgccctccccgcaggcatctgcttctgcagcctgaaccttaggaccgtgatgggccaggctctgatgggcctgcctgcatgccggggtgcctggagtttgatttggtgctaagagaggtatagattgtacctctcaattcctgcttctgaaacgtggggtaggaggt

SEQ ID NO: 316764 - DNA, 2182 bp, Homo sapiens
ccagccgagtgcagcctgaccgcggcgctggccgtaacatcgggtggagagcatctctcggggcacgcaggctgggtgcacctggtcggggaccctcagctgactttgtgcctgctctgtgtccccagtactttgctttcctgctcctgatcctcattgcccaggtgacggccggggccctcttctacttcaacatgggcaagctgaagcaggagatgggcggcatcgtgactgagctcattcgagactacaacagcagtcgcgaggacagcctgcaggatgcctgggactacgtgcaggctcaggtgaagtgctgcggctgggtcagcttctacaactggacagacaacgctgagctcatgaatcgccctgaggtcacctacccctgttcctgcgaagtcaagggggaagaggacaacagcctttctgtgaggaagggcttctgcgaggcccccggcaacaggacccagagtggcaaccaccctgaggactggcctgtgtaccaggagggctgcatggagaaggtgcaggcgtggctgcaggagaacctgggcatcatcctcggcgtgggcgtgggtgtggccatcgtcgagctcctggggatggtcctgtccatctgcttgtgccggcacgtccattccgaagactacagcaaggtccccaagtactgaggcagctgctatccccatctccctgcctggcccccaacctcagggctcccaggggtctccctggctccctcctccaggcctgcctcccacttcactgcgaagaccctcttgcccaccctgactgaaagtagggggctttctggggcctagcgatctctcctggcctatccgctgccagccttgagccctggctgttctgtggttcctctgctcaccgcccatcagggttctcttagcaactcagagaaaaatgctccccacagcgtccctggcgcaggtgggctggacttctacctgccctcaagggtgtgtatattgtataggggcaactgtatgaaaaattggggaggagggggccgggcgcggtggctcacgcctgtaatcccagcactttgggaggccgaggcgggtggatcacgaggtcaggagatcgagaccatcctggctaacatggtgaaaccccgtctctactaaaaatacaaaaaaaatttagccgggcgcggtggcgggcacctgtagtcccagctacttgggaggctgaggcaggagaatggtgtgaacccgggagcggaggttgcagtgagctgagatcgtgctactgcactccagcctgggggacagaaagagactccgtctcaaaaaaaaaaaaaaaaaaaaaaaaaattggggagggaagggcgttagataaggcactctgggctgtcaggagactgcctactgggtgggtcaacttatttcccactatgacatttatatctttatttttcacaattatattgaaggcagtgggagaggggagagggtgggttttacctgatattaaggggtggcaccccttccccaggcctgatgcaggtccatctagacagctcagattagcctaggccatgccctagggacacggcctaggggagctgggctggagggggtctgcctgggtaaggggatctggcttggccctgagctgcttagggacaggtgagtccttgggggcatggcacagagctggtcctgtattctccagggtccggagctggccaggggcggggaggaggaggatggcttctcctgggagaaggtgggctggcctttcttggcaagcggtcctctggcccctggggagtggggtgggtgaggctgtgccttgtagggggagaggggagggggctttgtgtgcaccattctgtaaaacacactcaagattctaagactattaaagaggatttataacagtctagtctggaatggtagggatgctgcttcctggggcaggggaggacccagggcagagggtgtgagcagagtggctgggtctgctggagactgctggacccctcactgctctgccctccccgcaggcatctgcttctgcagcctgaaccttaggaccgtgatgggccaggctctgatgggcctgcctgcatgccggggtgcctggagtttgatttggtgctaagagaggtatagattgtacctctcaattcctgcttctgaaacgtggggtaggaggt

SEQ ID NO: 316765 - DNA, 1488 bp, Homo sapiens
agatgagcagaggaaccacagacacagcagggtctccctggctccctcctccaggcctgcctcccacttcactgcgaagaccctcttgcccaccctgactgaaagtagggggctttctggggcctagcgatctctcctggcctatccgctgccagccttgagccctggctgttctgtggttcctctgctcaccgcccatcagggttctcttagcaactcagagaaaaatgctccccacagcgtccctggcgcaggtgggctggacttctacctgccctcaagggtgtgtatattgtataggggcaactgtatgaaaaattggggaggagggggccgggcgcggtggctcacgcctgtaatcccagcactttgggaggccgaggcgggtggatcacgaggtcaggagatcgagaccatcctggctaacatggtgaaaccccgtctctactaaaaatacaaaaaaaatttagccgggcgcggtggcgggcacctgtagtcccagctacttgggaggctgaggcaggagaatggtgtgaacccgggagcggaggttgcagtgagctgagatcgtgctactgcactccagcctgggggacagaaagagactccgtctcaaaaaaaaaaaaaaaaaaaaaaaaaattggggagggaagggcgttagataaggcactctgggctgtcaggagactgcctactgggtgggtcaacttatttcccactatgacatttatatctttatttttcacaattatattgaaggcagtgggagaggggagagggtgggttttacctgatattaaggggtggcaccccttccccaggcctgatgcaggtccatctagacagctcagattagcctaggccatgccctagggacacggcctaggggagctgggctggagggggtctgcctgggtaaggggatctggcttggccctgagctgcttagggacaggtgagtccttgggggcatggcacagagctggtcctgtattctccagggtccggagctggccaggggcggggaggaggaggatggcttctcctgggagaaggtgggctggcctttcttggcaagcggtcctctggcccctggggagtggggtgggtgaggctgtgccttgtagggggagaggggagggggctttgtgtgcaccattctgtaaaacacactcaagattctaagactattaaagaggatttataacagtctagtctggaatggtagggatgctgcttcctggggcaggggaggacccagggcagagggtgtgagcagagtggctgggtctgctggagactgctggacccctcactgctctgccctccccgcaggcatctgcttctgcagcctgaaccttaggaccgtgatgggccaggctctgatgggcctgcctgcatgccggggtgcctggagtttgatttggtgctaagagaggtatagattgtacctctcaattcctgcttctgaaacgtggggtaggaggt

SEQ ID NO: 316766 - DNA, 581 bp, Homo sapiens
gcggccgcctactactactactgctcgaattcaagcttctaacgatgtacggggacttgggggcatggcacagagctggtcctgtattctccagggtccggagctggccaggggcggggaggaggaggatggcttctcctgggagaaggtgggctggcctttcttggcaagcggtcctctggcccctggggagtggggtgggtgaggctgtgccttgtagggggagaggggagggggctttgtgtgcaccattctgtaaaacacactcaagattctaagactattaaagaggatttataacagtctagtctggaatggtagggatgctgcttcctggggcaggggaggacccagggcagagggtgtgagcagagtggctgggtctgctggagactgctggacccctcactgctctgccctccccgcaggcatctgcttctgcagcctgaaccttaggaccgtgatgggccaggctctgatgggcctgcctgcatgccggggtgcctggagtttgatttggtgctaagagaggtatagattgtacctctcaattcctgcttctgaaacgtggggtaggaggt

SEQ ID NO: 316767 - DNA, 626 bp, Homo sapiens
tgcactgtgaactgtctgccgtccattctccttgtgccctgcacacctgcgctccttcaacttgaacttccttcctactctgctttgtatttttgctggtcctggttttgatttttctgctgtacttgtagtttatgatggttcggctgggaccaggggcctggaagtggcatatctcagtctctgtcctggggaggtcctccctctgccaggagggcagcctgcctagggtgagccgtgagcacaagcagtctgtcccctgccttgcccaggtgaagtgctgcggctgggtcagcttctacaactggacagacaacgctgagctcatgaatcgccctgaggtcacctacccctgttcctgcgaagtcaagggggaagaggacaacagcctttctgtgaggaagggcttctgcgaggcccccggcaacaggacccagagtggcaaccaccctgaggactggcctgtgtaccaggaggtgtgcggggggctgcggatcgggggcggggctccgagggcgttgggggccatctgggctactgctcagcaattccttcctgcatttagttccttcccttaattcatctgtcatttgtaccttcatctacttctttgttaatgtatttat

SEQ ID NO: 316768 - DNA, 465 bp, Homo sapiens
ctccctctgctgcctgcatcacagggtggttgtgaggctcaagttgaggatccacttaatccccatgtaaacctggatggtgaggctggggcgtctgaggccgggacacccagcctccctctgactctccgcctctccccacagctcctggggatggtcctgtccatctgcttgtgccggcacgtccattccgaagactacagcaaggtccccaagtactgaggcagctgctatccccatctccctgcctggcccccaacctcagggctcccaggggtctccctggctccctcctccaggcctgcctcccacttcactgcgaagaccctcttgcccaccctgactgaaagtagggggctttctggggcctagcgatctctcctggcctatccgctgccagccttgagccctggctgttctgtggttcctctgctcaccgcccatcagggttctcttagcaactca

SEQ ID NO: 316769 - DNA, 478 bp, Homo sapiens
tggcctatccgctgccagccttgagccctggctgttctgtggttcctctgctcaccgcccatcagggttctcttagcaactcagagaaaaatgctccccacagcgtccctggcgcaggtgggctggacttctacctgccctcaagggtgtgtatattgtataggggcaactgtatgaaaaattggggaggagggggccgggcgcggtggctcacgcctgtaatcccagcactttgggaggccgaggcgggtggatcacgaggtcaggagatcgagaccatcctggctaacatggtgaaaccccgtctctactaaaaatacaaaaaaaatttagccgggcgcggtggcgggcacctgtagtcccagctacttgggaggctgaggcaggagaatggtgtgaacccgggagcggaggttgcagtgagctgagatcgtgctactgcactccagcctgggggacagaaagagactccgtctca

SEQ ID NO: 316770 - DNA, 2260 bp, Homo sapiens
aagcccagcagccccggggcggatggctccggccgcctggctccgcagcgcggccgcgcgcgccctcctgcccccgatgctgctgctgctgctccagccgccgccgctgctggcccgggctctgccgccggacgtccaccacctccatgccgagaggagggggccacagccctggcatgcagccctgcccagtagcccggcacctgcccctgccacgcaggaagccccccggcctgccagcagcctcaggcctccccgctgtggcgtgcccgacccatctgatgggctgagtgcccgcaaccgacagaagaggttcgtgctttctggcgggcgctgggagaagacggacctcacctacaggatccttcggttcccatggcagttggtgcaggagcaggtgcggcagacgatggcagaggccctaaaggtatggagcgatgtgacgccactcacctttactgaggtgcacgagggccgtgctgacatcatgatcgacttcgccaggtactggcatggggacgacctgccgtttgatgggcctgggggcatcctggcccatgccttcttccccaagactcaccgagaaggggatgtccacttcgactatgatgagacctggactatcggggatgaccagggcacagacctgctgcaggtggcagcccatgaatttggccacgtgctggggctgcagcacacaacagcagccaaggccctgatgtccgccttctacacctttcgctacccactgagtctcagcccagatgactgcaggggcgttcaacacctatatggccagccctggcccactgtcacctccaggaccccagccctgggcccccaggctgggatagacaccaatgagattgcaccgctggagccagacgccccgccagatgcctgtgaggcctcctttgacgcggtctccaccatccgaggcgagctctttttcttcaaagcgggctttgtgtggcgcctccgtgggggccagctgcagcccggctacccagcattggcctctcgccactggcagggactgcccagccctgtggacgctgccttcgaggatgcccagggccacatttggttcttccaaggtgctcagtactgggtgtacgacggtgaaaagccagtcctgggccccgcacccctcaccgagctgggcctggtgaggttcccggtccatgctgccttggtctggggtcccgagaagaacaagatctacttcttccgaggcagggactactggcgtttccaccccagcacccggcgtgtagacagtcccgtgccccgcagggccactgactggagaggggtgccctctgagatcgacgctgccttccaggatgctgatggctatgcctacttcctgcgcggccgcctctactggaagtttgaccctgtgaaggtgaaggctctggaaggcttcccccgtctcgtgggtcctgacttctttggctgtgccgagcctgccaacactttcctctgaccatggcttggatgccctcaggggtgctgacccctgccaggccacgaatatcaggctagagacccatggccatctttgtggctgtgggcaccaggcatgggactgagcccatgtctcctcagggggatggggtggggtacaaccaccatgacaactgccgggagggccacgcaggtcgtggtcacctgccagcgactgtctcagactgggcagggaggctttggcatgacttaagaggaagggcagtcttgggcccgctatgcaggtcctggcaaacctggctgccctgtctccatccctgtccctcagggtagcaccatggcaggactgggggaactggagtgtccttgctgtatccctgttgtgaggttccttccaggggctggcactgaagcaagggtgctggggccccatggccttcagccctggctgagcaactgggctgtagggcagggccacttcctgaggtcaggtcttggtaggtgcctgcatctgtctgccttctggctgacaatcctggaaatctgttctccagaatccaggccaaaaagttcacagtcaaatggggaggggtattcttcatgcaggagaccccaggccctggaggctgcaacatacctcaatcctgtcccaggccggatcctcctgaagcccttttcgcagcactgctatcctccaaagccattgtaaatgtgtgtacagtgtgtataaaccttcttcttcttttttttttttaaactgaggattgtcattaaacacagttgttttcta

SEQ ID NO: 316771 - DNA, 2615 bp, Homo sapiens
ctctggatgcaaagtgtcgcagcacatgcctgcggacgggtgttcagtcactcaggcagcctttacaagagacctgtgaggaccaggctctgggactccacggtgaatgaggcagacacagccccatcctctgtgtcagtctgaggtgggtgtcagccatgtcattgtccaactctaccatcacaacttgggcttcgagcaggtggagacagtggtaagcggggagaggcaatagtgggcatctcactgggtgacctgggaggaccctgggcaggtgatggggaagctgaggctcacacatcctgcgggtggggacccagcctgaagaatgggctggtgtcacacagcattggagctgagactggggtctttagaatttcctaggtgggggcctgggaaccaacaggggctcaaggaaccaaggtgtccccacagtgagtggcactgtcaggtctaggatgggggtctcgggacccctggtcctggttctttccactgaattcagacacttgtatttgcctaagtatgagcaaaccacatacacatgtgcccatgtggccagggagaccagtgcgctgaagctgaggcccagagtacacctggcctgtgtcctgagtgttcacacacccaccaagcatccaggggcaactcctggtgcctcagccatcgggggctgtcccttccctgaggcccaggcccctccatctccctccaggatccttcggttcccatggcagttggtgcaggagcaggtgcggcagacgatggcagaggccctaaaggtatggagcgatgtgacgccactcacctttactgaggtgcacgagggccgtgctgacatcatgatcgacttcgccaggtactggcatggggacgacctgccgtttgatgggcctgggggcatcctggcccatgccttcttccccaagactcaccgagaaggggatgtccacttcgactatgatgagacctggactatcggggatgaccagggcacagacctgctgcaggtggcagcccatgaatttggccacgtgctggggctgcagcacacaacagcagccaaggccctgatgtccgccttctacacctttcgctacccactgagtctcagcccagatgactgcaggggcgttcaacacctatatggccagccctggcccactgtcacctccaggaccccagccctgggcccccaggctgggatagacaccaatgagattgcaccgctggagccagacgccccgccagatgcctgtgaggcctcctttgacgcggtctccaccatccgaggcgagctctttttcttcaaagcgggctttgtgtggcgcctccgtgggggccagctgcagcccggctacccagcattggcctctcgccactggcagggactgcccagccctgtggacgctgccttcgaggatgcccagggccacatttggttcttccaaggtgctcagtactgggtgtacgacggtgaaaagccagtcctgggccccgcacccctcaccgagctgggcctggtgaggttcccggtccatgctgccttggtctggggtcccgagaagaacaagatctacttcttccgaggcagggactactggcgtttccaccccagcacccggcgtgtagacagtcccgtgccccgcagggccactgactggagaggggtgccctctgagatcgacgctgccttccaggatgctgatggctatgcctacttcctgcgcggccgcctctactggaagtttgaccctgtgaaggtgaaggctctggaaggcttcccccgtctcgtgggtcctgacttctttggctgtgccgagcctgccaacactttcctctgaccatggcttggatgccctcaggggtgctgacccctgccaggccacgaatatcaggctagagacccatggccatctttgtggctgtgggcaccaggcatgggactgagcccatgtctcctcagggggatggggtggggtacaaccaccatgacaactgccgggagggccacgcaggtcgtggtcacctgccagcgactgtctcagactgggcagggaggctttggcatgacttaagaggaagggcagtcttgggcccgctatgcaggtcctggcaaacctggctgccctgtctccatccctgtccctcagggtagcaccatggcaggactgggggaactggagtgtccttgctgtatccctgttgtgaggttccttccaggggctggcactgaagcaagggtgctggggccccatggccttcagccctggctgagcaactgggctgtagggcagggccacttcctgaggtcaggtcttggtaggtgcctgcatctgtctgccttctggctgacaatcctggaaatctgttctccagaatccaggccaaaaagttcacagtcaaatggggaggggtattcttcatgcaggagaccccaggccctggaggctgcaacatacctcaatcctgtcccaggccggatcctcctgaagcccttttcgcagcactgctatcctccaaagccattgtaaatgtgtgtacagtgtgtataaaccttcttcttcttttttttttttaaactgaggattgtcattaaacacagttgttttcta

SEQ ID NO: 316772 - DNA, 2352 bp, Homo sapiens
aagcccagcagccccggggcggatggctccggccgcctggctccgcagcgcggccgcgcgcgccctcctgcccccgatgctgctgctgctgctccagccgccgccgctgctggcccgggctctgccgccggacgtccaccacctccatgccgagaggagggggccacagccctggcatgcagccctgcccagtagcccggcacctgcccctgccacgcaggaagccccccggcctgccagcagcctcaggcctccccgctgtggcgtgcccgacccatctgatgggctgagtgcccgcaaccgacagaagaggttcgtgctttctggcgggcgctgggagaagacggacctcacctacaggatccttcggttcccatggcagttggtgcaggagcaggtgcggcagacgatggcagaggccctaaaggtatggagcgatgtgacgccactcacctttactgaggtgcacgagggccgtgctgacatcatgatcgacttcgccaggtactggcatggggacgacctgccgtttgatgggcctgggggcatcctggcccatgccttcttccccaagactcaccgagaaggggatgtccacttcgactatgatgagacctggactatcggggatgaccagggcacagacctgctgcaggtggcagcccatgaatttggccacgtgctggggctgcagcacacaacagcagccaaggccctgatgtccgccttctacacctttcgctacccactgagtctcagcccagatgactgcaggggcgttcaacacctatatggccagccctggcccactgtcacctccaggaccccagccctgggcccccaggctgggatagacaccaatgagattgcaccgctggaggtgaggccctgcctgccagtccccctactcctctgctggccactgtgactgcagcatatgccctcagcatgtgtccctctctcccaccccagccagacgccccgccagatgcctgtgaggcctcctttgacgcggtctccaccatccgaggcgagctctttttcttcaaagcgggctttgtgtggcgcctccgtgggggccagctgcagcccggctacccagcattggcctctcgccactggcagggactgcccagccctgtggacgctgccttcgaggatgcccagggccacatttggttcttccaaggtgctcagtactgggtgtacgacggtgaaaagccagtcctgggccccgcacccctcaccgagctgggcctggtgaggttcccggtccatgctgccttggtctggggtcccgagaagaacaagatctacttcttccgaggcagggactactggcgtttccaccccagcacccggcgtgtagacagtcccgtgccccgcagggccactgactggagaggggtgccctctgagatcgacgctgccttccaggatgctgatggctatgcctacttcctgcgcggccgcctctactggaagtttgaccctgtgaaggtgaaggctctggaaggcttcccccgtctcgtgggtcctgacttctttggctgtgccgagcctgccaacactttcctctgaccatggcttggatgccctcaggggtgctgacccctgccaggccacgaatatcaggctagagacccatggccatctttgtggctgtgggcaccaggcatgggactgagcccatgtctcctcagggggatggggtggggtacaaccaccatgacaactgccgggagggccacgcaggtcgtggtcacctgccagcgactgtctcagactgggcagggaggctttggcatgacttaagaggaagggcagtcttgggcccgctatgcaggtcctggcaaacctggctgccctgtctccatccctgtccctcagggtagcaccatggcaggactgggggaactggagtgtccttgctgtatccctgttgtgaggttccttccaggggctggcactgaagcaagggtgctggggccccatggccttcagccctggctgagcaactgggctgtagggcagggccacttcctgaggtcaggtcttggtaggtgcctgcatctgtctgccttctggctgacaatcctggaaatctgttctccagaatccaggccaaaaagttcacagtcaaatggggaggggtattcttcatgcaggagaccccaggccctggaggctgcaacatacctcaatcctgtcccaggccggatcctcctgaagcccttttcgcagcactgctatcctccaaagccattgtaaatgtgtgtacagtgtgtataaaccttcttcttcttttttttttttaaactgaggattgtcattaaacacagttgttttcta

SEQ ID NO: 316773 - DNA, 2698 bp, Homo sapiens
aagcccagcagccccggggcggatggctccggccgcctggctccgcagcgcggccgcgcgcgccctcctgcccccgatgctgctgctgctgctccagccgccgccgctgctggcccgggctctgccgccggacgtccaccacctccatgccgagaggagggggccacagccctggcatgcagccctgcccagtagcccggcacctgcccctgccacgcaggaagccccccggcctgccagcagcctcaggcctccccgctgtggcgtgcccgacccatctgatgggctgagtgcccgcaaccgacagaagaggttcgtgctttctggcgggcgctgggagaagacggacctcacctacaggatccttcggttcccatggcagttggtgcaggagcaggtgcggcagacgatggcagaggccctaaaggtatggagcgatgtgacgccactcacctttactgaggtgcacgagggccgtgctgacatcatgatcgacttcgccaggtactggcatggggacgacctgccgtttgatgggcctgggggcatcctggcccatgccttcttccccaagactcaccgagaaggggatgtccacttcgactatgatgagacctggactatcggggatgaccagggcacagacctgctgcaggtggcagcccatgaatttggccacgtgctggggctgcagcacacaacagcagccaaggccctgatgtccgccttctacacctttcgctacccactgagtctcagcccagatgactgcaggggcgttcaacacctatatggccagccctggcccactgtcacctccaggaccccagccctgggcccccaggctgggatagacaccaatgagattgcaccgctggagccagacgccccgccagatgcctgtgaggcctcctttgacgcggtctccaccatccgaggcgagctctttttcttcaaagcgggctttgtgtggcgcctccgtgggggccagctgcagcccggctacccagcattggcctctcgccactggcagggactgcccagccctgtggacgctgccttcgaggatgcccagggccacatttggttcttccaagagctgggatttccatcctcaactggcagagatgagagcctggagcattgcagatgccagggacttcacaaatgaaggcacagcatgggaaacctgcgtgggttccagggcagtccagcctgcaggggcccagggagtggtcagtaggcatttgtcacagccaaatgccagtggaaggagcagccgcccaggcagccctctactgatgagagtaacctcacccgtgcactagtttacagagcattcactgccccagcttatcccaggcctcccgcttccctctgcgggtggggtgctgagcaggcattattggcctgcatgttttactgatgaggaaactgaggctgggagagtctgtggtaggggtcaagcaggtccacagtggcggggcatggcagtggtggctgggcaggtccttgcagccttccctctccggcaggtgctcagtactgggtgtacgacggtgaaaagccagtcctgggccccgcacccctcaccgagctgggcctggtgaggttcccggtccatgctgccttggtctggggtcccgagaagaacaagatctacttcttccgaggcagggactactggcgtttccaccccagcacccggcgtgtagacagtcccgtgccccgcagggccactgactggagaggggtgccctctgagatcgacgctgccttccaggatgctgatggctatgcctacttcctgcgcggccgcctctactggaagtttgaccctgtgaaggtgaaggctctggaaggcttcccccgtctcgtgggtcctgacttctttggctgtgccgagcctgccaacactttcctctgaccatggcttggatgccctcaggggtgctgacccctgccaggccacgaatatcaggctagagacccatggccatctttgtggctgtgggcaccaggcatgggactgagcccatgtctcctcagggggatggggtggggtacaaccaccatgacaactgccgggagggccacgcaggtcgtggtcacctgccagcgactgtctcagactgggcagggaggctttggcatgacttaagaggaagggcagtcttgggcccgctatgcaggtcctggcaaacctggctgccctgtctccatccctgtccctcagggtagcaccatggcaggactgggggaactggagtgtccttgctgtatccctgttgtgaggttccttccaggggctggcactgaagcaagggtgctggggccccatggccttcagccctggctgagcaactgggctgtagggcagggccacttcctgaggtcaggtcttggtaggtgcctgcatctgtctgccttctggctgacaatcctggaaatctgttctccagaatccaggccaaaaagttcacagtcaaatggggaggggtattcttcatgcaggagaccccaggccctggaggctgcaacatacctcaatcctgtcccaggccggatcctcctgaagcccttttcgcagcactgctatcctccaaagccattgtaaatgtgtgtacagtgtgtataaaccttcttcttcttttttttttttaaactgaggattgtcattaaacacagttgttttcta

SEQ ID NO: 316774 - DNA, 2118 bp, Homo sapiens
aagcccagcagccccggggcggatggctccggccgcctggctccgcagcgcggccgcgcgcgccctcctgcccccgatgctgctgctgctgctccagccgccgccgctgctggcccgggctctgccgccggacgtccaccacctccatgccgagaggagggggccacagccctggcatgcagccctgcccagtagcccggcacctgcccctgccacgcaggaagccccccggcctgccagcagcctcaggcctccccgctgtggcgtgcccgacccatctgatgggctgagtgcccgcaaccgacagaagaggttcgtgctttctggcgggcgctgggagaagacggacctcacctacaggatccttcggttcccatggcagttggtgcaggagcaggtgcggcagacgatggcagaggccctaaaggtatggagcgatgtgacgccactcacctttactgaggtgcacgagggccgtgctgacatcatgatcgacttcgccaggtactggcatggggacgacctgccgtttgatgggcctgggggcatcctggcccatgccttcttccccaagactcaccgagaaggggatgtccacttcgactatgatgagacctggactatcggggatgaccagggcacagacctgctgcaggtggcagcccatgaatttggccacgtgctggggctgcagcacacaacagcagccaaggccctgatgtccgccttctacacctttcgctacccactgagtctcagcccagatgactgcaggggcgttcaacacctatatggccagccctggcccactgtcacctccaggaccccagccctgggcccccaggctgggatagacaccaatgagattgcaccgctggagccagacgccccgccagatgcctgtgaggcctcctttgacgcggtctccaccatccgaggcgagctctttttcttcaaagcgggctttgtgtggcgcctccgtgggggccagctgcagcccggctacccagcattggcctctcgccactggcagggactgcccagccctgtggacgctgccttcgaggatgcccagggccacatttggttcttccaagggactactggcgtttccaccccagcacccggcgtgtagacagtcccgtgccccgcagggccactgactggagaggggtgccctctgagatcgacgctgccttccaggatgctgatggctatgcctacttcctgcgcggccgcctctactggaagtttgaccctgtgaaggtgaaggctctggaaggcttcccccgtctcgtgggtcctgacttctttggctgtgccgagcctgccaacactttcctctgaccatggcttggatgccctcaggggtgctgacccctgccaggccacgaatatcaggctagagacccatggccatctttgtggctgtgggcaccaggcatgggactgagcccatgtctcctcagggggatggggtggggtacaaccaccatgacaactgccgggagggccacgcaggtcgtggtcacctgccagcgactgtctcagactgggcagggaggctttggcatgacttaagaggaagggcagtcttgggcccgctatgcaggtcctggcaaacctggctgccctgtctccatccctgtccctcagggtagcaccatggcaggactgggggaactggagtgtccttgctgtatccctgttgtgaggttccttccaggggctggcactgaagcaagggtgctggggccccatggccttcagccctggctgagcaactgggctgtagggcagggccacttcctgaggtcaggtcttggtaggtgcctgcatctgtctgccttctggctgacaatcctggaaatctgttctccagaatccaggccaaaaagttcacagtcaaatggggaggggtattcttcatgcaggagaccccaggccctggaggctgcaacatacctcaatcctgtcccaggccggatcctcctgaagcccttttcgcagcactgctatcctccaaagccattgtaaatgtgtgtacagtgtgtataaaccttcttcttcttttttttttttaaactgaggattgtcattaaacacagttgttttcta

SEQ ID NO: 316775 - DNA, 1821 bp, Homo sapiens
gtgaggcagctggtgggaggtgggcacagcagccgcttctcccacctggtggtggctgggctcccacatgcctgccacaggaagtctggctcttcatcacaggtcctttgtccagagccatctgccctcctctcggtggccggctagtgctacattccatattgcagatgaggaaactgagggtcagagaagtgcaaggtcttaccctggtttttcagccacagccagtagaacaataaactgctgtacactgagggccaacaatgctctaagctccttactggtctcatccagttctcagaacagccctctgatgtgacacctgttgtgaacccagtttccagaggagcaaacagaggctcaggcaatgaggcccctaacctggactaccctggtggtccctgctcctaaccactgacccacccagcctcccacaaccacagggggctagagccagtccagtgctccctcccctgctaggctcctcttctgtgctctttctcccacatcaggacccactgggagagctatcctagggtagcctccagctccaggactccagggtgcccgtcaatagcctggctaatttaatagatgcaggagagagtgatgtggagggtggtgggggcaacgggacttgctttcctgagaggtgggactcaggcctctgaggctctgggtacctgtcaggctgggtattagcccagcccagattccggggcaggcagaagggctccctagagggaagagaggttctgaaaggccggccctggatcctgcaggactcgaggaactcagcagtggccaagggcttcccactcagccctcccttagtgcccatccctgggcacagcctgacaggcaggagtagggcccagtgtccactcgcccaggcttgaccaccttctcttctcaggctatgcctacttcctgcgcggccgcctctactggaagtttgaccctgtgaaggtgaaggctctggaaggcttcccccgtctcgtgggtcctgacttctttggctgtgccgagcctgccaacactttcctctgaccatggcttggatgccctcaggggtgctgacccctgccaggccacgaatatcaggctagagacccatggccatctttgtggctgtgggcaccaggcatgggactgagcccatgtctcctcagggggatggggtggggtacaaccaccatgacaactgccgggagggccacgcaggtcgtggtcacctgccagcgactgtctcagactgggcagggaggctttggcatgacttaagaggaagggcagtcttgggcccgctatgcaggtcctggcaaacctggctgccctgtctccatccctgtccctcagggtagcaccatggcaggactgggggaactggagtgtccttgctgtatccctgttgtgaggttccttccaggggctggcactgaagcaagggtgctggggccccatggccttcagccctggctgagcaactgggctgtagggcagggccacttcctgaggtcaggtcttggtaggtgcctgcatctgtctgccttctggctgacaatcctggaaatctgttctccagaatccaggccaaaaagttcacagtcaaatggggaggggtattcttcatgcaggagaccccaggccctggaggctgcaacatacctcaatcctgtcccaggccggatcctcctgaagcccttttcgcagcactgctatcctccaaagccattgtaaatgtgtgtacagtgtgtataaaccttcttcttcttttttttttttaaactgaggattgtcattaaacacagttgttttcta

SEQ ID NO: 316776 - DNA, 1641 bp, Homo sapiens
  misc_feature (1509)..(1509): n is a, c, g, or t
  misc_feature (1560)..(1560): n is a, c, g, or t
  misc_feature (1634)..(1634): n is a, c, g, or t
  misc_feature (1639)..(1639): n is a, c, g, or t
aagcccagcagccccggggcggatggctccggccgcctggctccgcagcgcggccgcgcgcgccctcctgcccccgatgctgctgctgctgctccagccgccgccgctgctggcccgggctctgccgccggacgtccaccacctccatgccgagaggagggggccacagccctggcatgcagccctgcccagtagcccggcacctgcccctgccacgcaggaagccccccggcctgccagcagcctcaggcctccccgctgtggcgtgcccgacccatctgatgggctgagtgcccgcaaccgacagaagaggttcgtgctttctggcgggcgctgggagaagacggacctcacctacaggatccttcggttcccatggcagttggtgcaggagcaggtgcggcagacgatggcagaggccctaaaggtatggagcgatgtgacgccactcacctttactgaggtgcacgagggccgtgctgacatcatgatcgacttcgccaggtactggcatggggacgacctgccgtttgatgggcctgggggcatcctggcccatgccttcttccccaagactcaccgagaaggggatgtccacttcgactatgatgagacctggactatcggggatgaccagggcacagacctgctgcaggtggcagcccatgaatttggccacgtgctggggctgcagcacacaacagcagccaaggccctgatgtccgccttctacacctttcgctacccactgagtctcagcccagatgactgcaggggcgttcaacacctatatggccagccctggcccactgtcacctccaggaccccagccctgggcccccaggctgggatagacaccaatgagattgcaccgctggagccagacgccccgccagatgcctgtgaggcctcctttgacgcggtctccaccatccgaggcgagctctttttcttcaaagcgggctttgtgtggcgcctccgtgggggccagctgcagcccggctacccagcattggcctctcgccactggcagggactgcccagccctgtggacgctgccttcgaggatgcccagggccacatttggttcttccaagagctgggatttccatcctcaactggcagagatgagagcctggagcattgcagatgccagggacttcacaaatgaaggcacagcatgggaaacctgcgtgggttccagggcagtccagcctgcaggggcccagggagtggtgctcagtactgggtgtacgacggtgaaaagccagtcctgggccccgcacccctcaccgagctgggcctggtgaggttcccggtccatgctgccttggtctggggtcccgagaagaacaagatctacttcttccgaggcagggactactggcgtttccaccccagcacccggcgtgtagacagtcccgtgccccgcagggccactgactggagaggggtgccctctgagatcgacgctgccttccaggatgctgatgggctattgctaatttncttgcggcggccgcaagtttatttcctttagttgaggggttaatttttagnttggcatttggccttcttttttaacaaacgttcgtgacttggggaaaaacccggggctttaaacccactttaanttcgnct

SEQ ID NO: 316777 - DNA, 1115 bp, Homo sapiens
ctctggatgcaaagtgtcgcagcacatgcctgcggacgggtgttcagtcactcaggcagcctttacaagagacctgtgaggaccaggctctgggactccacggtgaatgaggcagacacagccccatcctctgtgtcagtctgaggtgggtgtcagccatgtcattgtccaactctaccatcacaacttgggcttcgagcaggtggagacagtggtaagcggggagaggcaatagtgggcatctcactgggtgacctgggaggaccctgggcaggtgatggggaagctgaggctcacacatcctgcgggtggggacccagcctgaagaatgggctggtgtcacacagcattggagctgagactggggtctttagaatttcctaggtgggggcctgggaaccaacaggggctcaaggaaccaaggtgtccccacagtgagtggcactgtcaggtctaggatgggggtctcgggacccctggtcctggttctttccactgaattcagacacttgtatttgcctaagtatgagcaaaccacatacacatgtgcccatgtggccagggagaccagtgcgctgaagctgaggcccagagtacacctggcctgtgtcctgagtgttcacacacccaccaagcatccaggggcaactcctggtgcctcagccatcgggggctgtcccttccctgaggcccaggcccctccatctccctccaggatccttcggttcccatggcagttggtgcaggagcaggtgcggcagacgatggcagaggccctaaaggtatggagcgatgtgacgccactcacctttactgaggtgcacgagggccgtgctgacatcatgatcgacttcgccaggtactggcatggggacgacctgccgtttgatgggcctgggggcatcctggcccatgccttcttccccaagactcaccgagaaggggatgtccacttcgactatgatgagacctggactatcggggatgaccaggaagggggatggacacacgaagggggatggacacacgaagggggatggacacacgaagggggatggacacgaagggggatggacaccacgaagggggatggacacacgaagggggatggacac

SEQ ID NO: 316778 - DNA, 746 bp, Homo sapiens
gcagagaattgcttgaacccgggaggtggaggttgtagtgagccgagatcgcgccactgcactccagcctgggcaacagagtgagactccatctcaaaaaaacaaaacaaaaaaccaataagcccagaatcggccagaacccacaacccagtgagactgcgctgtgccaggacgtccaccacctccatgccgagaggagggggccacagccctggcatgcagccctgcccagtagcccggcacctgcccctgccacgcaggaagccccccggcctgccagcagcctcaggcctccccgctgtggcgtgcccgacccatctgatgggctgagtgcccgcaaccgacagaagaggttcgtgctttctggcgggcgctgggagaagacggacctcacctacaggatccttcggttcccatggcagttggtgcaggagcaggtgcggcagacgatggcagaggccctaaaggtatggagcgatgtgacgccactcacctttactgaggtgcacgagggccgtgctgacatcatgatcgacttcgccaggtactggcatggggacgacctgccgtttgatgggcctgggggcatcctggcccatgccttcttccccaagactcaccgagaaggggatgtccacttcgactatgatgagacctggactatcggggatgaccaggcacagacctctgcagtgcagccataattgcactctgggctcacacacacacaccagccctttctttcg

SEQ ID NO: 316779 - DNA, 2402 bp, Homo sapiens
cgagtgcaacccccgacactaacggcctttacgcgacatccgagcagcgtgtctatcccaaaggcctaggagcatttgcccggctcggtcaaatctagcgcaagtttgaagcctgcggcctcgcaattttagcagcttcgttccaggccaggcttcctgaccacagcctcacctttgagcagctcagagccctgcctgccaggatgcgagccactgcctggatcgtggctctgcagggccacccatgatggaacaggtcgcctggtgaggtggacgtccaccacctccatgccgagaggagggggccacagccctggcatgcagccctgcccagtagcccggcacctgcccctgccacgcaggaagccccccggcctgccagcagcctcaggcctccccgctgtggcgtgcccgacccatctgatgggctgagtgcccgcaaccgacagaagaggttcgtgctttctggcgggcgctgggagaagacggacctcacctacaggatccttcggttcccatggcagttggtgcaggagcaggtgcggcagacgatggcagaggccctaaaggtatggagcgatgtgacgccactcacctttactgaggtgcacgagggccgtgctgacatcatgatcgacttcgccaggtactggcatggggacgacctgccgtttgatgggcctgggggcatcctggcccatgccttcttccccaagactcaccgagaaggggatgtccacttcgactatgatgagacctggactatcggggatgaccagggcacagacctgctgcaggtggcagcccatgaatttggccacgtgctggggctgcagcacacaacagcagccaaggccctgatgtccgccttctacacctttcgctacccactgagtctcagcccagatgactgcaggggcgttcaacacctatatggccagccctggcccactgtcacctccaggaccccagccctgggcccccaggctgggatagacaccaatgagattgcaccgctggagccagacgccccgccagatgcctgtgaggcctcctttgacgcggtctccaccatccgaggcgagctctttttcttcaaagcgggctttgtgtggcgcctccgtgggggccagctgcagcccggctacccagcattggcctctcgccactggcagggactgcccagccctgtggacgctgccttcgaggatgcccagggccacatttggttcttccaaggtgctcagtactgggtgtacgacggtgaaaagccagtcctgggccccgcacccctcaccgagctgggcctggtgaggttcccggtccatgctgccttggtctggggtcccgagaagaacaagatctacttcttccgaggcagggactactggcgtttccaccccagcacccggcgtgtagacagtcccgtgccccgcagggccactgactggagaggggtgccctctgagatcgacgctgccttccaggatgctgatggctatgcctacttcctgcgcggccgcctctactggaagtttgaccctgtgaaggtgaaggctctggaaggcttcccccgtctcgtgggtcctgacttctttggctgtgccgagcctgccaacactttcctctgaccatggcttggatgccctcaggggtgctgacccctgccaggccacgaatatcaggctagagacccatggccatctttgtggctgtgggcaccaggcatgggactgagcccatgtctcctcagggggatggggtggggtacaaccaccatgacaactgccgggagggccacgcaggtcgtggtcacctgccagcgactgtctcagactgggcagggaggctttggcatgacttaagaggaagggcagtcttgggcccgctatgcaggtcctggcaaacctggctgccctgtctccatccctgtccctcagggtagcaccatggcaggactgggggaactggagtgtccttgctgtatccctgttgtgaggttccttccaggggctggcactgaagcaagggtgctggggccccatggccttcagccctggctgagcaactgggctgtagggcagggccacttcctgaggtcaggtcttggtaggtgcctgcatctgtctgccttctggctgacaatcctggaaatctgttctccagaatccaggccaaaaagttcacagtcaaatggggaggggtattcttcatgcaggagaccccaggccctggaggctgcaacatacctcaatcctgtcccaggccggatcctcctgaagcccttttcgcagcactgctatcctccaaagccattgtaaatgtgtgtacagtgtgtataaaccttcttcttcttttttttttttaaactgaggattgtcattaaacacagttgttttcta

SEQ ID NO: 316780 - DNA, 2707 bp, Homo sapiens
ctctggatgcaaagtgtcgcagcacatgcctgcggacgggtgttcagtcactcaggcagcctttacaagagacctgtgaggaccaggctctgggactccacggtgaatgaggcagacacagccccatcctctgtgtcagtctgaggtgggtgtcagccatgtcattgtccaactctaccatcacaacttgggcttcgagcaggtggagacagtggtaagcggggagaggcaatagtgggcatctcactgggtgacctgggaggaccctgggcaggtgatggggaagctgaggctcacacatcctgcgggtggggacccagcctgaagaatgggctggtgtcacacagcattggagctgagactggggtctttagaatttcctaggtgggggcctgggaaccaacaggggctcaaggaaccaaggtgtccccacagtgagtggcactgtcaggtctaggatgggggtctcgggacccctggtcctggttctttccactgaattcagacacttgtatttgcctaagtatgagcaaaccacatacacatgtgcccatgtggccagggagaccagtgcgctgaagctgaggcccagagtacacctggcctgtgtcctgagtgttcacacacccaccaagcatccaggggcaactcctggtgcctcagccatcgggggctgtcccttccctgaggcccaggcccctccatctccctccaggatccttcggttcccatggcagttggtgcaggagcaggtgcggcagacgatggcagaggccctaaaggtatggagcgatgtgacgccactcacctttactgaggtgcacgagggccgtgctgacatcatgatcgacttcgccaggtactggcatggggacgacctgccgtttgatgggcctgggggcatcctggcccatgccttcttccccaagactcaccgagaaggggatgtccacttcgactatgatgagacctggactatcggggatgaccagggcacagacctgctgcaggtggcagcccatgaatttggccacgtgctggggctgcagcacacaacagcagccaaggccctgatgtccgccttctacacctttcgctacccactgagtctcagcccagatgactgcaggggcgttcaacacctatatggccagccctggcccactgtcacctccaggaccccagccctgggcccccaggctgggatagacaccaatgagattgcaccgctggaggtgaggccctgcctgccagtccccctactcctctgctggccactgtgactgcagcatatgccctcagcatgtgtccctctctcccaccccagccagacgccccgccagatgcctgtgaggcctcctttgacgcggtctccaccatccgaggcgagctctttttcttcaaagcgggctttgtgtggcgcctccgtgggggccagctgcagcccggctacccagcattggcctctcgccactggcagggactgcccagccctgtggacgctgccttcgaggatgcccagggccacatttggttcttccaaggtgctcagtactgggtgtacgacggtgaaaagccagtcctgggccccgcacccctcaccgagctgggcctggtgaggttcccggtccatgctgccttggtctggggtcccgagaagaacaagatctacttcttccgaggcagggactactggcgtttccaccccagcacccggcgtgtagacagtcccgtgccccgcagggccactgactggagaggggtgccctctgagatcgacgctgccttccaggatgctgatggctatgcctacttcctgcgcggccgcctctactggaagtttgaccctgtgaaggtgaaggctctggaaggcttcccccgtctcgtgggtcctgacttctttggctgtgccgagcctgccaacactttcctctgaccatggcttggatgccctcaggggtgctgacccctgccaggccacgaatatcaggctagagacccatggccatctttgtggctgtgggcaccaggcatgggactgagcccatgtctcctcagggggatggggtggggtacaaccaccatgacaactgccgggagggccacgcaggtcgtggtcacctgccagcgactgtctcagactgggcagggaggctttggcatgacttaagaggaagggcagtcttgggcccgctatgcaggtcctggcaaacctggctgccctgtctccatccctgtccctcagggtagcaccatggcaggactgggggaactggagtgtccttgctgtatccctgttgtgaggttccttccaggggctggcactgaagcaagggtgctggggccccatggccttcagccctggctgagcaactgggctgtagggcagggccacttcctgaggtcaggtcttggtaggtgcctgcatctgtctgccttctggctgacaatcctggaaatctgttctccagaatccaggccaaaaagttcacagtcaaatggggaggggtattcttcatgcaggagaccccaggccctggaggctgcaacatacctcaatcctgtcccaggccggatcctcctgaagcccttttcgcagcactgctatcctccaaagccattgtaaatgtgtgtacagtgtgtataaaccttcttcttcttttttttttttaaactgaggattgtcattaaacacagttgttttcta

SEQ ID NO: 316781 - DNA, 1950 bp, Homo sapiens
gacttcccagagccaggaatgttatggccaagggcaggaacagacagatggatccttagggacacagtggatagggagagctgccccaaagcctgggggccgagggagagagagtgtggtttgttcctcaggcacaggtaggaggttctcggaggtggctcttgagataggagcagcgtggaagggattgcacggtggggcctcgtgttggtgcgttcaaccctcagccaccccatggggcggggttctagagatgaggcctctggggccccgaggcagtgaagtgactcactgtgagtgcagctgggaagaggcagggcagggaattgatccaggtctatcatcctagagctgggatttccatcctcaactggcagagatgagagcctggagcattgcagatgccagggacttcacaaatgaaggcacagcatgggaaacctgcgtgggttccagggcagtccagcctgcaggggcccagggagtggtcagtaggcatttgtcacagccaaatgccagtggaaggagcagccgcccaggcagccctctactgatgagagtaacctcacccgtgcactagtttacagagcattcactgccccagcttatcccaggcctcccgcttccctctgcgggtggggtgctgagcaggcattattggcctgcatgttttactgatgaggaaactgaggctgggagagtctgtggtaggggtcaagcaggtccacagtggcggggcatggcagtggtggctgggcaggtccttgcagccttccctctccggcaggtgctcagtactgggtgtacgacggtgaaaagccagtcctgggccccgcacccctcaccgagctgggcctggtgaggttcccggtccatgctgccttggtctggggtcccgagaagaacaagatctacttcttccgaggcagggactactggcgtttccaccccagcacccggcgtgtagacagtcccgtgccccgcagggccactgactggagaggggtgccctctgagatcgacgctgccttccaggatgctgatggctatgcctacttcctgcgcggccgcctctactggaagtttgaccctgtgaaggtgaaggctctggaaggcttcccccgtctcgtgggtcctgacttctttggctgtgccgagcctgccaacactttcctctgaccatggcttggatgccctcaggggtgctgacccctgccaggccacgaatatcaggctagagacccatggccatctttgtggctgtgggcaccaggcatgggactgagcccatgtctcctcagggggatggggtggggtacaaccaccatgacaactgccgggagggccacgcaggtcgtggtcacctgccagcgactgtctcagactgggcagggaggctttggcatgacttaagaggaagggcagtcttgggcccgctatgcaggtcctggcaaacctggctgccctgtctccatccctgtccctcagggtagcaccatggcaggactgggggaactggagtgtccttgctgtatccctgttgtgaggttccttccaggggctggcactgaagcaagggtgctggggccccatggccttcagccctggctgagcaactgggctgtagggcagggccacttcctgaggtcaggtcttggtaggtgcctgcatctgtctgccttctggctgacaatcctggaaatctgttctccagaatccaggccaaaaagttcacagtcaaatggggaggggtattcttcatgcaggagaccccaggccctggaggctgcaacatacctcaatcctgtcccaggccggatcctcctgaagcccttttcgcagcactgctatcctccaaagccattgtaaatgtgtgtacagtgtgtataaaccttcttcttcttttttttttttaaactgaggattgtcattaaacacagttgttttcta

SEQ ID NO: 316782 - DNA, 1215 bp, Homo sapiens
atagggaaatttgccctcgaaggcccaaagaattcggcacgaggcttccaaggtgctcagtactgggtgtacgacggtgaaaagccagtcctgggccccgcacccctcaccgagctgggcctggtgaggttcccggtccatgctgccttggtctggggtcccgagaagaacaagatctacttcttccgaggcagggactactggcgtttccaccccagcacccggcgtgtagacagtcccgtgccccgcagggccactgactggagaggggtgccctctgagatcgacgctgccttccaggatgctgatggctatgcctacttcctgcgcggccgcctctactggaagtttgaccctgtgaaggtgaaggctctggaaggcttcccccgtctcgtgggtcctgacttctttggctgtgccgagcctgccaacactttcctctgaccatggcttggatgccctcaggggtgctgacccctgccaggccacgaatatcaggctagagacccatggccatctttgtggctgtgggcaccaggcatgggactgagcccatgtctcctcagggggatggggtggggtacaaccaccatgacaactgccgggagggccacgcaggtcgtggtcacctgccagcgactgtctcagactgggcagggaggctttggcatgacttaagaggaagggcagtcttgggcccgctatgcaggtcctggcaaacctggctgccctgtctccatccctgtccctcagggtagcaccatggcaggactgggggaactggagtgtccttgctgtatccctgttgtgaggttccttccaggggctggcactgaagcaagggtgctggggccccatggccttcagccctggctgagcaactgggctgtagggcagggccacttcctgaggtcaggtcttggtaggtgcctgcatctgtctgccttctggctgacaatcctggaaatctgttctccagaatccaggccaaaaagttcacagtcaaatggggaggggtattcttcatgcaggagaccccaggccctggaggctgcaacatacctcaatcctgtcccaggccggatcctcctgaagcccttttcgcagcactgctatcctccaaagccattgtaaatgtgtgtacagtgtgtataaaccttcttcttcttttttttttttaaactgaggattgtcattaaacacagttgttttcta

SEQ ID NO: 316783 - DNA, 706 bp, Homo sapiens
aagcccagcagccccggggcggatggctccggccgcctggctccgcagcgcggccgcgcgcgccctcctgcccccgatgctgctgctgctgctccagccgccgccgctgctggcccgggctctgccgccggacgtccaccacctccatgccgagaggagggggccacagccctggcatgcagccctgcccagtagcccggcacctgcccctgccacgcaggaagccccccggcctgccagcagcctcaggcctccccgctgtggcgtgcccgacccatctgatgggctgagtgcccgcaaccgacagaagaggttcgtgctttctggcgggcgctgggagaagacggacctcacctacaggatccttcggttcccatggcagttggtgcaggagcaggtgcggcagacgatggcagaggccctaaaggtatggagcgatgtgacgccactcacctttactgaggtgcacgagggccgtgctgacatcatgatcgacttcgccaggtactggcatggggacgacctgccgtttgatgggcctgggggcatcctggcccatgccttcttccccaagactcaccgagaaggggatgtccacttcgactatgatgagacctggactatcggggatgaccaggcacagacctctgcagtgcagccataattgcactctgggctcacacacacacaccagccctttctttcg

SEQ ID NO: 316784 - DNA, 1911 bp, Homo sapiens
agcgcgcgccgcggtcagctgactgctgggctggcacgtgacttgttctgtgttcgcttgggtagaggaagccgtgaggccggagcttaggtcgggaagggatggatcgctgagccgatagcgtccgctaggctgtctgcctcggtacctgttactgctgctacttcctcgtttgacaccttcctggaatctctcttgatttttgaggaaatacctagtaacaaacatgactgagttctggcttatatctgctcctggggagaaaacctgtcagcaaacatgggagaaattgcatgcggcaacttcaaagaacaataatcttgctgtcacttccaagttcaatattcctgacttaaaggttggcacgttggatgtcttggttggcttgtcagatgaactggctaaactggatgcatttgtagaaggagtggttaagaaagtagctcaatacatggctgatgtattggaagatagcaaagacaaagttcaagagaatctgttggctaatggagtggacttggttacttatataacaaggttccagtgggacatggccaaatatccaatcaagcagtccctgaaaaatatttctgaaataattgccaagggagtaactcagattgataatgacctgaaatctcgagcatctgcatacaataacctgaaaggaaatcttcagaatttggaacgaaagaatgcaggaagtttgctaactagaagtctagcagaaattgtgaagaaggatgactttgttcttgattcagagtatctcgtcacattactggtagtagttcccaagttaaaccacaacgactggattaagcagtatgaaacactagccgaaatggtagttccaaggtctagcaatgttctttcagaggaccaagacagttacctgtgtaatgtcaccttgtttaggaaggcagttgatgacttcagacacaaagccagagaaaacaaattcattgttcgtgacttccagtataatgaagaggagatgaaagcagataaagaagaaatgaacaggctttctactgataagaaaaaacaatttggaccacttgtacggtggctgaaagtgaattttagtgaagcatttattgcatggattcacgtgaaagcattacgggttttcgttgagtctgttttaaggtatggcttgccagtgaacttccaagcaatgctacttcagcccaataagaaaactttgaagaaactgagagaagtattacatgaattgtataaacatctagacagcagtgcagcagctattattgatgctcctatggatattccaggtttaaacctgagtcaacaagaatactacccctatgtgtactacaagattgattgcaacttgctggaattcaagtgaaaatgggctcctcccccgacaatcctgtccttgtgtttgtgtgtgctaacagaaataagttgcagtatggtcgtacttttaactctagtatcctttgcttgcttcttaccccctttcctaggtgaattctcccacagtggtctgtatctcaacattttctttttaaaggaaaaaatatatatatatagtttctttttattgatcaggtctgtaaatgtgtactaaaaaaatcagagtttatttataaacaaaatagtttatttaaagagaaggtctcttccttattgatatcatggtatgcattaattccatttgttactattgtgcacaaaagccctgttcacaggggaatggtgtaaacatttatactgttttgttcactgtatttagtagacataactgttgaatagttactgaatcatgatgtaaagaatatgtgaccatcttcaggtatgggatttctgaacgtttcaaatttcaatcaatgagcactgtcaacacccacaggagagaataaaattacctgtgcaaaggtg

SEQ ID NO: 316785 - DNA, 824 bp, Homo sapiens
agcgcgcgccgcggtcagctgactgctgggctggcacgtgacttgttctgtgttcgcttgggtagaggaagccgtgaggccggagcttaggtcgggaagggatggatcgctgagccgatagcgtccgctaggctgtctgcctcggtacctgttactgctgctacttcctcgtttgacaccttcctggaatctctcttgatttttgaggaaatacctagtaacaaacatgactgagttctggcttatatctgctcctggggagaaaacctgtcagcaaacatgggagaaattgcatgcggcaacttcaaagaacaataatcttgctgtcacttccaagttcaatattcctgacttaaaggttggcacgttggatgtcttggttggcttgtcagatgaactggctaaactggatgcatttgtagaaggagtggttaagaaagtagctcaatacatggctgatgtattggaagatagcaaagacaaagttcaagagaatctgttggctaatggagtggacttggttacttatataacaaggttccagtgggacatggccaaatatccaatcaagcagtccctgaaaaatatttctgaaataattgccaagggagtaactcagattgataatgacctgaaatctcgagcatctgcatacaataacctgaaaggaaatcttcagaatttggaacgaaagaatgcaggaagtttgctaactagaagtctagcagaaattgtgaagaaggatgactttgttcttgattcagagtatctcgtcacattactggtagtagttcccaagtaagtctttctattataaaaggttt

SEQ ID NO: 316786 - DNA, 1181 bp, Homo sapiens
tatgcgaatgaagactcggcctcccaatcagtctgatttgttgcagacagccaatttcccatctgccatgcaggaaaggtcaaaaggagtagcctctggtccttttgttacttaggcgtggaaagttagggttttcctttcaatttagttctaggaaaccggggtgaaacaaccttaggttccctgcctccagaccctatttcctgcctcagttctgctaccaacttgctgtgtgacctgggtgttctttcagaggaccaagacagttacctgtgtaatgtcaccttgtttaggaaggcagttgatgacttcagacacaaagccagagaaaacaaattcattgttcgtgacttccagtataatgaagaggagatgaaagcagataaagaagaaatgaacaggctttctactgataagaaaaaacaatttggaccacttgtacggtggctgaaagtgaattttagtgaagcatttattgcatggattcacgtgaaagcattacgggttttcgttgagtctgttttaaggtatggcttgccagtgaacttccaagcaatgctacttcagcccaataagaaaactttgaagaaactgagagaagtattacatgaattgtataaacatctagacagcagtgcagcagctattattgatgtaagtacttattagcccagtagagtaagaattgaagtgaatttcagaaaaaaaatgattgaaagaagatagacagaaaagggagggtaagtatgaaacttaatcattttttattactttgaggttctcaatttgttatgtaaacatagtaatttacattgtttaccctgttttatactaattatatctgtgttttgcttcttggcatttctacaagctagtaattatcttgctgtgtatcagatgtttatagctgcagaaatacagaaaccagtgatactagttatttacaaaaactataaattgcagagaggaagaaaataagcagttattttaattttatttggtagaagcgatagagtcaatagatgagtattttcaaggtaggttcatttttctaaaatggcgtagctgggcgtggtgggacatgttggtagtcccagcaactgaggaggctgaggcgggaggatcacttgagcccaggccttcgagaccaacctgggtaacatagtaagatcccatctgaa

SEQ ID NO: 316787 - DNA, 459 bp, Homo sapiens
tttcctatgtaccaggcactgtgctaaccacaggcttcatttaatcctcacaatacctgtgtaaggtattattaccaccactttgcatgtgaacaggctgaaattcagaggagtaaggtcacacaactagtaagtaggagagcctggattcaacacctggtatctattcccttgcgctgaacaactccgtgccctcactttcttcatctgtagatacctgttactgctgctacttcctcgtttgacaccttcctgggtcagtgagcgatggctctccccggatggggagtcctggtcaggccgaagcatgagctccggtcgctgcctgggagggacgcgggtgggtgcgggggcagagaccgtggcgttggagctggagctggctgggtggctgtgtctggtttctcggcgccaattcaccgtcttgggcctaggttccgtctctaaggaagagaagga

SEQ ID NO: 316788 - DNA, 6075 bp, Homo sapiens
agcgcgcgccgcggtcagctgactgctgggctggcacgtgacttgttctgtgttcgcttgggtagaggaagccgtgaggccggagcttaggtcgggaagggatggatcgctgagccgatagcgtccgctaggctgtctgcctcggtacctgttactgctgctacttcctcgtttgacaccttcctggaatctctcttgatttttgaggaaatacctagtaacaaacatgactgagttctggcttatatctgctcctggggagaaaacctgtcagcaaacatgggagaaattgcatgcggcaacttcaaagaacaataatcttgctgtcacttccaagttcaatattcctgacttaaaggttggcacgttggatgtcttggttggcttgtcagatgaactggctaaactggatgcatttgtagaaggagtggttaagaaagtagctcaatacatggctgatgtattggaagatagcaaagacaaagttcaagagaatctgttggctaatggagtggacttggttacttatataacaaggttccagtgggacatggccaaatatccaatcaagcagtccctgaaaaatatttctgaaataattgccaagggagtaactcagattgataatgacctgaaatctcgagcatctgcatacaataacctgaaaggaaatcttcagaatttggaacgaaagaatgcaggaagtttgctaactagaagtctagcagaaattgtgaagaaggatgactttgttcttgattcagagtatctcgtcacattactggtagtagttcccaagttaaaccacaacgactggattaagcagtatgaaacactagccgaaatggtagttccaaggtctagcaatgttctttcagaggaccaagacagttacctgtgtaatgtcaccttgtttaggaaggcagttgatgacttcagacacaaagccagagaaaacaaattcattgttcgtgacttccagtataatgaagaggagatgaaagcagataaagaagaaatgaacaggctttctactgataagaaaaaacaatttggaccacttgtacggtggctgaaagtgaattttagtgaagcatttattgcatggattcacgtgaaagcattacgggttttcgttgagtctgttttaaggtatggcttgccagtgaacttccaagcaatgctacttcagcccaataagaaaactttgaagaaactgagagaagtattacatgaattgtataaacatctagacagcagtgcagcagctattattgatgctcctatggatattccaggtttaaacctgagtcaacaagaatactacccctatgtgtactacaagattgattgcaacttgctggaattcaagtgaaaatgggctcctcccccgacaatcctgtccttgtgtttgtgtgtgctaacagaaataagttgcagtatggtcgtacttttaactctagtatcctttgcttgcttcttaccccctttcctaggtgaattctcccacagtggtctgtatctcaacattttctttttaaaggaaaaaatatatatatatagtttctttttattgatcaggtctgtaaatgtgtactaaaaaaatcagagtttatttataaacaaaatagtttatttaaagagaaggtctcttccttattgatatcatggtatgcattaattccatttgttactattgtgcacaaaagccctgttcacaggggaatggtgtaaacatttatactgttttgttcactgtatttagtagacataactgttgaatagttactgaatcatgatgtaaagaatatgtgaccatcttcaggtatgggatttctgaacgtttcaaatttcaatcaatgagcactgtcaacacccacaggagagaataaaattacctgtgcaaaggtgtattgtggtgtgtgtaacttaagattacagttctgtttgagagttaaatgatgtcatagctcacttgctatgctgcttccaggattttgttatatgctgaggtgtaaccatttgtgttgtctgactttcgtatgatttaattgagccaaatttgggtcagaacacaaatttgaagatgacttttcagtatatgatgggtatttacatttgaacactagaattttaggtctctcaaataattaagaatagagccagttttgaataaagtctagcagaactatgcagctttagtcatttgttttgtctaagtctgtattttatgtgttgtcttcttaagatctataattttggcatttatgtcatttgtgacatagtctgaaaatagagacattgttggcctttaaaatctcagaaatgaatgacttaatttagtgtcctgaaagagcttttaaaagaggattttgtggcaatgtttctcttactacgtactcacaggtttgcaaatgggaaaaaagtttacatttcagtttaggggcatatctaagctatgctattccctttagaaaattagcctccaaaatcttttgtttcaaaatattatattatttcataaataatttcaagcaaatacagacatccacaatgtagaacatgagagaccccctccctcaatttccacctcccaagggaagtttatgtatttttctaggcccttttctatgtctttacatctctgtctcacacacacacacgtatacacacacacagtttatttttaataaaataggattataccacacacatcctgtcacttgcttttttgcttaagagtatatctaagagaatcctttgtgtcagtgaagctggagctacctcattcttttaactggctgcgtggcgttccattgagtgtctgtcatcatgtgtttagccgagtggatggatagtctgcttgtttttagtttttgctcttaacaaacactgctgcagtcagcatccttgcacagatttctttgtatacttgtattagtatttctgtaagatctgagaagtggaatttgtagggtcataggttatgtacacttaagtttttgacactcactgccaagtcatctgtcagaattctaaactaaagacatgtttggagtgtggatttatcttcagtttttctttggacaagaggaagctgtgaaagattttgctatcagaaaattttggttctttgtcttttgcacatgttctttgagtcttagtatctgtaacgtggcgctactctctctatcatgggggggcatgttttgacattaaattgacttttaagaaaaacatgtcactaacctgaagctcagccacacagtgacttttaaggttttatttagactttactgttgttctcatgagagtaggtacagactgcataaggtttagaatcccagcatatgtctgaaacgacgggactttcactgtgatttccaccagagaaattatagcagagtggctgagcatgtgctctgaggccaggccccagctctgctgctgacgagctgtgtggtcctgggcagagtggtctccgagttccagtccctcctctgtaaaatgggcatgattagagtgcccaccgcattagggatgttggggtgagtcagtgtgaccccacgtgcacagaaagtgctgcgagtggtgcatggtgagaggttgatgcaggtacttagcccttggggaacacaggtagttccttttcactgtgtttaacttcgggaaaatccagatccacatcattgtagagtctgagggttagaaggaagtcattgtgtctaacataacaacagagcagtttgtgtcactgagctccagtctgtgctggattattgatattgttggtggcggtcaccattcctggaaagggactgtcccaagccacttaccttcccgaggagtctgctggttctccttgaggatagtgcttagataacagactcattaaacatttactgagtgtctgtcagggatcattcacatccacatcatcctcccggcccctccccgtgttgttcatggagggagtactggcggtccccattttcatgtatggagacttcaggtgaaagaagttaagtgaattctttgttgagtcacaaatcttgagccagtcagaatttgaacctaagatttttgactgctggttgtcacacttcccgccccacactcaactgttgtgtgaatgagccagacacattgcttaacctgagtccgagatggacaatggtataggaaagatattcggtatggagaatcagatgttaacttgtgttgctatttttgttttgttttgttttgttttgtttttgagacaaggtcttgctctgtcacccaggctagagtgcagtggcatgatcagggcttactgcagcctcaccctcgatttcctgggctcaagcaatcctcccacctcagcccccaagtagctgggcctacaggtgcgtgctaccacgcctggccaattttttaaattttagcacagatgaggtctcactatgttgcccgggctggtctcgaactcctgagctcaagggatcctcccgcctcagcctcccaaagtgctggtgttacaggcataagccaccacgcctggcctgtgttgctattatatttggcaggaacccagagtccagaacatttcatctatgatgggttagataatgtgtctagttgtttgcatgccaatttcagtagcctcagttattcaacctaggagatttttctacctctttactaccctgctgaagttgctcttcagcagaaaatctttgtggaacacattccacactttgaaatcttcgtggaacaaaagatatttgtggaaccaatctttgtggaacatattccagctttttgaatgagtgcatatccagtagtacctttaaagtaacactttgtacataacaaatactcagcaaatgtgaaactttatttgctcttacttcaaaattagtccaaaatgttggaaataaaatataagacattgatctagatatgaggtttttctccttcattctcagctgtcgaagaaatcaaagtagcatatgcacaaggttaaaaaccacatatacaaatactatagaacagcttataatgaaaaccttgcctgcctttataaaaaatgtgattatcttcttctgttaatgtcaataaaagatggtttgtcctagaaggtctataaatggtattatgttctggaggaaacctagcaaaaactttgctagtttagtacttgtctctaaattgatgttcacccatttcaatattgcacttattaatggtctttatttttctagcatagataacaattgattctttagattcatatatggaggtaattcttgctttctaaagaaaggaatatggcacattggaaccattttattcaccagtggatttacccttagagtatttttagatctgagctgatgacttgtgagagaaaaagggaacagagtaaagccatggaagccatgaacagtaagagactgccgcctggcatggtttcttcttctgcagaagatgaaactgaggagaaacaagacaacatccttcataccaggaatggtcaagataatgcaagaagaaaaaagctttcaaacaaatcagaaggcagtcaacaaacagaaagggggacattccttccctggcagttactcaaaactgaaattgcttattgtgtacaccggggcttgtacttggggaatttaataaaaatgctcattaccaagctaaaaaaaaaaaaaaaaaaaaaaaaaaaaaaaaaaaaaagagaaaagaaagaaggaggggagagaacaccaaaaagggcccaaagggggcgccaagcacaagtccaaggaggggggcaccaagggggccccgtagagaaaatggccaggcagacatgtgaccaaacttaaaaaccgagacaagacggggaaacaggggccaccacgcggagcaacaatgcaaaagggccactgcatcgagagacgggggggacacaaatgggcaccaaagaaaccctcagagaactagaggccaataaaaaattaaaaaagctccaagggagcaacaggtcaaaacaaccggcccaagaacagctcgaaagactggctagcgagagaaacttaaaagttagcg

SEQ ID NO: 316789 - DNA, 2370 bp, Homo sapiens
agcgcgcgccgcggtcagctgactgctgggctggcacgtgacttgttctgtgttcgcttgggtagaggaagccgtgaggccggagcttaggtcgggaagggatggatcgctgagccgatagcgtccgctaggctgtctgcctcggtacctgttactgctgctacttcctcgtttgacaccttcctggaatctctcttgatttttgaggaaatacctagtaacaaacatgactgagttctggcttatatctgctcctggggagaaaacctgtcagcaaacatgggagaaattgcatgcggcaacttcaaagaacaataatcttgctgtcacttccaagttcaatattcctgacttaaaggttggcacgttggatgtcttggttggcttgtcagatgaactggctaaactggatgcatttgtagaaggagtggttaagaaagtagctcaatacatggctgatgtattggaagatagcaaagacaaagttcaagagaatctgttggctaatggagtggacttggttacttatataacaaggttccagtgggacatggccaaatatccaatcaagcagtccctgaaaaatatttctgaaataattgccaagggagtaactcagattgataatgacctgaaatctcgagcatctgcatacaataacctgaaaggaaatcttcagaatttggaacgaaagaatgcaggaagtttgctaactagaagtctagcagaaattgtgaagaaggatgactttgttcttgattcagagtatctcgtcacattactggtagtagttcccaagttaaaccacaacgactggattaagcagtatgaaacactagccgaaatggtagttccaaggtctagcaatgttctttcagaggaccaagacagttacctgtgtaatgtcaccttgtttaggaaggcagttgatgacttcagacacaaagccagagaaaacaaattcattgttcgtgacttccagtataatgaagaggagatgaaagcagataaagaagaaatgaacaggctttctactgataagaaaaaacaatttggaccacttgtacggtggctgaaagtgaattttagtgaagcatttattgcatggattcacgtgaaagcattacgggttttcgttgagtctgttttaaggtatggcttgccagtgaacttccaagcaatgctacttcagcccaataagaaaactttgaagaaactgagagaagtattacatgaattgtataaacatctagacagcagtgcagcagctattattgatgctcctatggatattccaggtttaaacctgagtcaacaagaatactacccctatgtgtactacaagattgattgcaacttgctggaattcaagtgaaaatgggctcctcccccgacaatcctgtccttgtgtttgtgtgtgctaacagaaataagttgcagtatggtcgtacttttaactctagtatcctttgcttgcttcttaccccctttcctaggtgaattctcccacagtggtctgtatctcaacattttctttttaaaggaaaaaatatatatatatagtttctttttattgatcaggtctgtaaatgtgtactaaaaaaatcagagtttatttataaacaaaatagtttatttaaagagaaggtctcttccttattgatatcatggtatgcattaattccatttgttactattgtgcacaaaagccctgttcacaggggaatggtgtaaacatttatactgttttgttcactgtatttagtagacataactgttgaatagttactgaatcatgatgtaaagaatatgtgaccatcttcaggtatgggatttctgaacgtttcaaatttcaatcaatgagcactgtcaacacccacaggagagaataaaattacctgtgcaaaggtgtattgtggtgtgtgtaacttaagattacagttctgtttgagagttaaatgatgtcatagctcacttgctatgctgcttccaggattttgttatatgctgaggtgtaaccatttgtgttgtctgactttcgtatgatttaattgagccaaatttgggtcagaacacaaatttgaagatgacttttcagtatatgatgggtatttacatttgaacactagaattttaggtctctcaaataattaagaatagagccagttttgaataaagtctagcagaactatgcagctttaaaaaaaaaaaaaaacaccaaagataacagacgagcacaccccaagaaaacacaaacaaaaaaagagggggggggggggaaattatcaggggggaggcgaacgccctttttgaaaggcccacgggggtaaaagggggggcaaaacggggggacacggtgtgagcccctgg

SEQ ID NO: 316790 - DNA, 6021 bp, Homo sapiens
agcgcgcgccgcggtcagctgactgctgggctggcacgtgacttgttctgtgttcgcttgggtagaggaagccgtgaggccggagcttaggtcgggaagggatggatcgctgagccgatagcgtccgctaggctgtctgcctcggtacctgttactgctgctacttcctcgtttgacaccttcctggaatctctcttgatttttgaggaaatacctagtaacaaacatgactgagttctggcttatatctgctcctggggagaatcttgctgtcacttccaagttcaatattcctgacttaaaggttggcacgttggatgtcttggttggcttgtcagatgaactggctaaactggatgcatttgtagaaggagtggttaagaaagtagctcaatacatggctgatgtattggaagatagcaaagacaaagttcaagagaatctgttggctaatggagtggacttggttacttatataacaaggttccagtgggacatggccaaatatccaatcaagcagtccctgaaaaatatttctgaaataattgccaagggagtaactcagattgataatgacctgaaatctcgagcatctgcatacaataacctgaaaggaaatcttcagaatttggaacgaaagaatgcaggaagtttgctaactagaagtctagcagaaattgtgaagaaggatgactttgttcttgattcagagtatctcgtcacattactggtagtagttcccaagttaaaccacaacgactggattaagcagtatgaaacactagccgaaatggtagttccaaggtctagcaatgttctttcagaggaccaagacagttacctgtgtaatgtcaccttgtttaggaaggcagttgatgacttcagacacaaagccagagaaaacaaattcattgttcgtgacttccagtataatgaagaggagatgaaagcagataaagaagaaatgaacaggctttctactgataagaaaaaacaatttggaccacttgtacggtggctgaaagtgaattttagtgaagcatttattgcatggattcacgtgaaagcattacgggttttcgttgagtctgttttaaggtatggcttgccagtgaacttccaagcaatgctacttcagcccaataagaaaactttgaagaaactgagagaagtattacatgaattgtataaacatctagacagcagtgcagcagctattattgatgctcctatggatattccaggtttaaacctgagtcaacaagaatactacccctatgtgtactacaagattgattgcaacttgctggaattcaagtgaaaatgggctcctcccccgacaatcctgtccttgtgtttgtgtgtgctaacagaaataagttgcagtatggtcgtacttttaactctagtatcctttgcttgcttcttaccccctttcctaggtgaattctcccacagtggtctgtatctcaacattttctttttaaaggaaaaaatatatatatatagtttctttttattgatcaggtctgtaaatgtgtactaaaaaaatcagagtttatttataaacaaaatagtttatttaaagagaaggtctcttccttattgatatcatggtatgcattaattccatttgttactattgtgcacaaaagccctgttcacaggggaatggtgtaaacatttatactgttttgttcactgtatttagtagacataactgttgaatagttactgaatcatgatgtaaagaatatgtgaccatcttcaggtatgggatttctgaacgtttcaaatttcaatcaatgagcactgtcaacacccacaggagagaataaaattacctgtgcaaaggtgtattgtggtgtgtgtaacttaagattacagttctgtttgagagttaaatgatgtcatagctcacttgctatgctgcttccaggattttgttatatgctgaggtgtaaccatttgtgttgtctgactttcgtatgatttaattgagccaaatttgggtcagaacacaaatttgaagatgacttttcagtatatgatgggtatttacatttgaacactagaattttaggtctctcaaataattaagaatagagccagttttgaataaagtctagcagaactatgcagctttagtcatttgttttgtctaagtctgtattttatgtgttgtcttcttaagatctataattttggcatttatgtcatttgtgacatagtctgaaaatagagacattgttggcctttaaaatctcagaaatgaatgacttaatttagtgtcctgaaagagcttttaaaagaggattttgtggcaatgtttctcttactacgtactcacaggtttgcaaatgggaaaaaagtttacatttcagtttaggggcatatctaagctatgctattccctttagaaaattagcctccaaaatcttttgtttcaaaatattatattatttcataaataatttcaagcaaatacagacatccacaatgtagaacatgagagaccccctccctcaatttccacctcccaagggaagtttatgtatttttctaggcccttttctatgtctttacatctctgtctcacacacacacacgtatacacacacacagtttatttttaataaaataggattataccacacacatcctgtcacttgcttttttgcttaagagtatatctaagagaatcctttgtgtcagtgaagctggagctacctcattcttttaactggctgcgtggcgttccattgagtgtctgtcatcatgtgtttagccgagtggatggatagtctgcttgtttttagtttttgctcttaacaaacactgctgcagtcagcatccttgcacagatttctttgtatacttgtattagtatttctgtaagatctgagaagtggaatttgtagggtcataggttatgtacacttaagtttttgacactcactgccaagtcatctgtcagaattctaaactaaagacatgtttggagtgtggatttatcttcagtttttctttggacaagaggaagctgtgaaagattttgctatcagaaaattttggttctttgtcttttgcacatgttctttgagtcttagtatctgtaacgtggcgctactctctctatcatgggggggcatgttttgacattaaattgacttttaagaaaaacatgtcactaacctgaagctcagccacacagtgacttttaaggttttatttagactttactgttgttctcatgagagtaggtacagactgcataaggtttagaatcccagcatatgtctgaaacgacgggactttcactgtgatttccaccagagaaattatagcagagtggctgagcatgtgctctgaggccaggccccagctctgctgctgacgagctgtgtggtcctgggcagagtggtctccgagttccagtccctcctctgtaaaatgggcatgattagagtgcccaccgcattagggatgttggggtgagtcagtgtgaccccacgtgcacagaaagtgctgcgagtggtgcatggtgagaggttgatgcaggtacttagcccttggggaacacaggtagttccttttcactgtgtttaacttcgggaaaatccagatccacatcattgtagagtctgagggttagaaggaagtcattgtgtctaacataacaacagagcagtttgtgtcactgagctccagtctgtgctggattattgatattgttggtggcggtcaccattcctggaaagggactgtcccaagccacttaccttcccgaggagtctgctggttctccttgaggatagtgcttagataacagactcattaaacatttactgagtgtctgtcagggatcattcacatccacatcatcctcccggcccctccccgtgttgttcatggagggagtactggcggtccccattttcatgtatggagacttcaggtgaaagaagttaagtgaattctttgttgagtcacaaatcttgagccagtcagaatttgaacctaagatttttgactgctggttgtcacacttcccgccccacactcaactgttgtgtgaatgagccagacacattgcttaacctgagtccgagatggacaatggtataggaaagatattcggtatggagaatcagatgttaacttgtgttgctatttttgttttgttttgttttgttttgtttttgagacaaggtcttgctctgtcacccaggctagagtgcagtggcatgatcagggcttactgcagcctcaccctcgatttcctgggctcaagcaatcctcccacctcagcccccaagtagctgggcctacaggtgcgtgctaccacgcctggccaattttttaaattttagcacagatgaggtctcactatgttgcccgggctggtctcgaactcctgagctcaagggatcctcccgcctcagcctcccaaagtgctggtgttacaggcataagccaccacgcctggcctgtgttgctattatatttggcaggaacccagagtccagaacatttcatctatgatgggttagataatgtgtctagttgtttgcatgccaatttcagtagcctcagttattcaacctaggagatttttctacctctttactaccctgctgaagttgctcttcagcagaaaatctttgtggaacacattccacactttgaaatcttcgtggaacaaaagatatttgtggaaccaatctttgtggaacatattccagctttttgaatgagtgcatatccagtagtacctttaaagtaacactttgtacataacaaatactcagcaaatgtgaaactttatttgctcttacttcaaaattagtccaaaatgttggaaataaaatataagacattgatctagatatgaggtttttctccttcattctcagctgtcgaagaaatcaaagtagcatatgcacaaggttaaaaaccacatatacaaatactatagaacagcttataatgaaaaccttgcctgcctttataaaaaatgtgattatcttcttctgttaatgtcaataaaagatggtttgtcctagaaggtctataaatggtattatgttctggaggaaacctagcaaaaactttgctagtttagtacttgtctctaaattgatgttcacccatttcaatattgcacttattaatggtctttatttttctagcatagataacaattgattctttagattcatatatggaggtaattcttgctttctaaagaaaggaatatggcacattggaaccattttattcaccagtggatttacccttagagtatttttagatctgagctgatgacttgtgagagaaaaagggaacagagtaaagccatggaagccatgaacagtaagagactgccgcctggcatggtttcttcttctgcagaagatgaaactgaggagaaacaagacaacatccttcataccaggaatggtcaagataatgcaagaagaaaaaagctttcaaacaaatcagaaggcagtcaacaaacagaaagggggacattccttccctggcagttactcaaaactgaaattgcttattgtgtacaccggggcttgtacttggggaatttaataaaaatgctcattaccaagctaaaaaaaaaaaaaaaaaaaaaaaaaaaaaaaaaaaaaagagaaaagaaagaaggaggggagagaacaccaaaaagggcccaaagggggcgccaagcacaagtccaaggaggggggcaccaagggggccccgtagagaaaatggccaggcagacatgtgaccaaacttaaaaaccgagacaagacggggaaacaggggccaccacgcggagcaacaatgcaaaagggccactgcatcgagagacgggggggacacaaatgggcaccaaagaaaccctcagagaactagaggccaataaaaaattaaaaaagctccaagggagcaacaggtcaaaacaaccggcccaagaacagctcgaaagactggctagcgagagaaacttaaaagttagcg

SEQ ID NO: 316791 - DNA, 4998 bp, Homo sapiens
gcacgagcctatgtgtactattcttgttgactcaggtttaaacctggaatatccataggagcctatggaaaaaacagacaattattcaattttgtatttacagaactcaaaaaaagaaagcaagtattaacatttacctttttattgaacatctactctgggctaaatgtatgcacttaaggctaatttatctgagttagacattattcccattttgcaaatgagaagacaatctctgaaagaatactacccctatgtgtactacaagattgattgcaacttgctggaattcaagtgaaaatgggctcctcccccgacaatcctgtccttgtgtttgtgtgtgctaacagaaataagttgcagtatggtcgtacttttaactctagtatcctttgcttgcttcttaccccctttcctaggtgaattctcccacagtggtctgtatctcaacattttctttttaaaggaaaaaatatatatatatagtttctttttattgatcaggtctgtaaatgtgtactaaaaaaatcagagtttatttataaacaaaatagtttatttaaagagaaggtctcttccttattgatatcatggtatgcattaattccatttgttactattgtgcacaaaagccctgttcacaggggaatggtgtaaacatttatactgttttgttcactgtatttagtagacataactgttgaatagttactgaatcatgatgtaaagaatatgtgaccatcttcaggtatgggatttctgaacgtttcaaatttcaatcaatgagcactgtcaacacccacaggagagaataaaattacctgtgcaaaggtgtattgtggtgtgtgtaacttaagattacagttctgtttgagagttaaatgatgtcatagctcacttgctatgctgcttccaggattttgttatatgctgaggtgtaaccatttgtgttgtctgactttcgtatgatttaattgagccaaatttgggtcagaacacaaatttgaagatgacttttcagtatatgatgggtatttacatttgaacactagaattttaggtctctcaaataattaagaatagagccagttttgaataaagtctagcagaactatgcagctttagtcatttgttttgtctaagtctgtattttatgtgttgtcttcttaagatctataattttggcatttatgtcatttgtgacatagtctgaaaatagagacattgttggcctttaaaatctcagaaatgaatgacttaatttagtgtcctgaaagagcttttaaaagaggattttgtggcaatgtttctcttactacgtactcacaggtttgcaaatgggaaaaaagtttacatttcagtttaggggcatatctaagctatgctattccctttagaaaattagcctccaaaatcttttgtttcaaaatattatattatttcataaataatttcaagcaaatacagacatccacaatgtagaacatgagagaccccctccctcaatttccacctcccaagggaagtttatgtatttttctaggcccttttctatgtctttacatctctgtctcacacacacacacgtatacacacacacagtttatttttaataaaataggattataccacacacatcctgtcacttgcttttttgcttaagagtatatctaagagaatcctttgtgtcagtgaagctggagctacctcattcttttaactggctgcgtggcgttccattgagtgtctgtcatcatgtgtttagccgagtggatggatagtctgcttgtttttagtttttgctcttaacaaacactgctgcagtcagcatccttgcacagatttctttgtatacttgtattagtatttctgtaagatctgagaagtggaatttgtagggtcataggttatgtacacttaagtttttgacactcactgccaagtcatctgtcagaattctaaactaaagacatgtttggagtgtggatttatcttcagtttttctttggacaagaggaagctgtgaaagattttgctatcagaaaattttggttctttgtcttttgcacatgttctttgagtcttagtatctgtaacgtggcgctactctctctatcatgggggggcatgttttgacattaaattgacttttaagaaaaacatgtcactaacctgaagctcagccacacagtgacttttaaggttttatttagactttactgttgttctcatgagagtaggtacagactgcataaggtttagaatcccagcatatgtctgaaacgacgggactttcactgtgatttccaccagagaaattatagcagagtggctgagcatgtgctctgaggccaggccccagctctgctgctgacgagctgtgtggtcctgggcagagtggtctccgagttccagtccctcctctgtaaaatgggcatgattagagtgcccaccgcattagggatgttggggtgagtcagtgtgaccccacgtgcacagaaagtgctgcgagtggtgcatggtgagaggttgatgcaggtacttagcccttggggaacacaggtagttccttttcactgtgtttaacttcgggaaaatccagatccacatcattgtagagtctgagggttagaaggaagtcattgtgtctaacataacaacagagcagtttgtgtcactgagctccagtctgtgctggattattgatattgttggtggcggtcaccattcctggaaagggactgtcccaagccacttaccttcccgaggagtctgctggttctccttgaggatagtgcttagataacagactcattaaacatttactgagtgtctgtcagggatcattcacatccacatcatcctcccggcccctccccgtgttgttcatggagggagtactggcggtccccattttcatgtatggagacttcaggtgaaagaagttaagtgaattctttgttgagtcacaaatcttgagccagtcagaatttgaacctaagatttttgactgctggttgtcacacttcccgccccacactcaactgttgtgtgaatgagccagacacattgcttaacctgagtccgagatggacaatggtataggaaagatattcggtatggagaatcagatgttaacttgtgttgctatttttgttttgttttgttttgttttgtttttgagacaaggtcttgctctgtcacccaggctagagtgcagtggcatgatcagggcttactgcagcctcaccctcgatttcctgggctcaagcaatcctcccacctcagcccccaagtagctgggcctacaggtgcgtgctaccacgcctggccaattttttaaattttagcacagatgaggtctcactatgttgcccgggctggtctcgaactcctgagctcaagggatcctcccgcctcagcctcccaaagtgctggtgttacaggcataagccaccacgcctggcctgtgttgctattatatttggcaggaacccagagtccagaacatttcatctatgatgggttagataatgtgtctagttgtttgcatgccaatttcagtagcctcagttattcaacctaggagatttttctacctctttactaccctgctgaagttgctcttcagcagaaaatctttgtggaacacattccacactttgaaatcttcgtggaacaaaagatatttgtggaaccaatctttgtggaacatattccagctttttgaatgagtgcatatccagtagtacctttaaagtaacactttgtacataacaaatactcagcaaatgtgaaactttatttgctcttacttcaaaattagtccaaaatgttggaaataaaatataagacattgatctagatatgaggtttttctccttcattctcagctgtcgaagaaatcaaagtagcatatgcacaaggttaaaaaccacatatacaaatactatagaacagcttataatgaaaaccttgcctgcctttataaaaaatgtgattatcttcttctgttaatgtcaataaaagatggtttgtcctagaaggtctataaatggtattatgttctggaggaaacctagcaaaaactttgctagtttagtacttgtctctaaattgatgttcacccatttcaatattgcacttattaatggtctttatttttctagcatagataacaattgattctttagattcatatatggaggtaattcttgctttctaaagaaaggaatatggcacattggaaccattttattcaccagtggatttacccttagagtatttttagatctgagctgatgacttgtgagagaaaaagggaacagagtaaagccatggaagccatgaacagtaagagactgccgcctggcatggtttcttcttctgcagaagatgaaactgaggagaaacaagacaacatccttcataccaggaatggtcaagataatgcaagaagaaaaaagctttcaaacaaatcagaaggcagtcaacaaacagaaagggggacattccttccctggcagttactcaaaactgaaattgcttattgtgtacaccggggcttgtacttggggaatttaataaaaatgctcattaccaagctaaaaaaaaaaaaaaaaaaaaaaaaaaaaaaaaaaaaaagagaaaagaaagaaggaggggagagaacaccaaaaagggcccaaagggggcgccaagcacaagtccaaggaggggggcaccaagggggccccgtagagaaaatggccaggcagacatgtgaccaaacttaaaaaccgagacaagacggggaaacaggggccaccacgcggagcaacaatgcaaaagggccactgcatcgagagacgggggggacacaaatgggcaccaaagaaaccctcagagaactagaggccaataaaaaattaaaaaagctccaagggagcaacaggtcaaaacaaccggcccaagaacagctcgaaagactggctagcgagagaaacttaaaagttagcg

SEQ ID NO: 316792 - DNA, 1806 bp, Homo sapiens
agcgcgcgccgcggtcagctgactgctgggctggcacgtgacttgttctgtgttcgcttgggtagaggaagccgtgaggccggagcttaggtcgggaagggatggatcgctgagccgatagcgtccgctaggctgtctgcctcggtacctgttactgctgctacttcctcgtttgacaccttcctggaatctctcttgatttttgaggaaatacctagtaacaaacatgactgagttctggcttatatctgctcctggggagaaaacctgtcagcaaacatgggagaaattgcatgcggcaacttcaaagaacaataatcttgctgtcacttccaagttcaatattcctgacttaaaggttggcacgttggatgtcttggttggcttgtcagatgaactggctaaactggatgcatttgtagaaggagtggttaagaaagtagctcaatacatggctgatgtattggaagatagcaaagacaaagttcaagagaatctgttggctaatggagtggacttggttacttatataacaaggttccagtgggacatggccaaatatccaatcaagcagtccctgaaaaatatttctgaaataattgccaagggagtaactcagattgataatgacctgaaatctcgagcatctgcatacaataacctgaaaggaaatcttcagaatttggaacgaaagaatgcaggaagtttgctaactagaagtctagcagaaattgtgaagaaggatgactttgttcttgattcagagtatctcgtcacattactggtagtagttcccaagttaaaccacaacgactggattaagcagtatgaaacactagccgaaatggtagttccaaggtctagcaatgttctttcagaggaccaagacagttacctgtgtaatgtcaccttgtttaggaaggcagttgatgacttcagacacaaagccagagaaaacaaattcattgttcgtgacttccagtataatgaagaggagatgaaagcagataaagaagaaatgaacaggctttctactgataagaaaaaacaatttggaccacttgtacggtggctgaaagtgaattttagtgaagcatttattgcatggattcacgtgaaagcattacgggttttcgttgagtctgttttaaggtatggcttgccagtgaacttccaagcaatgctacttcagcccaataagaaaactttgaagaaactgagagaagtattacatgaattgtataaacatctagacagcagtgcagcagctattattgatgtaagtacttattagcccagtagagtaagaattgaagtgaatttcagaaaaaaaatgattgaaagaagatagacagaaaagggagggtaagtatgaaacttaatcattttttattactttgaggttctcaatttgttatgtaaacatagtaatttacattgtttaccctgttttatactaattatatctgtgttttgcttcttggcatttctacaagctagtaattatcttgctgtgtatcagatgtttatagctgcagaaatacagaaaccagtgatactagttatttacaaaaactataaattgcagagaggaagaaaataagcagttattttaattttatttggtagaagcgatagagtcaatagatgagtattttcaaggtaggttcatttttctaaaatggcgtagctgggcgtggtgggacatgttggtagtcccagcaactgaggaggctgaggcgggaggatcacttgagcccaggccttcgagaccaacctgggtaacatagtaagatcccatctgaa

SEQ ID NO: 316793 - DNA, 182 bp, Homo sapiens
aaaacctgtcagcaaacatgggagaaattgcatgcggcaacttcaaagaacaataatcttgctgtcacttccaagttcaatattcctgacttaaaggtgaagctgcactgtgcaaaattatatatgagttcatcatccaggggagggccagttctctcttttagtggaaatgagatacccag

SEQ ID NO: 316794 - DNA, 2201 bp, Homo sapiens
agcgcgcgccgcggtcagctgactgctgggctggcacgtgacttgttctgtgttcgcttgggtagaggaagccgtgaggccggagcttaggtcgggaagggatggatcgctgagccgatagcgtccgctaggctgtctgcctcggtacctgttactgctgctacttcctcgtttgacaccttcctggaatctctcttgatttttgaggaaatacctagtaacaaacatgactgagttctggcttatatctgctcctggggagaaaacctgtcagcaaacatgggagaaattgcatgcggcaacttcaaagaacaataatcttgctgtcacttccaagttcaatattcctgacttaaaggttggcacgttggatgtcttggttggcttgtcagatgaactggctaaactggatgcatttgtagaaggagtggttaagaaagtagctcaatacatggctgatgtattggaagatagcaaagacaaagttcaagagaatctgttggctaatggagtggacttggttacttatataacaaggttccagtgggacatggccaaatatccaatcaagcagtccctgaaaaatatttctgaaataattgccaagggagtaactcagattgataatgacctgaaatctcgagcatctgcatacaataacctgaaaggaaatcttcagaatttggaacgaaagaatgcaggaagtttgctaactagaagtctagcagaaattgtgaagaaggatgactttgttcttgattcagagtatctcgtcacattactggtagtagttcccaagttaaaccacaacgactggattaagcagtatgaaacactagccgaaatggtagttccaaggtctagcaatgttctttcagaggaccaagacagttacctgtgtaatgtcaccttgtttaggaaggcagttgatgacttcagacacaaagccagagaaaacaaattcattgttcgtgacttccagtataatgaagaggagatgaaagcagataaagaagaaatgaacaggctttctactgataagaaaaaacaatttggaccacttgtacggtggctgaaagtgaattttagtgaagcatttattgcatggattcacgtgaaagcattacgggttttcgttgagtctgttttaaggtatggcttgccagtgaacttccaagcaatgctacttcagcccaataagaaaactttgaagaaactgagagaagtattacatgaattgtataaacatctagacagcagtgcagcagctattattgatgctcctatggatattccaggtttaaacctgagtcaacaagaatactacccctatgtgtactacaagattgattgcaacttgctggaattcaagtgaaaatgggctcctcccccgacaatcctgtccttgtgtttgtgtgtgctaacagaaataagttgcagtatggtcgtacttttaactctagtatcctttgcttgcttcttaccccctttcctaggtgaattctcccacagtggtctgtatctcaacattttctttttaaaggaaaaaatatatatatatagtttctttttattgatcaggtctgtaaatgtgtactaaaaaaatcagagtttatttataaacaaaatagtttatttaaagagaaggtctcttccttattgatatcatggtatgcattaattccatttgttactattgtgcacaaaagccctgttcacaggggaatggtgtaaacatttatactgttttgttcactgtatttagtagacataactgttgaatagttactgaatcatgatgtaaagaatatgtgaccatcttcaggtatgggatttctgaacgtttcaaatttcaatcaatgagcactgtcaacacccacaggagagaataaaattacctgtgcaaaggtgtattgtggtgtgtgtaacttaagattacagttctgtttgagagttaaatgatgtcatagctcacttgctatgctgcttccaggattttgttatatgctgaggtgtaaccatttgtgttgtctgactttcgtatgatttaattgagccaaatttgggtcagaacacaaatttgaagatgacttttcagtatatgatgggtatttacatttgaacactagaattttaggtctctcaaataattaagaatagagccagttttgaataaagtctagcagaactatgcagcttta

SEQ ID NO: 316795 - DNA, 4809 bp, Homo sapiens
  misc_feature (4809)..(4809): n is a, c, g, or t
agcgcgcgccgcggtcagctgactgctgggctggcacgtgacttgttctgtgttcgcttgggtagaggaagccgtgaggccggagcttaggtcgggaagggatggatcgctgagccgatagcgtccgctaggctgtctgcctcggtacctgttactgctgctacttcctcgtttgacaccttcctggaatctctcttgatttttgaggaaatacctagtaacaaacatgactgagttctggcttatatctgctcctggggagaaaacctgtcagcaaacatgggagaaattgcatgcggcaacttcaaagaacaataatcttgctgtcacttccaagttcaatattcctgacttaaaggttggcacgttggatgtcttggttggcttgtcagatgaactggctaaactggatgcatttgtagaaggagtggttaagaaagtagctcaatacatggctgatgtattggaagatagcaaagacaaagttcaagagaatctgttggctaatggagtggacttggttacttatataacaaggttccagtgggacatggccaaatatccaatcaagcagtccctgaaaaatatttctgaaataattgccaagggagtaactcagattgataatgacctgaaatctcgagcatctgcatacaataacctgaaaggaaatcttcagaatttggaacgaaagaatgcaggaagtttgctaactagaagtctagcagaaattgtgaagaaggatgactttgttcttgattcagagtatctcgtcacattactggtagtagttcccaagttaaaccacaacgactggattaagcagtatgaaacactagccgaaatggtagttccaaggtctagcaatgttctttcagaggaccaagacagttacctgtgtaatgtcaccttgtttaggaaggcagttgatgacttcagacacaaagccagagaaaacaaattcattgttcgtgacttccagtataatgaagaggagatgaaagcagataaagaagaaatgaacaggctttctactgataagaaaaaacaatttggaccacttgtacggtggctgaaagtgaattttagtgaagcatttattgcatggattcacgtgaaagcattacgggttttcgttgagtctgttttaaggtatggcttgccagtgaacttccaagcaatgctacttcagcccaataagaaaactttgaagaaactgagagaagtattacatgaattgtataaacatctagacagcagtgcagcagctattattgatgctcctatggatattccaggtttaaacctgagtcaacaagaatactacccctatgtgtactacaagattgattgcaacttgctggaattcaagtgaaaatgggctcctcccccgacaatcctgtccttgtgtttgtgtgtgctaacagaaataagttgcagtatggtcgtacttttaactctagtatcctttgcttgcttcttaccccctttcctaggtgaattctcccacagtggtctgtatctcaacattttctttttaaaggaaaaaatatatatatatagtttctttttattgatcaggtctgtaaatgtgtactaaaaaaatcagagtttatttataaacaaaatagtttatttaaagagaaggtctcttccttattgatatcatggtatgcattaattccatttgttactattgtgcacaaaagccctgttcacaggggaatggtgtaaacatttatactgttttgttcactgtatttagtagacataactgttgaatagttactgaatcatgatgtaaagaatatgtgaccatcttcaggtatgggatttctgaacgtttcaaatttcaatcaatgagcactgtcaacacccacaggagagaataaaattacctgtgcaaaggtgtattgtggtgtgtgtaacttaagattacagttctgtttgagagttaaatgatgtcatagctcacttgctatgctgcttccaggattttgttatatgctgaggtgtaaccatttgtgttgtctgactttcgtatgatttaattgagccaaatttgggtcagaacacaaatttgaagatgacttttcagtatatgatgggtatttacatttgaacactagaattttaggtctctcaaataattaagaatagagccagttttgaataaagtctagcagaactatgcagctttagtcatttgttttgtctaagtctgtattttatgtgttgtcttcttaagatctataattttggcatttatgtcatttgtgacatagtctgaaaatagagacattgttggcctttaaaatctcagaaatgaatgacttaatttagtgtcctgaaagagcttttaaaagaggattttgtggcaatgtttctcttactacgtactcacaggtttgcaaatgggaaaaaagtttacatttcagtttaggggcatatctaagctatgctattccctttagaaaattagcctccaaaatcttttgtttcaaaatattatattatttcataaataatttcaagcaaatacagacatccacaatgtagaacatgagagaccccctccctcaatttccacctcccaagggaagtttatgtatttttctaggcccttttctatgtctttacatctctgtctcacacacacacacgtatacacacacacagtttatttttaataaaataggattataccacacacatcctgtcacttgcttttttgcttaagagtatatctaagagaatcctttgtgtcagtgaagctggagctacctcattcttttaactggctgcgtggcgttccattgagtgtctgtcatcatgtgtttagccgagtggatggatagtctgcttgtttttagtttttgctcttaacaaacactgctgcagtcagcatccttgcacagatttctttgtatacttgtattagtatttctgtaagatctgagaagtggaatttgtagggtcataggttatgtacacttaagtttttgacactcactgccaagtcatctgtcagaattctaaactaaagacatgtttggagtgtggatttatcttcagtttttctttggacaagaggaagctgtgaaagattttgctatcagaaaattttggttctttgtcttttgcacatgttctttgagtcttagtatctgtaacgtggcgctactctctctatcatgggggggcatgttttgacattaaattgacttttaagaaaaacatgtcactaacctgaagctcagccacacagtgacttttaaggttttatttagactttactgttgttctcatgagagtaggtacagactgcataaggtttagaatcccagcatatgtctgaaacgacgggactttcactgtgatttccaccagagaaattatagcagagtggctgagcatgtgctctgaggccaggccccagctctgctgctgacgagctgtgtggtcctgggcagagtggtctccgagttccagtccctcctctgtaaaatgggcatgattagagtgcccaccgcattagggatgttggggtgagtcagtgtgaccccacgtgcacagaaagtgctgcgagtggtgcatggtgagaggttgatgcaggtacttagcccttggggaacacaggtagttccttttcactgtgtttaacttcgggaaaatccagatccacatcattgtagagtctgagggttagaaggaagtcattgtgtctaacataacaacagagcagtttgtgtcactgagctccagtctgtgctggattattgatattgttggtggcggtcaccattcctggaaagggactgtcccaagccacttaccttcccgaggagtctgctggttctccttgaggatagtgcttagataacagactcattaaacatttactgagtgtctgtcagggatcattcacatccacatcatcctcccggcccctccccgtgttgttcatggagggagtactggcggtccccattttcatgtatggagacttcaggtgaaagaagttaagtgaattctttgttgagtcacaaatcttgagccagtcagaatttgaacctaagatttttgactgctggttgtcacacttcccgccccacactcaactgttgtgtgaatgagccagacacattgcttaacctgagtccgagatggacaatggtataggaaagatattcggtatggagaatcagatgttaacttgtgttgctatttttgttttgttttgttttgttttgtttttgagacaaggtcttgctctgtcacccaggctagagtgcagtggcatgatcagggcttactgcagcctcaccctcgatttcctgggctcaagcaatcctcccacctcagcccccaagtagctgggcctacaggtgcgtgctaccacgcctggccaattttttaaattttagcacagatgaggtctcactatgttgcccgggctggtctcgaactcctgagctcaagggatcctcccgcctcagcctcccaaagtgctggtgttacaggcataagcacagcggcggtgctatatattggcagaaccagattcagacattcaccatgatggtgaaaggccatgttgctgcacttcgggcccctattaccaggaaatttacccttatacgctgaatgcgctcacaatgtggggacttcactgtacttgggcaaaattgggccctgtggaataccccgagagacacccaaaatcaacccagtgaatgttcccacagggaaaaaaatggtccacagtgacatcaactacgtcactcaccactctaccacacttctcgn

SEQ ID NO: 316796 - DNA, 6034 bp, Homo sapiens
agcgcgcgccgcggtcagctgactgctgggctggcacgtgacttgttctgtgttcgcttgggtagaggaagccgtgaggccggagcttaggtcgggaagggatggatcgctgagccgatagcgtccgctaggctgtctgcctcggtaatctctcttgatttttgaggaaatacctagtaacaaacatgactgagttctggcttatatctgctcctggggagaaaacctgtcagcaaacatgggagaaattgcatgcggcaacttcaaagaacaataatcttgctgtcacttccaagttcaatattcctgacttaaaggttggcacgttggatgtcttggttggcttgtcagatgaactggctaaactggatgcatttgtagaaggagtggttaagaaagtagctcaatacatggctgatgtattggaagatagcaaagacaaagttcaagagaatctgttggctaatggagtggacttggttacttatataacaaggttccagtgggacatggccaaatatccaatcaagcagtccctgaaaaatatttctgaaataattgccaagggagtaactcagattgataatgacctgaaatctcgagcatctgcatacaataacctgaaaggaaatcttcagaatttggaacgaaagaatgcaggaagtttgctaactagaagtctagcagaaattgtgaagaaggatgactttgttcttgattcagagtatctcgtcacattactggtagtagttcccaagttaaaccacaacgactggattaagcagtatgaaacactagccgaaatggtagttccaaggtctagcaatgttctttcagaggaccaagacagttacctgtgtaatgtcaccttgtttaggaaggcagttgatgacttcagacacaaagccagagaaaacaaattcattgttcgtgacttccagtataatgaagaggagatgaaagcagataaagaagaaatgaacaggctttctactgataagaaaaaacaatttggaccacttgtacggtggctgaaagtgaattttagtgaagcatttattgcatggattcacgtgaaagcattacgggttttcgttgagtctgttttaaggtatggcttgccagtgaacttccaagcaatgctacttcagcccaataagaaaactttgaagaaactgagagaagtattacatgaattgtataaacatctagacagcagtgcagcagctattattgatgctcctatggatattccaggtttaaacctgagtcaacaagaatactacccctatgtgtactacaagattgattgcaacttgctggaattcaagtgaaaatgggctcctcccccgacaatcctgtccttgtgtttgtgtgtgctaacagaaataagttgcagtatggtcgtacttttaactctagtatcctttgcttgcttcttaccccctttcctaggtgaattctcccacagtggtctgtatctcaacattttctttttaaaggaaaaaatatatatatatagtttctttttattgatcaggtctgtaaatgtgtactaaaaaaatcagagtttatttataaacaaaatagtttatttaaagagaaggtctcttccttattgatatcatggtatgcattaattccatttgttactattgtgcacaaaagccctgttcacaggggaatggtgtaaacatttatactgttttgttcactgtatttagtagacataactgttgaatagttactgaatcatgatgtaaagaatatgtgaccatcttcaggtatgggatttctgaacgtttcaaatttcaatcaatgagcactgtcaacacccacaggagagaataaaattacctgtgcaaaggtgtattgtggtgtgtgtaacttaagattacagttctgtttgagagttaaatgatgtcatagctcacttgctatgctgcttccaggattttgttatatgctgaggtgtaaccatttgtgttgtctgactttcgtatgatttaattgagccaaatttgggtcagaacacaaatttgaagatgacttttcagtatatgatgggtatttacatttgaacactagaattttaggtctctcaaataattaagaatagagccagttttgaataaagtctagcagaactatgcagctttagtcatttgttttgtctaagtctgtattttatgtgttgtcttcttaagatctataattttggcatttatgtcatttgtgacatagtctgaaaatagagacattgttggcctttaaaatctcagaaatgaatgacttaatttagtgtcctgaaagagcttttaaaagaggattttgtggcaatgtttctcttactacgtactcacaggtttgcaaatgggaaaaaagtttacatttcagtttaggggcatatctaagctatgctattccctttagaaaattagcctccaaaatcttttgtttcaaaatattatattatttcataaataatttcaagcaaatacagacatccacaatgtagaacatgagagaccccctccctcaatttccacctcccaagggaagtttatgtatttttctaggcccttttctatgtctttacatctctgtctcacacacacacacgtatacacacacacagtttatttttaataaaataggattataccacacacatcctgtcacttgcttttttgcttaagagtatatctaagagaatcctttgtgtcagtgaagctggagctacctcattcttttaactggctgcgtggcgttccattgagtgtctgtcatcatgtgtttagccgagtggatggatagtctgcttgtttttagtttttgctcttaacaaacactgctgcagtcagcatccttgcacagatttctttgtatacttgtattagtatttctgtaagatctgagaagtggaatttgtagggtcataggttatgtacacttaagtttttgacactcactgccaagtcatctgtcagaattctaaactaaagacatgtttggagtgtggatttatcttcagtttttctttggacaagaggaagctgtgaaagattttgctatcagaaaattttggttctttgtcttttgcacatgttctttgagtcttagtatctgtaacgtggcgctactctctctatcatgggggggcatgttttgacattaaattgacttttaagaaaaacatgtcactaacctgaagctcagccacacagtgacttttaaggttttatttagactttactgttgttctcatgagagtaggtacagactgcataaggtttagaatcccagcatatgtctgaaacgacgggactttcactgtgatttccaccagagaaattatagcagagtggctgagcatgtgctctgaggccaggccccagctctgctgctgacgagctgtgtggtcctgggcagagtggtctccgagttccagtccctcctctgtaaaatgggcatgattagagtgcccaccgcattagggatgttggggtgagtcagtgtgaccccacgtgcacagaaagtgctgcgagtggtgcatggtgagaggttgatgcaggtacttagcccttggggaacacaggtagttccttttcactgtgtttaacttcgggaaaatccagatccacatcattgtagagtctgagggttagaaggaagtcattgtgtctaacataacaacagagcagtttgtgtcactgagctccagtctgtgctggattattgatattgttggtggcggtcaccattcctggaaagggactgtcccaagccacttaccttcccgaggagtctgctggttctccttgaggatagtgcttagataacagactcattaaacatttactgagtgtctgtcagggatcattcacatccacatcatcctcccggcccctccccgtgttgttcatggagggagtactggcggtccccattttcatgtatggagacttcaggtgaaagaagttaagtgaattctttgttgagtcacaaatcttgagccagtcagaatttgaacctaagatttttgactgctggttgtcacacttcccgccccacactcaactgttgtgtgaatgagccagacacattgcttaacctgagtccgagatggacaatggtataggaaagatattcggtatggagaatcagatgttaacttgtgttgctatttttgttttgttttgttttgttttgtttttgagacaaggtcttgctctgtcacccaggctagagtgcagtggcatgatcagggcttactgcagcctcaccctcgatttcctgggctcaagcaatcctcccacctcagcccccaagtagctgggcctacaggtgcgtgctaccacgcctggccaattttttaaattttagcacagatgaggtctcactatgttgcccgggctggtctcgaactcctgagctcaagggatcctcccgcctcagcctcccaaagtgctggtgttacaggcataagccaccacgcctggcctgtgttgctattatatttggcaggaacccagagtccagaacatttcatctatgatgggttagataatgtgtctagttgtttgcatgccaatttcagtagcctcagttattcaacctaggagatttttctacctctttactaccctgctgaagttgctcttcagcagaaaatctttgtggaacacattccacactttgaaatcttcgtggaacaaaagatatttgtggaaccaatctttgtggaacatattccagctttttgaatgagtgcatatccagtagtacctttaaagtaacactttgtacataacaaatactcagcaaatgtgaaactttatttgctcttacttcaaaattagtccaaaatgttggaaataaaatataagacattgatctagatatgaggtttttctccttcattctcagctgtcgaagaaatcaaagtagcatatgcacaaggttaaaaaccacatatacaaatactatagaacagcttataatgaaaaccttgcctgcctttataaaaaatgtgattatcttcttctgttaatgtcaataaaagatggtttgtcctagaaggtctataaatggtattatgttctggaggaaacctagcaaaaactttgctagtttagtacttgtctctaaattgatgttcacccatttcaatattgcacttattaatggtctttatttttctagcatagataacaattgattctttagattcatatatggaggtaattcttgctttctaaagaaaggaatatggcacattggaaccattttattcaccagtggatttacccttagagtatttttagatctgagctgatgacttgtgagagaaaaagggaacagagtaaagccatggaagccatgaacagtaagagactgccgcctggcatggtttcttcttctgcagaagatgaaactgaggagaaacaagacaacatccttcataccaggaatggtcaagataatgcaagaagaaaaaagctttcaaacaaatcagaaggcagtcaacaaacagaaagggggacattccttccctggcagttactcaaaactgaaattgcttattgtgtacaccggggcttgtacttggggaatttaataaaaatgctcattaccaagctaaaaaaaaaaaaaaaaaaaaaaaaaaaaaaaaaaaaaagagaaaagaaagaaggaggggagagaacaccaaaaagggcccaaagggggcgccaagcacaagtccaaggaggggggcaccaagggggccccgtagagaaaatggccaggcagacatgtgaccaaacttaaaaaccgagacaagacggggaaacaggggccaccacgcggagcaacaatgcaaaagggccactgcatcgagagacgggggggacacaaatgggcaccaaagaaaccctcagagaactagaggccaataaaaaattaaaaaagctccaagggagcaacaggtcaaaacaaccggcccaagaacagctcgaaagactggctagcgagagaaacttaaaagttagcg

SEQ ID NO: 316797 - DNA, 6021 bp, Homo sapiens
agcgcgcgccgcggtcagctgactgctgggctggcacgtgacttgttctgtgttcgcttgggtagaggaagccgtgaggccggagcttaggtcgggaagggatggatcgctgagccgatagcgtccgctaggctgtctgcctcggtacctgttactgctgctacttcctcgtttgacaccttcctggaatctctcttgatttttgaggaaatacctagtaacaaacatgactgagttctggcttatatctgctcctggggagaaaacctgtcagcaaacatgggagaaattgcatgcggcaacttcaaagaacaataatcttgctgtcacttccaagttcaatattcctgacttaaaggttggcacgttggatgtcttggttggcttgtcagatgaactggctaaactggatgcatttgtagaaggagtggttaagaaagtagctcaatacatggctgatgtattggaagatagcaaagacaaagttcaagagaatctgttggctaatggagtggacttggttacttatataacaaggttccagtgggacatggccaaatatccaatcaagcagtccctgaaatctcgagcatctgcatacaataacctgaaaggaaatcttcagaatttggaacgaaagaatgcaggaagtttgctaactagaagtctagcagaaattgtgaagaaggatgactttgttcttgattcagagtatctcgtcacattactggtagtagttcccaagttaaaccacaacgactggattaagcagtatgaaacactagccgaaatggtagttccaaggtctagcaatgttctttcagaggaccaagacagttacctgtgtaatgtcaccttgtttaggaaggcagttgatgacttcagacacaaagccagagaaaacaaattcattgttcgtgacttccagtataatgaagaggagatgaaagcagataaagaagaaatgaacaggctttctactgataagaaaaaacaatttggaccacttgtacggtggctgaaagtgaattttagtgaagcatttattgcatggattcacgtgaaagcattacgggttttcgttgagtctgttttaaggtatggcttgccagtgaacttccaagcaatgctacttcagcccaataagaaaactttgaagaaactgagagaagtattacatgaattgtataaacatctagacagcagtgcagcagctattattgatgctcctatggatattccaggtttaaacctgagtcaacaagaatactacccctatgtgtactacaagattgattgcaacttgctggaattcaagtgaaaatgggctcctcccccgacaatcctgtccttgtgtttgtgtgtgctaacagaaataagttgcagtatggtcgtacttttaactctagtatcctttgcttgcttcttaccccctttcctaggtgaattctcccacagtggtctgtatctcaacattttctttttaaaggaaaaaatatatatatatagtttctttttattgatcaggtctgtaaatgtgtactaaaaaaatcagagtttatttataaacaaaatagtttatttaaagagaaggtctcttccttattgatatcatggtatgcattaattccatttgttactattgtgcacaaaagccctgttcacaggggaatggtgtaaacatttatactgttttgttcactgtatttagtagacataactgttgaatagttactgaatcatgatgtaaagaatatgtgaccatcttcaggtatgggatttctgaacgtttcaaatttcaatcaatgagcactgtcaacacccacaggagagaataaaattacctgtgcaaaggtgtattgtggtgtgtgtaacttaagattacagttctgtttgagagttaaatgatgtcatagctcacttgctatgctgcttccaggattttgttatatgctgaggtgtaaccatttgtgttgtctgactttcgtatgatttaattgagccaaatttgggtcagaacacaaatttgaagatgacttttcagtatatgatgggtatttacatttgaacactagaattttaggtctctcaaataattaagaatagagccagttttgaataaagtctagcagaactatgcagctttagtcatttgttttgtctaagtctgtattttatgtgttgtcttcttaagatctataattttggcatttatgtcatttgtgacatagtctgaaaatagagacattgttggcctttaaaatctcagaaatgaatgacttaatttagtgtcctgaaagagcttttaaaagaggattttgtggcaatgtttctcttactacgtactcacaggtttgcaaatgggaaaaaagtttacatttcagtttaggggcatatctaagctatgctattccctttagaaaattagcctccaaaatcttttgtttcaaaatattatattatttcataaataatttcaagcaaatacagacatccacaatgtagaacatgagagaccccctccctcaatttccacctcccaagggaagtttatgtatttttctaggcccttttctatgtctttacatctctgtctcacacacacacacgtatacacacacacagtttatttttaataaaataggattataccacacacatcctgtcacttgcttttttgcttaagagtatatctaagagaatcctttgtgtcagtgaagctggagctacctcattcttttaactggctgcgtggcgttccattgagtgtctgtcatcatgtgtttagccgagtggatggatagtctgcttgtttttagtttttgctcttaacaaacactgctgcagtcagcatccttgcacagatttctttgtatacttgtattagtatttctgtaagatctgagaagtggaatttgtagggtcataggttatgtacacttaagtttttgacactcactgccaagtcatctgtcagaattctaaactaaagacatgtttggagtgtggatttatcttcagtttttctttggacaagaggaagctgtgaaagattttgctatcagaaaattttggttctttgtcttttgcacatgttctttgagtcttagtatctgtaacgtggcgctactctctctatcatgggggggcatgttttgacattaaattgacttttaagaaaaacatgtcactaacctgaagctcagccacacagtgacttttaaggttttatttagactttactgttgttctcatgagagtaggtacagactgcataaggtttagaatcccagcatatgtctgaaacgacgggactttcactgtgatttccaccagagaaattatagcagagtggctgagcatgtgctctgaggccaggccccagctctgctgctgacgagctgtgtggtcctgggcagagtggtctccgagttccagtccctcctctgtaaaatgggcatgattagagtgcccaccgcattagggatgttggggtgagtcagtgtgaccccacgtgcacagaaagtgctgcgagtggtgcatggtgagaggttgatgcaggtacttagcccttggggaacacaggtagttccttttcactgtgtttaacttcgggaaaatccagatccacatcattgtagagtctgagggttagaaggaagtcattgtgtctaacataacaacagagcagtttgtgtcactgagctccagtctgtgctggattattgatattgttggtggcggtcaccattcctggaaagggactgtcccaagccacttaccttcccgaggagtctgctggttctccttgaggatagtgcttagataacagactcattaaacatttactgagtgtctgtcagggatcattcacatccacatcatcctcccggcccctccccgtgttgttcatggagggagtactggcggtccccattttcatgtatggagacttcaggtgaaagaagttaagtgaattctttgttgagtcacaaatcttgagccagtcagaatttgaacctaagatttttgactgctggttgtcacacttcccgccccacactcaactgttgtgtgaatgagccagacacattgcttaacctgagtccgagatggacaatggtataggaaagatattcggtatggagaatcagatgttaacttgtgttgctatttttgttttgttttgttttgttttgtttttgagacaaggtcttgctctgtcacccaggctagagtgcagtggcatgatcagggcttactgcagcctcaccctcgatttcctgggctcaagcaatcctcccacctcagcccccaagtagctgggcctacaggtgcgtgctaccacgcctggccaattttttaaattttagcacagatgaggtctcactatgttgcccgggctggtctcgaactcctgagctcaagggatcctcccgcctcagcctcccaaagtgctggtgttacaggcataagccaccacgcctggcctgtgttgctattatatttggcaggaacccagagtccagaacatttcatctatgatgggttagataatgtgtctagttgtttgcatgccaatttcagtagcctcagttattcaacctaggagatttttctacctctttactaccctgctgaagttgctcttcagcagaaaatctttgtggaacacattccacactttgaaatcttcgtggaacaaaagatatttgtggaaccaatctttgtggaacatattccagctttttgaatgagtgcatatccagtagtacctttaaagtaacactttgtacataacaaatactcagcaaatgtgaaactttatttgctcttacttcaaaattagtccaaaatgttggaaataaaatataagacattgatctagatatgaggtttttctccttcattctcagctgtcgaagaaatcaaagtagcatatgcacaaggttaaaaaccacatatacaaatactatagaacagcttataatgaaaaccttgcctgcctttataaaaaatgtgattatcttcttctgttaatgtcaataaaagatggtttgtcctagaaggtctataaatggtattatgttctggaggaaacctagcaaaaactttgctagtttagtacttgtctctaaattgatgttcacccatttcaatattgcacttattaatggtctttatttttctagcatagataacaattgattctttagattcatatatggaggtaattcttgctttctaaagaaaggaatatggcacattggaaccattttattcaccagtggatttacccttagagtatttttagatctgagctgatgacttgtgagagaaaaagggaacagagtaaagccatggaagccatgaacagtaagagactgccgcctggcatggtttcttcttctgcagaagatgaaactgaggagaaacaagacaacatccttcataccaggaatggtcaagataatgcaagaagaaaaaagctttcaaacaaatcagaaggcagtcaacaaacagaaagggggacattccttccctggcagttactcaaaactgaaattgcttattgtgtacaccggggcttgtacttggggaatttaataaaaatgctcattaccaagctaaaaaaaaaaaaaaaaaaaaaaaaaaaaaaaaaaaaaagagaaaagaaagaaggaggggagagaacaccaaaaagggcccaaagggggcgccaagcacaagtccaaggaggggggcaccaagggggccccgtagagaaaatggccaggcagacatgtgaccaaacttaaaaaccgagacaagacggggaaacaggggccaccacgcggagcaacaatgcaaaagggccactgcatcgagagacgggggggacacaaatgggcaccaaagaaaccctcagagaactagaggccaataaaaaattaaaaaagctccaagggagcaacaggtcaaaacaaccggcccaagaacagctcgaaagactggctagcgagagaaacttaaaagttagcg

SEQ ID NO: 316798 - DNA, 322 bp, Homo sapiens
accctatttcaaaaaaataaaaaataataattaatttaaaaaaaaaagacacagaacagtaatgtgtctattctctataaatcaaatagattatgaatcccaaggtcaaggatttaagcaaactcctaggacctgaacctcaaagtaatcattagaaaatcactagacttcaggccagacatggtggctcatgactgtaatctcagcactttgggaggctgtggtgagaggattggttgagactgggagttccaggctgcagtgagcagcaatcacaccactgcattccccccgggagacagtgagaccctgtctcagaaaa

SEQ ID NO: 316799 - DNA, 2719 bp, Homo sapiens
tctcgagacagagtctcgctctgtagcccaggctggagaacagtggcgcgatctcggctcactgcaacctccgcctcctgggtccaagagattctcctgcctcagcctcccgagtagctgggattacaggcgcgcgccaccccgcccggctaagtttttgtatttttagtagagacgggtggggggaggggggagggggtcaccatgttggccaggctactctcgaaatcgtgacctcgtgatccgcccgcctcggccttccaaagtgctaggattacaggcgtgagccaccactcccggccctgggtgctggttttcttcacctccgagtgaacagcagagggggctgttgggtgagggccagaagagttggggaggcacgagggcgtccagcgctgccctcactcaagatggcggccagagcctcgcgcttggtcgcgtggggcggtgcgtgagtgcttagctcacaggctccgggaccgcgctcgggggcggagcggatagtgggaaggggacgcgcgccctgcggcccggcctctagtcatcgccctcgcagcggcggccaacatcaccgccactgccacccctcccagactgtggacgggaggatggagtcgatggccgtcgctaccgacggcggggagaggccgggggtcccagcgggctcaggtctgtcggcttcccagcgtcgggcggagctgcgtcggagaaagctgctcatgaactcggaacagcgcatcaaccggatcatgggctttcacaggcccgggagcggcgcggaagaagaaagtcaaacaaaatcaaagcagcaggacagtgataaactgaactccctcagcgttccttccgtttcaaagcgagtagtgctgggtgattcagtcagtacaggaacaactgaccagcagggtggtgtggccgaggtaaaggggacccaactgggagacaaattggactcgttcattaaaccacctgagtgcagtagtgatgtcaaccttgagctccggcagcggaacagaggggacctgacagcggactcggtccagaggggttcccgccatggcctagagcagtacctttccagattcgaagaagcaatgaagctaaggaaacagctgattagtgaaaaacccagtcaagaggatggaaatacaacagaagaatttgactcttttcgaatatttagattggtgggatgtgctcttcttgctcttggagtcagagcttttgtttgcaaatacttgtccatatttgctccatttcttactttacaacttgcgtacatgggattatacaaatattttcccaagagtgaaaagaagataaagacaacagtactaacagctgcacttctattgtcgggaattcctgccgaagtgataaatcgatcaatggatacctatagcaaaatgggcgaagtcttcacagatctctgtgtctactttttcacttttatcttttgtcatgaactgcttgattattggggctctgaagtaccatgaagcctgtagaactgagaaggagaagcttacaaaaaaaaaaaaatcctcttctatattgcagtgtctctaaaggaggcaaattggtttacaccttcatgtaattcttttactttaggggttgtaaagctactttattagatatagaatggcagattctctgatttaaaagggctgagtttgtattattactgatatgaagaatagagtaccaatgtcattaattgatttttcttgttaatcagaattcctattctgtacctttcctctaacttctcagatttgtaattcttcttttgggagctgagctagtgcttttaggagaacagataaatgtggtctcagccagccctagagactgcttcttgtgtttgtgtcattctgtcctgagaaatgaagtcatctgaaaaataaaatgaaagaaactgaattgtctaatgttaactctgcacattgtaacttttcttgttgagttagtatcttaatttttactccagcacaagtatttaatcaaagaaaagattcatacatgtgaaattggaaggtatttataaaatttttattgctgtataccaaactcagaattggaactttttacatttgagtttcactttttagaagtatgttttaagcaagcaaaaacaaaatgggatgtgaagaattgaggcatgcaacccaatagcataaatgtcctttttccccccaaatatggtctagatgagttattataaacattgtttttatttttttgagacagagtttcgctcttgttgcccaggctagagtgcaatggcgccatctcggctcaccgcaacctccaccttcctggttcaagggattctcctgcctcagcctcccaagtagctgggattacaggcatgcaccaccacgcccagctaatttttatattctttagtaaagacagggtttctccatgttggtcaggctggtctcgaacttctgacctcaggtgatctgcccacctcggcctcccaaagtgctgggattacaggcgtgagccactgcacctggccttataaatatccttttaactaactcagtaactgccatattttgttgggttgtcttcttaaaagaatataagactaaagtgttaatgtcacttggtgttacatttccttacagatttttgtatagtctaatttggttaatccttgtgacattaaaaacacatacactttttaaaaaattaaaaaataagt

SEQ ID NO: 316800 - DNA, 1406 bp, Homo sapiens
  misc_feature (1387)..(1387): n is a, c, g, or t
tctcgagacagagtctcgctctgtagcccaggctggagaacagtggcgcgatctcggctcactgcaacctccgcctcctgggtccaagagattctcctgcctcagcctcccgagtagctgggattacaggcgcgcgccaccccgcccggctaagtttttgtatttttagtagagacgggtggggggaggggggagggggtcaccatgttggccaggctactctcgaaatcgtgacctcgtgatccgcccgcctcggccttccaaagtgctaggattacaggcgtgagccaccactcccggccctgggtgctggttttcttcacctccgagtgaacagcagagggggctgttgggtgagggccagaagagttggggaggcacgagggcgtccagcgctgccctcactcaagatggcggccagagcctcgcgcttggtcgcgtggggcggtgcgtgagtgcttagctcacaggctccgggaccgcgctcgggggcggagcggatagtgggaaggggacgcgcgccctgcggcccggcctctagtcatcgccctcgcagcggcggccaacatcaccgccactgccacccctcccagactgtggacgggaggatggagtcgatggccgtcgctaccgacggcggggagaggccgggggtcccagcgggctcaggtctgtcggcttcccagcgtcgggcggagctgcgtcggagaaagctgctcatgaactcggaacagcgcatcaaccggatcatgggctttcacaggcccgggagcggcgcggagtgaaaagaagataaagacaacagtactaacagctgcacttctattgtcgggaattcctgccgaagtgataaatcgatcaatggatacctatagcaaaatgggcgaagtcttcacagatctctgtgtctactttttcacttttatcttttgtcatgaactgcttgattattggggctctgaagtaccatgaagcctgtagaactgagaaggagaagcttacaaaaaaaaaaaaatcctcttctatattgcagtgtctctaaaggaggcaaattggtttacaccttcatgtaattcttttactttaggggttgtaaagctactttattagatatagaatggcagattctctgatttaaaagggctgagtttgtattattactgatatgaagaatagagtaccaatgtcattaattgatttttcttgttaatcagaattcctattctgtacctttcctctaacttctcagatttgtaattcttcttttgggagctgagctagtgcttttaggagaacagataaatgtggtctcagccagccctagagactgcttcttgtgtttgtgtcattctgtcctgagaaatgaagtcatctgaaaaataaaatngtggcctcgttggcctcaa

SEQ ID NO: 316801 - DNA, 1933 bp, Homo sapiens
  misc_feature (1914)..(1914): n is a, c, g, or t
tctcgagacagagtctcgctctgtagcccaggctggagaacagtggcgcgatctcggctcactgcaacctccgcctcctgggtccaagagattctcctgcctcagcctcccgagtagctgggattacaggcgcgcgccaccccgcccggctaagtttttgtatttttagtagagacgggtggggggaggggggagggggtcaccatgttggccaggctactctcgaaatcgtgacctcgtgatccgcccgcctcggccttccaaagtgctaggattacaggcgtgagccaccactcccggccctgggtgctggttttcttcacctccgagtgaacagcagagggggctgttgggtgagggccagaagagttggggaggcacgagggcgtccagcgctgccctcactcaagatggcggccagagcctcgcgcttggtcgcgtggggcggtgcgtgagtgcttagctcacaggctccgggaccgcgctcgggggcggagcggatagtgggaaggggacgcgcgccctgcggcccggcctctagtcatcgccctcgcagcggcggccaacatcaccgccactgccacccctcccagactgtggacgggaggatggagtcgatggccgtcgctaccgacggcggggagaggccgggggtcccagcgggctcaggtctgtcggcttcccagcgtcgggcggagctgcgtcggagaaagctgctcatgaactcggaacagcgcatcaaccggatcatgggctttcacaggcccgggagcggcgcggaagaagaaagtcaaacaaaatcaaagcagcaggacagtgataaactgaactccctcagcgttccttccgtttcaaagcgagtagtgctgggtgattcagtcagtacaggaacaactgaccagcagggtggtgtggccgaggtaaaggggacccaactgggagacaaattggactcgttcattaaaccacctgagtgcagtagtgatgtcaaccttgagctccggcagcggaacagaggggacctgacagcggactcggtccagaggggttcccgccatggcctagagcagtacctttccagattcgaagaagcaatgaagctaaggaaacagctgattagtgaaaaacccagtcaagaggatggaaatacaacagaagaatttgactcttttcgaatatttagattggtgggatgtgctcttcttgctcttggagtcagagcttttgtttgcaaatacttgtccatatttgctccatttcttactttacaacttgcgtacatgggattatacaaatattttcccaagagtgaaaagaagataaagacaacagtactaacagctgcacttctattgtcgggaattcctgccgaagtgataaatcgatcaatggatacctatagcaaaatgggcgaagtcttcacagatctctgtgtctactttttcacttttatcttttgtcatgaactgcttgattattggggctctgaagtaccatgaagcctgtagaactgagaaggagaagcttacaaaaaaaaaaaaatcctcttctatattgcagtgtctctaaaggaggcaaattggtttacaccttcatgtaattcttttactttaggggttgtaaagctactttattagatatagaatggcagattctctgatttaaaagggctgagtttgtattattactgatatgaagaatagagtaccaatgtcattaattgatttttcttgttaatcagaattcctattctgtacctttcctctaacttctcagatttgtaattcttcttttgggagctgagctagtgcttttaggagaacagataaatgtggtctcagccagccctagagactgcttcttgtgtttgtgtcattctgtcctgagaaatgaagtcatctgaaaaataaaatngtggcctcgttggcctcaa

SEQ ID NO: 316802 - DNA, 2258 bp, Homo sapiens
tctcgagacagagtctcgctctgtagcccaggctggagaacagtggcgcgatctcggctcactgcaacctccgcctcctgggtccaagagattctcctgcctcagcctcccgagtagctgggattacaggcgcgcgccaccccgcccggctaagtttttgtatttttagtagagacgggtggggggaggggggagggggtcaccatgttggccaggctactctcgaaatcgtgacctcgtgatccgcccgcctcggccttccaaagtgctaggattacaggcgtgagccaccactcccggccctgggtgctggttttcttcacctccgagtgaacagcagagggggctgttgggtgagggccagaagagttggggaggcacgagggcgtccagcgctgccctcactcaagatggcggccagagcctcgcgcttggtcgcgtggggcggtgcgtgagtgcttagctcacaggctccgggaccgcgctcgggggcggagcggatagtgggaaggggacgcgcgccctgcggcccggcctctagtcatcgccctcgcagcggcggccaacatcaccgccactgccacccctcccagactgtggacgggaggatggagtcgatggccgtcgctaccgacggcggggagaggccgggggtcccagcgggctcaggtctgtcggcttcccagcgtcgggcggagctgcgtcggagaaagctgctcatgaactcggaacagcgcatcaaccggatcatgggctttcacaggcccgggagcggcgcggtccatatttgctccatttcttactttacaacttgcgtacatgggattatacaaatattttcccaagagtgaaaagaagataaagacaacagtactaacagctgcacttctattgtcgggaattcctgccgaagtgataaatcgatcaatggatacctatagcaaaatgggcgaagtcttcacagatctctgtgtctactttttcacttttatcttttgtcatgaactgcttgattattggggctctgaagtaccatgaagcctgtagaactgagaaggagaagcttacaaaaaaaaaaaaatcctcttctatattgcagtgtctctaaaggaggcaaattggtttacaccttcatgtaattcttttactttaggggttgtaaagctactttattagatatagaatggcagattctctgatttaaaagggctgagtttgtattattactgatatgaagaatagagtaccaatgtcattaattgatttttcttgttaatcagaattcctattctgtacctttcctctaacttctcagatttgtaattcttcttttgggagctgagctagtgcttttaggagaacagataaatgtggtctcagccagccctagagactgcttcttgtgtttgtgtcattctgtcctgagaaatgaagtcatctgaaaaataaaatgaaagaaactgaattgtctaatgttaactctgcacattgtaacttttcttgttgagttagtatcttaatttttactccagcacaagtatttaatcaaagaaaagattcatacatgtgaaattggaaggtatttataaaatttttattgctgtataccaaactcagaattggaactttttacatttgagtttcactttttagaagtatgttttaagcaagcaaaaacaaaatgggatgtgaagaattgaggcatgcaacccaatagcataaatgtcctttttccccccaaatatggtctagatgagttattataaacattgtttttatttttttgagacagagtttcgctcttgttgcccaggctagagtgcaatggcgccatctcggctcaccgcaacctccaccttcctggttcaagggattctcctgcctcagcctcccaagtagctgggattacaggcatgcaccaccacgcccagctaatttttatattctttagtaaagacagggtttctccatgttggtcaggctggtctcgaacttctgacctcaggtgatctgcccacctcggcctcccaaagtgctgggattacaggcgtgagccactgcacctggccttataaatatccttttaactaactcagtaactgccatattttgttgggttgtcttcttaaaagaatataagactaaagtgttaatgtcacttggtgttacatttccttacagatttttgtatagtctaatttggttaatccttgtgacattaaaaacacatacactttttaaaaaattaaaaaataagt

SEQ ID NO: 316803 - DNA, 2192 bp, Homo sapiens
tctcgagacagagtctcgctctgtagcccaggctggagaacagtggcgcgatctcggctcactgcaacctccgcctcctgggtccaagagattctcctgcctcagcctcccgagtagctgggattacaggcgcgcgccaccccgcccggctaagtttttgtatttttagtagagacgggtggggggaggggggagggggtcaccatgttggccaggctactctcgaaatcgtgacctcgtgatccgcccgcctcggccttccaaagtgctaggattacaggcgtgagccaccactcccggccctgggtgctggttttcttcacctccgagtgaacagcagagggggctgttgggtgagggccagaagagttggggaggcacgagggcgtccagcgctgccctcactcaagatggcggccagagcctcgcgcttggtcgcgtggggcggtgcgtgagtgcttagctcacaggctccgggaccgcgctcgggggcggagcggatagtgggaaggggacgcgcgccctgcggcccggcctctagtcatcgccctcgcagcggcggccaacatcaccgccactgccacccctcccagactgtggacgggaggatggagtcgatggccgtcgctaccgacggcggggagaggccgggggtcccagcgggctcaggtctgtcggcttcccagcgtcgggcggagctgcgtcggagaaagctgctcatgaactcggaacagcgcatcaaccggatcatgggctttcacaggcccgggagcggcgcggagtgaaaagaagataaagacaacagtactaacagctgcacttctattgtcgggaattcctgccgaagtgataaatcgatcaatggatacctatagcaaaatgggcgaagtcttcacagatctctgtgtctactttttcacttttatcttttgtcatgaactgcttgattattggggctctgaagtaccatgaagcctgtagaactgagaaggagaagcttacaaaaaaaaaaaaatcctcttctatattgcagtgtctctaaaggaggcaaattggtttacaccttcatgtaattcttttactttaggggttgtaaagctactttattagatatagaatggcagattctctgatttaaaagggctgagtttgtattattactgatatgaagaatagagtaccaatgtcattaattgatttttcttgttaatcagaattcctattctgtacctttcctctaacttctcagatttgtaattcttcttttgggagctgagctagtgcttttaggagaacagataaatgtggtctcagccagccctagagactgcttcttgtgtttgtgtcattctgtcctgagaaatgaagtcatctgaaaaataaaatgaaagaaactgaattgtctaatgttaactctgcacattgtaacttttcttgttgagttagtatcttaatttttactccagcacaagtatttaatcaaagaaaagattcatacatgtgaaattggaaggtatttataaaatttttattgctgtataccaaactcagaattggaactttttacatttgagtttcactttttagaagtatgttttaagcaagcaaaaacaaaatgggatgtgaagaattgaggcatgcaacccaatagcataaatgtcctttttccccccaaatatggtctagatgagttattataaacattgtttttatttttttgagacagagtttcgctcttgttgcccaggctagagtgcaatggcgccatctcggctcaccgcaacctccaccttcctggttcaagggattctcctgcctcagcctcccaagtagctgggattacaggcatgcaccaccacgcccagctaatttttatattctttagtaaagacagggtttctccatgttggtcaggctggtctcgaacttctgacctcaggtgatctgcccacctcggcctcccaaagtgctgggattacaggcgtgagccactgcacctggccttataaatatccttttaactaactcagtaactgccatattttgttgggttgtcttcttaaaagaatataagactaaagtgttaatgtcacttggtgttacatttccttacagatttttgtatagtctaatttggttaatccttgtgacattaaaaacacatacactttttaaaaaattaaaaaataagt

SEQ ID NO: 316804 - DNA, 1471 bp, Homo sapiens
  misc_feature (27)..(28): n is a, c, g, or t
attaataatattatttaaaaaaaaaanngttgaaaaatttgcacatgttacgaagaacgagtgaaaagaagataaagacaacagtactaacagctgcacttctattgtcgggaattcctgccgaagtgataaatcgatcaatggatacctatagcaaaatgggcgaagtcttcacagatctctgtgtctactttttcacttttatcttttgtcatgaactgcttgattattggggctctgaagtaccatgaagcctgtagaactgagaaggagaagcttacaaaaaaaaaaaaatcctcttctatattgcagtgtctctaaaggaggcaaattggtttacaccttcatgtaattcttttactttaggggttgtaaagctactttattagatatagaatggcagattctctgatttaaaagggctgagtttgtattattactgatatgaagaatagagtaccaatgtcattaattgatttttcttgttaatcagaattcctattctgtacctttcctctaacttctcagatttgtaattcttcttttgggagctgagctagtgcttttaggagaacagataaatgtggtctcagccagccctagagactgcttcttgtgtttgtgtcattctgtcctgagaaatgaagtcatctgaaaaataaaatgaaagaaactgaattgtctaatgttaactctgcacattgtaacttttcttgttgagttagtatcttaatttttactccagcacaagtatttaatcaaagaaaagattcatacatgtgaaattggaaggtatttataaaatttttattgctgtataccaaactcagaattggaactttttacatttgagtttcactttttagaagtatgttttaagcaagcaaaaacaaaatgggatgtgaagaattgaggcatgcaacccaatagcataaatgtcctttttccccccaaatatggtctagatgagttattataaacattgtttttatttttttgagacagagtttcgctcttgttgcccaggctagagtgcaatggcgccatctcggctcaccgcaacctccaccttcctggttcaagggattctcctgcctcagcctcccaagtagctgggattacaggcatgcaccaccacgcccagctaatttttatattctttagtaaagacagggtttctccatgttggtcaggctggtctcgaacttctgacctcaggtgatctgcccacctcggcctcccaaagtgctgggattacaggcgtgagccactgcacctggccttataaatatccttttaactaactcagtaactgccatattttgttgggttgtcttcttaaaagaatataagactaaagtgttaatgtcacttggtgttacatttccttacagatttttgtatagtctaatttggttaatccttgtgacattaaaaacacatacactttttaaaaaattaaaaaataagt

SEQ ID NO: 316805 - DNA, 1482 bp, Homo sapiens
  misc_feature (37)..(37): n is a, c, g, or t
ttctttcaccctttatcctccatccacaacccctcgnggcgcctttatgatgacagcagcaaaagccttcagtgaaaagaagataaagacaacagtactaacagctgcacttctattgtcgggaattcctgccgaagtgataaatcgatcaatggatacctatagcaaaatgggcgaagtcttcacagatctctgtgtctactttttcacttttatcttttgtcatgaactgcttgattattggggctctgaagtaccatgaagcctgtagaactgagaaggagaagcttacaaaaaaaaaaaaatcctcttctatattgcagtgtctctaaaggaggcaaattggtttacaccttcatgtaattcttttactttaggggttgtaaagctactttattagatatagaatggcagattctctgatttaaaagggctgagtttgtattattactgatatgaagaatagagtaccaatgtcattaattgatttttcttgttaatcagaattcctattctgtacctttcctctaacttctcagatttgtaattcttcttttgggagctgagctagtgcttttaggagaacagataaatgtggtctcagccagccctagagactgcttcttgtgtttgtgtcattctgtcctgagaaatgaagtcatctgaaaaataaaatgaaagaaactgaattgtctaatgttaactctgcacattgtaacttttcttgttgagttagtatcttaatttttactccagcacaagtatttaatcaaagaaaagattcatacatgtgaaattggaaggtatttataaaatttttattgctgtataccaaactcagaattggaactttttacatttgagtttcactttttagaagtatgttttaagcaagcaaaaacaaaatgggatgtgaagaattgaggcatgcaacccaatagcataaatgtcctttttccccccaaatatggtctagatgagttattataaacattgtttttatttttttgagacagagtttcgctcttgttgcccaggctagagtgcaatggcgccatctcggctcaccgcaacctccaccttcctggttcaagggattctcctgcctcagcctcccaagtagctgggattacaggcatgcaccaccacgcccagctaatttttatattctttagtaaagacagggtttctccatgttggtcaggctggtctcgaacttctgacctcaggtgatctgcccacctcggcctcccaaagtgctgggattacaggcgtgagccactgcacctggccttataaatatccttttaactaactcagtaactgccatattttgttgggttgtcttcttaaaagaatataagactaaagtgttaatgtcacttggtgttacatttccttacagatttttgtatagtctaatttggttaatccttgtgacattaaaaacacatacactttttaaaaaattaaaaaataagt

SEQ ID NO: 316806 - DNA, 1481 bp, Homo sapiens
  misc_feature (57)..(57): n is a, c, g, or t
tttatttatattatatttaaaaaaaatttttaataattatcactctcacatggacanagcaaaagattcagtgaaaagaagataaagacaacagtactaacagctgcacttctattgtcgggaattcctgccgaagtgataaatcgatcaatggatacctatagcaaaatgggcgaagtcttcacagatctctgtgtctactttttcacttttatcttttgtcatgaactgcttgattattggggctctgaagtaccatgaagcctgtagaactgagaaggagaagcttacaaaaaaaaaaaaatcctcttctatattgcagtgtctctaaaggaggcaaattggtttacaccttcatgtaattcttttactttaggggttgtaaagctactttattagatatagaatggcagattctctgatttaaaagggctgagtttgtattattactgatatgaagaatagagtaccaatgtcattaattgatttttcttgttaatcagaattcctattctgtacctttcctctaacttctcagatttgtaattcttcttttgggagctgagctagtgcttttaggagaacagataaatgtggtctcagccagccctagagactgcttcttgtgtttgtgtcattctgtcctgagaaatgaagtcatctgaaaaataaaatgaaagaaactgaattgtctaatgttaactctgcacattgtaacttttcttgttgagttagtatcttaatttttactccagcacaagtatttaatcaaagaaaagattcatacatgtgaaattggaaggtatttataaaatttttattgctgtataccaaactcagaattggaactttttacatttgagtttcactttttagaagtatgttttaagcaagcaaaaacaaaatgggatgtgaagaattgaggcatgcaacccaatagcataaatgtcctttttccccccaaatatggtctagatgagttattataaacattgtttttatttttttgagacagagtttcgctcttgttgcccaggctagagtgcaatggcgccatctcggctcaccgcaacctccaccttcctggttcaagggattctcctgcctcagcctcccaagtagctgggattacaggcatgcaccaccacgcccagctaatttttatattctttagtaaagacagggtttctccatgttggtcaggctggtctcgaacttctgacctcaggtgatctgcccacctcggcctcccaaagtgctgggattacaggcgtgagccactgcacctggccttataaatatccttttaactaactcagtaactgccatattttgttgggttgtcttcttaaaagaatataagactaaagtgttaatgtcacttggtgttacatttccttacagatttttgtatagtctaatttggttaatccttgtgacattaaaaacacatacactttttaaaaaattaaaaaataagt

SEQ ID NO: 316807 - DNA, 1982 bp, Homo sapiens
tctcgagacagagtctcgctctgtagcccaggctggagaacagtggcgcgatctcggctcactgcaacctccgcctcctgggtccaagagattctcctgcctcagcctcccgagtagctgggattacaggcgcgcgccaccccgcccggctaagtttttgtatttttagtagagacgggtggggggaggggggagggggtcaccatgttggccaggctactctcgaaatcgtgacctcgtgatccgcccgcctcggccttccaaagtgctaggattacaggcgtgagccaccactcccggccctgggtgctggttttcttcacctccgagtgaacagcagagggggctgttgggtgagggccagaagagttggggaggcacgagggcgtccagcgctgccctcactcaagatggcggccagagcctcgcgcttggtcgcgtggggcggtgcgtgagtgcttagctcacaggctccgggaccgcgctcgggggcggagcggatagtgggaaggggacgcgcgccctgcggcccggcctctagtcatcgccctcgcagcggcggccaacatcaccgccactgccacccctcccagactgtggacgggaggatggagtcgatggccgtcgctaccgacggcggggagaggccgggggtcccagcgggctcaggtctgtcggcttcccagcgtcgggcggagctgcgtcggagaaagctgctcatgaactcggaacagcgcatcaaccggatcatgggctttcacaggcccgggagcggcgcggaagaagaaagtcaaacaaaatcaaagcagcaggacagtgataaactgaactccctcagcgttccttccgtttcaaagcgagtagtgctgggtgattcagtcagtacaggaacaactgaccagcagggtggtgtggccgaggtaaaggggacccaactgggagacaaattggactcgttcattaaaccacctgagtgcagtagtgatgtcaaccttgagctccggcagcggaacagaggggacctgacagcggactcggtccagaggggttcccgccatggcctagagcagtacctttccagattcgaagaagcaatgaagctaaggaaacagctgattagtgaaaaacccagtcaagaggatggaaatacaacagaagaatttgactcttttcgaatatttagattggtgggatgtgctcttcttgctcttggagtcagagcttttgtttgcaaatacttgtccatatttgctccatttcttactttacaacttgcgtacatgggattatacaaatattttcccaaggtaaattaattttttttctaaatttcgatgatgtgtttggattgatttatgactagctaattgaaggaacttaaaaatgttagtcctgcttacggtctgaatcagtgctactcaaagtgtggtttgcccacttatctccaaactatgtgtttgtgtttgttatacattaagttcaaaaaatgagtaattggccgggcgcagtggctcacgcctgtaatccccacactctaagaggctgaggtgggtggatcacctgaggtcaggagttcaagaccagcctggccaacatggtgcaaccccatctctgctaaaaatacaaaaattagccaggtatggtgacgcacacctgtaattccagctactcaggaggctgaggcaggagagttgctccaacccaggaggcagaggttgcagtgagccaagattgcgccactgcactgctccagtctgggtgacagagtgagactctgtctccaaaaaaaaaaaaaaaaaaagagtaattagaaacttttatagcaatttgacattgccataacattgttattctgttttacaaaaatactgtggattgaggtccttcatgaaaaagtgtgaatagtacttgtttaagcaaagtattaaatttaattagtaaatttagtaattcattttgtctataataaaggaaattaatta

SEQ ID NO: 316808 - DNA, 2205 bp, Homo sapiens
tctcgagacagagtctcgctctgtagcccaggctggagaacagtggcgcgatctcggctcactgcaacctccgcctcctgggtccaagagattctcctgcctcagcctcccgagtagctgggattacaggcgcgcgccaccccgcccggctaagtttttgtatttttagtagagacgggtggggggaggggggagggggtcaccatgttggccaggctactctcgaaatcgtgacctcgtgatccgcccgcctcggccttccaaagtgctaggattacaggcgtgagccaccactcccggccctgggtgctggttttcttcacctccgagtgaacagcagagggggctgttgggtgagggccagaagagttggggaggcacgagggcgtccagcgctgccctcactcaagatggcggccagagcctcgcgcttggtcgcgtggggcggtgcgtgagtgcttagctcacaggctccgggaccgcgctcgggggcggagcggatagtgggaaggggacgcgcgccctgcggcccggcctctagtcatcgccctcgcagcggcggccaacatcaccgccactgccacccctcccagactgtggacgggaggatggagtcgatggccgtcgctaccgacggcggggagaggccgggggtcccagcgggctcaggtctgtcggcttcccagcgtcgggcggagctgcgtcggagaaagctgctcatgaactcggaacagcgcatcaaccggatcatgggctttcacaggcccgggagcggcgcggaagaagaaagtcaaacaaaatcaaagcagcaggacagtgataaactgaactccctcagcgttccttccgtttcaaagcgagtagtgctgggtgattcagtcagtacaggaacaactgaccagcagggtggtgtggccgaggtaaaggggacccaactgggagacaaattggactcgttcattaaaccacctgagtgcagtagtgatgtcaaccttgagctccggcagcggaacagaggggacctgacagcggactcggtccagaggggttcccgccatggcctagagcagtacctttccagattcgaagaagcaatgaagctaaggaaacagctgattagtgaaaaacccagtcaagaggatggaaatacaacagaagaatttgactcttttcgaatatttagattggtgggatgtgctcttcttgctcttggagtcagagcttttgtttgcaaatacttgtccatatttgctccatttcttactttacaacttgcgtacatgggattatacaaatattttcccaaggtaaattaattttttttctaaatttcgatgatgtgtttggattgatttatgactagctaattgaaggaacttaaaaatgttagtcctgcttacggtctgaatcagtgctactcaaagtgtggtttgcccacttatctccaaactatgtgtttgtgtttgttatacattaagttcaaaaaatgagtaattggccgggcgcagtggctcacgcctgtaatccccacactctaagaggctgaggtgggtggatcacctgaggtcaggagttcaagaccagcctggccaacatggtgcaaccccatctctgctaaaaatacaaaaattagccaggtatggtgacgcacacctgtaattccagctactcaggaggctgaggcaggagagttgctccaacccaggaggcagaggttgcagtgagccaagattgcgccactgcactgctccagtctgggtgacagagtgagactctgtctccaaaaaaaaaaaaaaaaaaagagtaattagaaacttttatagcaatttgacattgccataacattgttattctgttttacaaaaatactgtggattgaggtccttcatgaaaaagtgtgaatagtacttgtttaagcaaagtattaaatttaattagtaaatttagtaattcattttgtctataataaaggaaattaattaaaaaatggatttgattatctcattgtacttcatattggacacttaatagcagtgcactttatcttcagtgttgagggcctgatatttgcaataaatatttggccaatattacagaacagaatgatgttgagagtcaatgtttacctggcctacttgactacagatatatacagttttatgaggcttggcttgcctgacatagacgatagcctaactagtgtga

SEQ ID NO: 316809 - DNA, 1212 bp, Homo sapiens
gctgagattgagccactgcactccagcctgggtgacagagcgagactccatcttaaaaaaaaaaagcaattgccaggcgcggtgtctcatacctgtaatcccagcatgttgggaggccgaggtgggtggatcacgaggtcaggagttctagaccatactggccaacatggtgaaaccctgtctctactaaaaatacaaaaattagccaggtgtggtggcgggcgcctgtaatcccatctactcagaaggctgaggcacgagcatcgcttgaatctgggaggtggatgttgccatgaaccaagatcgtgccactgcactcagcctgggtgacagaggaagactccgtctcaaaaaataataataacaacattttcttacagcttttgcttggaattttctagctgctgtttgatttattgtgatttgaatgattatgttggaaatatttaattttatcttctatcttcacagtccatatttgctccatttcttactttacaacttgcgtacatgggattatacaaatattttcccaaggtaaattaattttttttctaaatttcgatgatgtgtttggattgatttatgactagctaattgaaggaacttaaaaatgttagtcctgcttacggtctgaatcagtgctactcaaagtgtggtttgcccacttatctccaaactatgtgtttgtgtttgttatacattaagttcaaaaaatgagtaattggccgggcgcagtggctcacgcctgtaatccccacactctaagaggctgaggtgggtggatcacctgaggtcaggagttcaagaccagcctggccaacatggtgcaaccccatctctgctaaaaatacaaaaattagccaggtatggtgacgcacacctgtaattccagctactcaggaggctgaggcaggagagttgctccaacccaggaggcagaggttgcagtgagccaagattgcgccactgcactgctccagtctgggtgacagagtgagactctgtctccaaaaaaaaaaaaaaaaaaagagtaattagaaacttttatagcaatttgacattgccataacattgttattctgttttacaaaaatactgtggattgaggtccttcatgaaaaagtgtgaatagtacttgtttaagcaaagtattaaatttaattagtaaatttagtaattcattttgtctataataaaggaaattaatta

SEQ ID NO: 316810 - DNA, 1122 bp, Homo sapiens
accccgtctcaaaaatatatgtatgtgtatatatttgggggaaaaataacaatacaacaataacaaatagtaaataatacaaataaaaacagtataacaactatttacattgcattaggcataaaaaatctagaaatgatttaaagtatatgggaggaagtgagtaggttatatttactgtgccgttttacataagggacttgagcatctatggattttggtatcaggaggaacctggtaccagtcctctgctgatactgagggatgactgtactaaaacccatttttcattctacggacctttctcattgttttgcatacattaattcatctaatcctcattcttatgaacttggtattatgtgaatccattgggaaatgaagactcagagaggttaaaccatttgcccaaggtcacacagctactaagcggtgctaggattaaaccctggcagtttcagtccttaaccaaagggttaagcgctttacatatatatactgtatattatcaattttcaaataatttgaaatagtaaaatgcagttcctctggtcctgaatatgaggtaatcttcctatggttcagaagacatttcagcatttcctaatatatcataatgagtccattttggttgtaccatgatgtagtcattttgttttatagtatattaaagaatgcagaaaagcatagctcatagttcagtgtcttgctctgaggtttttccattcagtagacattttaagtatatgtaccaggcacataaatatccagataattaaagtttatatcattaagcaaaacagtttttgtaaatctttttttttttgaggtggagtttctttcgccaggctggagttgcagtgagccaagattgcgccactgcactgctccagtctgggtgacagagtgagactctgtctccaaaaaaaaaaaaaaaaaaagagtaattagaaacttttatagcaatttgacattgccataacattgttattctgttttacaaaaatactgtggattgaggtccttcatgaaaaagtgtgaatagtacttgtttaagcaaagtattaaatttaattagtaaatttagtaattcattttgtctataataaaggaaattaatta

SEQ ID NO: 316811 - DNA, 654 bp, Homo sapiens
cccgccatggcctagagcagtacctttccagattcgaagaagcaatgaagctaaggaaacagctgattagtgaaaaacccagtcaagaggatggaaatacaacagaagaatttgactcttttcgaatatttagattggtgggatgtgctcttcttgctcttggagtcagagcttttgtttgcaaatacttggtaagaaaagatctgtaaattattaactaacttaatggaaaatgcaaaatgttaataattatgagtgcttttgatcatagaagtcattgccagtattaatatctaccagatccatgtggctgtttgaagatatattattaactttgctattcatctcatagaatgaagtgttctggttaaatacagagcctaataattactgttggccctccatatcagttggttctgcaccctatgtggattcaaccaattgtggattgaaaatatttggatttagccgggcgtggtggtgcacgcctgtaatcccagttacttgggaggctgaggcaggagaatcgcttgaacccgggaggtggaggttgcagtgagccaggataacggcactgcactccagcctgggtgacagagtgagaccccgtctcaaaaatatatgtatgtgtatatatttgggggaaaaataaca

SEQ ID NO: 316812 - DNA, 4580 bp, Homo sapiens
  misc_feature (455)..(455): n is a, c, g, or t
  misc_feature (475)..(476): n is a, c, g, or t
  misc_feature (844)..(844): n is a, c, g, or t
  misc_feature (2105)..(2105): n is a, c, g, or t
aattgtcagcagagaagccaaacttcagtttgcctatcttgaaaattttaaaaccaaaatgaggagtacagtgtctgtgcgtgaaggccagggagttgtgctgctctgcggccccccaccacactctggagaactgtcatatgcttggatcttcaatgaatacccatcgtttgttgaagaagatagtcggagatttgtcaagaattagtcatcactcccaggagacagggcacctctacatatctaaggtggagccgtctgatgtgggaaattacacatgtgtggtgacaagtatggtgacaaatgcccgagtgctgggctctccaactcctttggtgctacgttctgatggtgtgatgggtgaatatgaacctaaaatagaagttcagtttccagaaactcttccagcagctaaaggttcgactgtgaaattggaatgttttgcccttggaaancccatacctcagattaattnnaaagaaggatgggctgccatttccagcaaaattaaattaaggaagttcagggtgtgcttgaaatccccaacttccaacaggaagatgcaggttcctatgaatgcattgctgagaattcacgaggaaaaaatgttgccagagggcgtctcacttactatgcaaagccccattgggttcaactcataaaggatgtggaaatagccgtggaggacagtctttattgggaatgcagggcaagcggcaagcccaagccttcctaccgatggctgaaaaatggagcagccctggtgctagaggagagaacacagatagaaaatggtgcccttacaatatcaaacctaagtgtgactgattctggcatgttccantgcatagcaaaaacaaacatggccttgttattccagtgctgcttctgctccagatttttcaaagaatccaatgaagaagttggttcaggtgcaggtgggcagcctggtcagcttggattgtaaacccagagcctccccaagggcactctcttcctggaagaagggggatgtgagcgtgcaggagcatgaaagaatttctttgttaaacgatggaggactcaaaatagccaatgtgactaaagctgatgctggaacttacacctgcatggcagaaaaccagtttgggaaagcaaatggcacaacacatttggttgttacggaaccaacaagaataactttggcaccatctaacatggatgtttctgttggtgaaagcgtcatattgccctgccaggtacaacatgacccgctgttagacatcatctttacctggtatttcaatggggcccttgcagattttaagaaagatggatctcactttgagaaagttggtgggagttcatctggtgatttaatgatcagaaacattcagctgaaacacagtgggaaatatgtttgtatggtgcaaacgggggtggacagtgtttcatctgctgctgacctcatagtaagaggttcacctggaccaccagaaaatgtgaaggtagatgaaattacagacacaacagcccaactctcttggaaagaaggtaaagacaaccatagcccagttatatcctattctatccaggctcggacacctttctccgtgggttggcaaaccgtcacaacagtgcctgaggtcatcgatgggaagacgcacacagccactgtagttgagttaaacccatgggtggaatatgaatttcgggttgtagccagtaacaaaattggaggtggagaaccaagtttaccctcagaaaaagtaagaactgaagaggcagttccagaagtgcctccttctgaagtcaatggaggaggcggaagccggtctgaacttgtgataacctgggatccagtccctgaagaactacagaatggtgaaggttttgggtatgttgttgctttccgccctcttggggttaccacctggatccagacagtggtgacatcccctgacaccccaagatatgtctttaggaatgaaagcatcgtgccatattcaccatatgaagttaaagtgggtgtttataataacaaaggtgaaggaccatttagcccagtgacaacagtgttctctgcagaagaagagcctacagtggccccatctcaagtctctgcnaatagcctatcttcctcagaaattgaggtttcatggaacaccattccttggaagttgagcaatggacatttactgggctatgaggtgcggtactggaatgggggtggaaaggaggaatcatccagtaagatgaaagtggcaggaaatgagacatcagccagactacggggcctgaagagcaacctggcctattacacggctgtccgggcttacaacagtgccggcgctgggccttttagcgccacagttaatgtaaccaccaagaaaacgcctcccagtcagccaccaggaaatgttgtttggaatgccacagacactaaagtgttacttaattgggagcaagttaaagccatggagaatgagtcagaagtaacaggatataaagttttctataggactagcagtcaaaataacgtacaagtactgaacacaaataaaacttcagctgaacttgtgctgcccattaaagaggactacattattgaagtcaaggccacaacagatggaggggatgggaccagtagtgaacagatcaggattccacgaataaccagtatggatgcaagaggatccacttcagccatctcgaatgtccaccctatgtcaagttatatgcctatagtactgttcttaattgtatatgtcctgtggtgatattaactcctttttattatttattggaaagttatttggttaccaaaaaaagtgctttcatgaaatgcagtgattatgcatgtttttttcaactcttatttttaactttctacttcattataggtaaatatgaatataattaaaaaaacagtaaatccttttaggggaatctgaaatgccttaatattaacttgataaaccaaaggaatttacatattacatacttcagacttttgatataaatgttcttaaactatgagtttaagcactgcctatggataaagactcacacactctcacatgtacacacacacgcatgagaatttctttttacattgaaaaactctttcatttaattcaaatgctattttcccattataatagcattatttggaagacttaaccagtatcaatttgaaatgctgatttaagtccccaaggatgaaaaatacattttaaaaattattttgttggagaggagtggcatgtgattcaaaagagcattgttggaaaatgctactgtggggcttagaagaatgatgtttggtttggtatgctgctaactagttgtaagactttacaaatcactttgccatctgtacctctcaattattcctctataaaatatggagataataatacctatctgatcagactttgccccatgaattagtttttaaaagataaagactgaagtatgaaagtgcttttgtcaccccaaatgcaattgacccatgcaaaatattagcatgaatttatttaatcacataaaagtcatgaagaccagccagattttcaagcttcattctgtttcattcagttatattccaaaattcaaatgatcacattttattctttctcaaaaaaaaaaagtttttttaaattaaaaaaggaattgtttccttcacagctatgaataagctttcaggttttattaaaacctagaggaaaaaatcaggaatgacctgaatctcaacccaaatattaaacaaaatccacataatccctcatttcaatttccaattccattaagggaccctctctttttggatggcagagatggttttttaatgaaatcccaccatctatctgagtgagtctggcaggctttttagttcctgagttaaatttgtaatagaaccaaggcaatgctgctgactttgatatgtatgactcagtctttcaatatgtggttttcaaaaaattgttgaagacgtgacttcatagcaatatatagagaataaattaaaatcagcagattgagttttcaacattgcaaaatcagttttttacctctttcctaccaatttcacattttgcagaaacttgttcacatttccaacaatatcagaattagaaaacagttcagataacaagaaagattaaaaattagggaaattctgatatcaccataaagcactattttacatttagagattacatttaagataaagtcatcatacacaaaaacaataaatatttataactttctctataaggtccgcatatactgtatatattgaaacaatctgaatgactagtagatttcatatgaccattgttatttccactttctccaatacttgtattttatgctacatgtaatgaagttggacctttttattatttagtaattcctatatgttcctatacttttcattttcaagatgattgctctattgtttcatgttgtttctagcaatatatctccatgagatatgcactttgtttcatattgaaaagtataaaatttatctttcaattcctgtgtgtgtatcctatggttatctgtatgtattattttctattctaataaaattt

SEQ ID NO: 316813 - DNA, 333 bp, Homo sapiens
ttggaagtaaagttgatgtttgtatagatacattaaggacacaatggaaaactgtccttaatgatggaatttctttctctcttcaacaattttattagaactgtcatatgcttggatcttcaatgatgaactaacatctattgaagaattagtcatcactcccaggagacagggcacctctacatatctaaggtggagccgtctgatgtgggaaattacacatgtgtggtgacaagtatggtgacaaatgcccgagtgctgggctctccaactcctttggtgctacgttctgatggtaatgaaacttctccaagtgcacttctgagcgtaaat

SEQ ID NO: 316814 - DNA, 848 bp, Homo sapiens
ctctgcttctcgggtagctgggattacgggcgtgtgccaccacgcccggctactttttggatttttagtagaaatagggtttcaccatgttagccaggctggtctcgaactgctgacctcaggtgatctgcctgcctcggcctcccaaagtgctgggattacaggcgtgagccattgcgcctggccagaaaaatacctttaaaaagctgggcctgttggtgtacctaaaggataatacagatgttcctctcaacttagcatggggttgtgtctcaataaacccatttttaagttgaaaacgttaagtggaaaatgcatttattatacctaacctactagacctcgtagtttagcctcccttaccctacaggtgctcagaacacttagtagcctacagttgagcagtcatctaacacaaaacctattttatagtaaagtgttgaatatctcaagtaatttattgatgttccactgaatgcgaatcacttttgcaccgttgttaagttgaaccattgtatgtttgtgaccatctgtacttgtaatttctttacattcattggtatgaaaaatatgttcttagaagcaggaaaaagaattcagttttgctttgtatactaaattagatgctgtaattttgataaaatgaaaaatctgctttatttgcaacaattgttttcttccttgacgtcagcctcactcttggactttgctactcagcctgtcacccctgtgaattcccatgaggttgacagtgtaaacctgctctaagttttcactttgcactgtgtaccaaaatgaaactgcttatttaggaaaataaaaatatcttttgtgttggacaaaataca

SEQ ID NO: 316815 - DNA, 1870 bp, Homo sapiens
tcggtcccgcgccctccgggctcgcagggacgtctcctccctcccggctcgcggccccgcccggcccggcccccgcccagagccccagcgcgccgaggatgtgagtcctgctcgcctctggcggagcagcagccactcgcgcgcggagccggagcgcagcgcagcgcagccgcgggcgctctccgggccgctcgcgcgagtgccgcgctcttgccctagcggcgtcccccggcctctcgccggcgccaccgccgcagcagcccgcgggccgtccccggccggccgcccccggccccagcgccgctgaccctgtccgccgcgggcggggacgcgggcggaggaggcgccgcggcggagcccccggacgcgaccatgtcggaggtgctgccctacggcgacgagaagctgagcccctacggcgacggcggcgacgtgggccagatcttctcctgccgcctgcaggacaccaacaacttcttcggcgccgggcagaacaagcggccgcccaagctgggccagatcggccggagcaagcgggttgttattgaagatgataggattgatgacgtgctgaaaaatatgaccgacaaggcacctcctggtgtctaactcccccaaagacaatgagttaagggagagaataagaacggcggtaacagttattggcaaaaagcatgaaaagagaaagcactttgaaatttattactagcttgctacccacgatgaaatcaacaacctgtatctggtatcaggccgggagacagatgaggcgagaggaggaggaggaggaggagaaggctctgggctcctctgcaaaaataaaaataaaaaaataaataaaattttaaaaataataaaaattcactatatacacatataaagaaataaaaagaagtctcagttgcagctatttgtcaaaattaatatccatttctttttatatacggtgaatattgcgcaattatagatctggattttgaaccacttaatgaagcggcaacaccaggtgttttgaggtgttggcattcttcgctgatttggctgttcccaatgtttacattatttaatcttgcaaaaatggttctgtgcacttggatgtgaaatgctgtccagttttattttttttatgttgttatccttggatgtacaaaaaattcagaaaatgatctctgtagatattctgttttattttggtcatctttagaagttatcaggaatgtgtttaaaacaagaagagaacttttctaaggaatgatacatagaaaagattttattttaaaatgagttgtaaagcttgtgtttctttgttgctgcaagctatctgcccaagttaatgcaaatggacacattttttatgtcagaaaaacacacacacacacacacacacacacacacacacacacacacgaaaaacaaagaaaaaaatgcttgagctttttctaacttccccttgcagtctgttgtgtgagcagcctgtttatttctctaatattatgtcagtttattctctttaatggactgtaaaaaaatgtaatcacaagagtgccaaatatcttgaaatgccaaaaggcattttagtttcttttctctgtgctctgagtccacgtacaggaatgcttggagtgtcttttctgttatttatagggattctcttaaggcacaccagctgcctgttttgcatggtatttgcaaaaatgcctcttgcgtgaggaaatcttttaccattttttgtttgcaactttggacctcaagaggtttcccttcccttccccgttccctcttttcttaattcaatattctgtatgttgcaccttgaaccagcacacagggctatttctccaatgtacaataaaagaattgttcctgtgtc

SEQ ID NO: 316816 - DNA, 1598 bp, Homo sapiens
gcagagagagactgagacgcagggatggaggggagggggtacgcgggagaccgagggtggcagagaccgagacaaagctcccgagaggggagctgaagcgggagagacagagccgaggacgcgcgtttggggaggacgcagaagccgccgaaacaataagggcgaccgacaccttagacagggagagacagagacctcgatcggctgccggccgtcgcgccgagggacgatggagggactgagaaaggcgaggctaagtcgagacgttgttattgaagatgataggattgatgacgtgctgaaaaatatgaccgacaaggcacctcctggtgtctaactcccccaaagacaatgagttaagggagagaataagaacggcggtaacagttattggcaaaaagcatgaaaagagaaagcactttgaaatttattactagcttgctacccacgatgaaatcaacaacctgtatctggtatcaggccgggagacagatgaggcgagaggaggaggaggaggaggagaaggctctgggctcctctgcaaaaataaaaataaaaaaataaataaaattttaaaaataataaaaattcactatatacacatataaagaaataaaaagaagtctcagttgcagctatttgtcaaaattaatatccatttctttttatatacggtgaatattgcgcaattatagatctggattttgaaccacttaatgaagcggcaacaccaggtgttttgaggtgttggcattcttcgctgatttggctgttcccaatgtttacattatttaatcttgcaaaaatggttctgtgcacttggatgtgaaatgctgtccagttttattttttttatgttgttatccttggatgtacaaaaaattcagaaaatgatctctgtagatattctgttttattttggtcatctttagaagttatcaggaatgtgtttaaaacaagaagagaacttttctaaggaatgatacatagaaaagattttattttaaaatgagttgtaaagcttgtgtttctttgttgctgcaagctatctgcccaagttaatgcaaatggacacattttttatgtcagaaaaacacacacacacacacacacacacacacacacacacacacacgaaaaacaaagaaaaaaatgcttgagctttttctaacttccccttgcagtctgttgtgtgagcagcctgtttatttctctaatattatgtcagtttattctctttaatggactgtaaaaaaatgtaatcacaagagtgccaaatatcttgaaatgccaaaaggcattttagtttcttttctctgtgctctgagtccacgtacaggaatgcttggagtgtcttttctgttatttatagggattctcttaaggcacaccagctgcctgttttgcatggtatttgcaaaaatgcctcttgcgtgaggaaatcttttaccattttttgtttgcaactttggacctcaagaggtttcccttcccttccccgttccctcttttcttaattcaatattctgtatgttgcaccttgaaccagcacacagggctatttctccaatgtacaataaaagaattgttcctgtgtc

SEQ ID NO: 316817 - DNA, 1356 bp, Homo sapiens
ccagatcggtctggagcaagcgggttgttattgaagatgataggattgatgacgtgctgaaaaatatgaccgacaaggcacctcctggtgtctaactcccccaaagacaatgagttaagggagagaataagaacggcggtaacagttattggcaaaaagcatgaaaagagaaagcactttgaaatttattactagcttgctacccacgatgaaatcaacaacctgtatctggtatcaggccgggagacagatgaggcgagaggaggaggaggaggaggagaaggctctgggctcctctgcaaaaataaaaataaaaaaataaataaaattttaaaaataataaaaattcactatatacacatataaagaaataaaaagaagtctcagttgcagctatttgtcaaaattaatatccatttctttttatatacggtgaatattgcgcaattatagatctggattttgaaccacttaatgaagcggcaacaccaggtgttttgaggtgttggcattcttcgctgatttggctgttcccaatgtttacattatttaatcttgcaaaaatggttctgtgcacttggatgtgaaatgctgtccagttttattttttttatgttgttatccttggatgtacaaaaaattcagaaaatgatctctgtagatattctgttttattttggtcatctttagaagttatcaggaatgtgtttaaaacaagaagagaacttttctaaggaatgatacatagaaaagattttattttaaaatgagttgtaaagcttgtgtttctttgttgctgcaagctatctgcccaagttaatgcaaatggacacattttttatgtcagaaaaacacacacacacacacacacacacacacacacacacacacacgaaaaacaaagaaaaaaatgcttgagctttttctaacttccccttgcagtctgttgtgtgagcagcctgtttatttctctaatattatgtcagtttattctctttaatggactgtaaaaaaatgtaatcacaagagtgccaaatatcttgaaatgccaaaaggcattttagtttcttttctctgtgctctgagtccacgtacaggaatgcttggagtgtcttttctgttatttatagggattctcttaaggcacaccagctgcctgttttgcatggtatttgcaaaaatgcctcttgcgtgaggaaatcttttaccattttttgtttgcaactttggacctcaagaggtttcccttcccttccccgttccctcttttcttaattcaatattctgtatgttgcaccttgaaccagcacacagggctatttctccaatgtacaataaaagaattgttcctgtgtc

SEQ ID NO: 316818 - DNA, 1313 bp, Homo sapiens
gtctagaggagtcccccctacgttgctcgacaaggcacctcctggtgtctaactcccccaaagacaatgagttaagggagagaataagaacggcggtaacagttattggcaaaaagcatgaaaagagaaagcactttgaaatttattactagcttgctacccacgatgaaatcaacaacctgtatctggtatcaggccgggagacagatgaggcgagaggaggaggaggaggaggagaaggctctgggctcctctgcaaaaataaaaataaaaaaataaataaaattttaaaaataataaaaattcactatatacacatataaagaaataaaaagaagtctcagttgcagctatttgtcaaaattaatatccatttctttttatatacggtgaatattgcgcaattatagatctggattttgaaccacttaatgaagcggcaacaccaggtgttttgaggtgttggcattcttcgctgatttggctgttcccaatgtttacattatttaatcttgcaaaaatggttctgtgcacttggatgtgaaatgctgtccagttttattttttttatgttgttatccttggatgtacaaaaaattcagaaaatgatctctgtagatattctgttttattttggtcatctttagaagttatcaggaatgtgtttaaaacaagaagagaacttttctaaggaatgatacatagaaaagattttattttaaaatgagttgtaaagcttgtgtttctttgttgctgcaagctatctgcccaagttaatgcaaatggacacattttttatgtcagaaaaacacacacacacacacacacacacacacacacacacacacacgaaaaacaaagaaaaaaatgcttgagctttttctaacttccccttgcagtctgttgtgtgagcagcctgtttatttctctaatattatgtcagtttattctctttaatggactgtaaaaaaatgtaatcacaagagtgccaaatatcttgaaatgccaaaaggcattttagtttcttttctctgtgctctgagtccacgtacaggaatgcttggagtgtcttttctgttatttatagggattctcttaaggcacaccagctgcctgttttgcatggtatttgcaaaaatgcctcttgcgtgaggaaatcttttaccattttttgtttgcaactttggacctcaagaggtttcccttcccttccccgttccctcttttcttaattcaatattctgtatgttgcaccttgaaccagcacacagggctatttctccaatgtacaataaaagaattgttcctgtgtc

SEQ ID NO: 316819 - DNA, 1327 bp, Homo sapiens
tcggtcccgcgccctccgggctcgcagggacgtctcctccctcccggctcgcggccccgcccggcccggcccccgcccagagccccagcgcgccgaggatgtgagtcctgctcgcctctggcggagcagcagccactcgcgcgcggagccggagcgcagcgcagcgcagccgcgggcgctctccgggccgctcgcgcgagtgccgcgctcttgccctagcggcgtcccccggcctctcgccggcgccaccgccgcagcagcccgcgggccgtccccggccggccgcccccggccccagcgccgctgaccctgtccgccgcgggcggggacgcgggcggaggaggcgccgcggcggagcccccggacgcgaccatgtcggaggtgctgccctacggcgacgagaagctgagcccctacggcgacggcggcgacgtgggccagatcttctcctgccgcctgcaggacaccaacaacttcttcggcgccgggcagaacaagcggccgcccaagctgggccagatcggccggagcaagcgggttgttattgaagatgataggattgatgacgtgctgaaaaatatgaccgacaaggcacctcctggtgtctaactcccccaaagacaatgagttaagggagagaataagaacggcggtaacagttattggcaaaaagcatgaaaagagaaagcactttgaaatttattactagcttgctacccacgatgaaatcaacaacctgtatctggtatcaggccgggagacagatgaggcgagaggaggaggaggaggaggagaaggctctgggctcctctgcaaaaataaaaataaaaaaataaataaaattttaaaaataataaaaattcactatatacacatataaagaaataaaaagaagtctcagttgcagctatttgtcaaaattaatatccatttctttttatatacggtgaatattgcgcaattatagatctggattttgaaccacttaatgaagcggcaacaccaggtgttttgaggtgttggcattcttcgctgatttggctgttcccaatgtttacattatttaatcttgcaaaaatggttctgtgcacttggatgtgaaatgctgtccagttttatacaataagggaaaaatatgtaagcgatcatgggaagcacagacaatgcagaaaatgatccctgatagatatgcagttgtacgccgtgttaattgggaggacagaaatccaacacatattatttaacaagacagatgatctttactaaggaatagatacatacataagagttttacctaacaatagcgatatgcagcgcagtttctttg

SEQ ID NO: 316820 - DNA, 1178 bp, Homo sapiens
tcggtcccgcgccctccgggctcgcagggacgtctcctccctcccggctcgcggccccgcccggcccggcccccgcccagagccccagcgcgccgaggatgtgagtcctgctcgcctctggcggagcagcagccactcgcgcgcggagccggagcgcagcgcagcgcagccgcgggcgctctccgggccgctcgcgcgagtgccgcgctcttgccctagcggcgtcccccggcctctcgccggcgccaccgccgcagcagcccgcgggccgtccccggccggccgcccccggccccagcgccgctgaccctgtccgccgcgggcggggacgcgggcggaggaggcgccgcggcggagcccccggacgcgaccatgtcggaggtgctgccctacggcgacgagaagctgagcccctacggcgacggcggcgacgtgggccagatcttctcctgccgcctgcaggacaccaacaacttcttcggcgccgggcagaacaagcggccgcccaagctgggccagatcggccggagcaagcgggttgttattgaagatgataggattgatgacgtgctgaaaaatatgaccgacaaggcacctcctggtgtctaactcccccaaagacaatgagttaagggagagaataagaacggcggtaacagttattggcaaaaagcatgaaaagagaaagcactttgaaatttattactagcttgctacccacgatgaaatcaacaacctgtatctggtatcaggccgggagacagatgaggcgagaggaggaggaggaggaggagaaggctctgggctcctctgcaaaaataaaaataaaaaaataaataaaattttaaaaataataaaaattcactatatacacatataaagaaataaaaagaagtctcagttgcagctatttgtcaaaattaatatccatttctttttatatacggtgaatattgcgcaattatagatctggattttgaaccacttaatgaagcggcaacaccaggtgttttgaggtgttggcattcttcgctgatttggctgttcccaatgtttacattatttaatcttgcaaaaatggttctgtgcacttggatgtgaaatgctgtccagttttattgtacatccaaggataacaacataaaaaaaataaaactggacagcatttcacatccaag

SEQ ID NO: 316821 - DNA, 978 bp, Homo sapiens
tcggtcccgcgccctccgggctcgcagggacgtctcctccctcccggctcgcggccccgcccggcccggcccccgcccagagccccagcgcgccgaggatgtgagtcctgctcgcctctggcggagcagcagccactcgcgcgcggagccggagcgcagcgcagcgcagccgcgggcgctctccgggccgctcgcgcgagtgccgcgctcttgccctagcggcgtcccccggcctctcgccggcgccaccgccgcagcagcccgcgggccgtccccggccggccgcccccggccccagcgccgctgaccctgtccgccgcgggcggggacgcgggcggaggaggcgccgcggcggagcccccggacgcgaccatgtcggaggtgctgccctacggcgacgagaagctgagcccctacggcgacggcggcgacgtgggccagatcttctcctgccgcctgcaggacaccaacaacttcttcggcgccgggcagaacaagcggccgcccaagctgggccagatcggccggagcaagcgggttgttattgaagatgataggattgatgacgtgctgaaaaatatgaccgacaaggcacctcctggtgtctaactcccccaaagacaatgagttaagggagagaataagaacggcggtaacagttattggcaaaaagcatgaaaagagaaagcactttgaaatttattactagcttgctacccacgatgaaatcaacaacctgtatctggtatcaggccgggagacagatgaggcgagaggaggaggaggaggaggagaaggctctgggctcctctgcaaaaataaaaataaaaaaataaataaaattttaaaaataataaaaattcactatatacacatataaagaaataaaaagaagtctcagttgcagctatttgtcgagggatcttgaactggtcagagaagaggaagaggaaatgaaggtcgttgtcgagcacgtag

SEQ ID NO: 316822 - DNA, 2337 bp, Homo sapiens
tcggtcccgcgccctccgggctcgcagggacgtctcctccctcccggctcgcggccccgcccggcccggcccccgcccagagccccagcgcgccgaggatgtgagtcctgctcgcctctggcggagcagcagccactcgcgcgcggagccggagcgcagcgcagcgcagccgcgggcgctctccgggccgctcgcgcgagtgccgcgctcttgccctagcggcgtcccccggcctctcgccggcgccaccgccgcagcagcccgcgggccgtccccggccggccgcccccggccccagcgccgctgaccctgtccgccgcgggcggggacgcgggcggaggaggcgccgcggcggagcccccggacgcgaccatgtcggaggtgctgccctacggcgacgagaagctgagcccctacggcgacggcggcgacgtgggccagatcttctcctgccgcctgcaggacaccaacaacttcttcggcgccgggcagaacaagcggccgcccaagctgggccagatcggccggagcaagcgggttgttattgaagatgataggattgatgacgtgctgaaaaatatgaccgacaaggcacctcctggtgtctaactcccccaaagacaatgagttaagggagagaataagaacggcggtaacagttattggcaaaaagcatgaaaagagaaagcactttgaaatttattactagcttgctacccacgatgaaatcaacaacctgtatctggtatcaggccgggagacagatgaggcgagaggaggaggaggaggaggagaaggctctgggctcctctgcaaaaataaaaataaaaaaataaataaaattttaaaaataataaaaattcactatatacacatataaagaaataaaaagaagtctcagttgcagctatttgtcaaaattaatatccatttctttttatatacggtgaatattgcgcaattatagatctggattttgaaccacttaatgaagcggcaacaccaggtgttttgaggtgttggcattcttcgctgatttggctgttcccaatgtttacattatttaatcttgcaaaaatggttctgtgcacttggatgtgaaatgctgtccagttttattttttttatgttgttatccttggatgtacaaaaaattcagaaaatgatctctgtagatattctgttttattttggtcatctttagaagttatcaggaatgtgtttaaaacaagaagagaacttttctaaggaatgatacatagaaaagattttattttaaaatgagttgtaaagcttgtgtttctttgttgctgcaagctatctgcccaagttaatgcaaatggacacattttttatgtcagaaaaacacacacacacacacacacacacacacacacacacacacacgaaaaacaaagaaaaaaatgcttgagctttttctaacttccccttgcagtctgttgtgtgagcagcctgtttatttctctaatattatgtcagtttattctctttaatggactgtaaaaaaatgtaatcacaagagtgccaaatatcttgaaatgccaaaaggcattttagtttcttttctctgtgctctgagtccacgtacaggaatgcttggagtgtcttttctgttatttatagggattctcttaaggcacaccagctgcctgttttgcatggtatttgcaaaaatgcctcttgcgtgaggaaatcttttaccattttttgtttgcaactttggacctcaagaggtttcccttcccttccccgttccctcttttcttaattcaatattctgtatgttgcaccttgaaccagcacacagggctatttctccaatgtacaataaaagaattgttcctgtgtcaaaaaaaaaaaaaaaaaaaaaaaaaaaaaaaaaaaaaaaaaaaaagaaacgagaaaaaaaaaaactaaaagaaacaatagaaacacagagggggcgggagcgcgcttaatatagtaatcaatccccgggaagcgcggccaccataatagcgcagacaccgcgactttttctgaaagaaaaggaggcgccaccgacctagatgagcgccaactaaaaaacacagatagagacgaccgccaggcgtataaaacacaaagactagagagggaaaaaaacctgctcgaccgcaggagcactaggaagaagacccccccatccgggggcggggcaacaaaacggggcaaacaccgtcccaaggaggacgacgccagcagcagaaaataaaccacatgaggtgttaaggggccacacaaccgcatagctcgcgaaagaagctcgcaccagcgattaactgcaaactatacggg

SEQ ID NO: 316823 - DNA, 1436 bp, Homo sapiens
tcggtcccgcgccctccgggctcgcagggacgtctcctccctcccggctcgcggccccgcccggcccggcccccgcccagagccccagcgcgccgaggatgtgagtcctgctcgcctctggcggagcagcagccactcgcgcgcggagccggagcgcagcgcagcgcagccgcgggcgctctccgggccgctcgcgcgagtgccgcgctcttgccctagcggcgtcccccggcctctcgccggcgccaccgccgcagcagcccgcgggccgtccccggccggccgcccccggccccagcgccgctgaccctgtccgccgcgggcggggacgcgggcggaggaggcgccgcggcggagcccccggacgcgaccatgtcggaggtgctgccctacggcgacgagaagctgagcccctacggcgacggcggcgacgtgggccagatcttctcctgccgcctgcaggacaccaacaacttcttcggcgccgggcagaacaagcggccgcccaagctgggccagatcggccggagcaagcgggttgttattgaagatgataggattgatgacgtgctgaaaaatatgaccgacaaggcacctcctggtgtctaactcccccaaagacaatgagttaagggagagaataagaacggcggtaacagttattggcaaaaagcatgaaaagagaaagcactttgaaatttattactagcttgctacccacgatgaaatcaacaacctgtatctggtatcaggccgggagacagatgaggcgagaggaggaggaggaggaggagaaggctctgggctcctctgcaaaaataaaaataaaaaaataaataaaattttaaaaataataaaaattcactatatacacatataaagaaataaaaagaagtctcagttgcagctatttgtcaaaattaatatccatttctttttatatacggtgaatattgcgcaattatagatctggattttgaaccacttaatgaagcggcaacaccaggtgttttgaggtgttggcattcttcgctgatttggctgttcccaatgtttacattatttaatcttgcaaaaatggttctgtgcacttggatgtgaaatgctgtccagttttattttttttatgttgttatccttggatgtacaaaaaattcagaaaatgatctctgtagatattctgttttattttggtcatctttagaagttatcaggaatgtgtttaaaacaagaagagaacttttctaaggaatgatacatagaaaagattttattttaaaatgagttgtaaagcttgtgtttctttgttgctgcaagctatctgcccaagttaatgcaaatggacacattttttatgtcagaaaaacacacacacacacacataatattttaatacactgacatcttatttgacccaaaacaaaaaaaaatggtgg

SEQ ID NO: 316824 - DNA, 203 bp, Homo sapiens
ggacttctggaatccatctgcaaggaatgccagctggtggctcttaaatacccagaaacctaacaaagagtactggacaatgtggaaacttaagaagtgggacaacataggcactaccagctatcggggtgtaagagaggggagttatgggtgaattgcattcagtgaaggcttcacagaggaagagaaggtgaacctgagtc

SEQ ID NO: 316825 - DNA, 393 bp, Homo sapiens
tggggacagagaagtcctagccccagatctcccagggctgctgggcgtatcacaatacctaatttttatcgaaagtttattctgtgccagacactttctaaattctctatatcagttcatcctcctaacaaccctctaaaacaaatgctattattatctccactttagacagaaggaagtaaggtcaaagaggttaaataacttgctcagggttagccgtctataatcccggttgggcaaggattcaaaataggggtgtctattgcaggagcctgtcctctgaaccacagtgctgtgattcctctggggatccccatttgagttcatggcactggcatccttccagttccttcaaacatcagcattgccatccatccttcccaccactcacca

SEQ ID NO: 316826 - DNA, 219 bp, Homo sapiens
cttgttgggaggccggagttgggcctggagacgcagccgggaggaagagctgggcccggagaggacgccgggaggctgcaagtgggtctggagaggccaacttgaggaggcccagcctctgcctcccgcatggcggcctctgcaggcccagctgttcctcctggctgcatctcccggcccagctcctgcctcccagcaagcaagctctttcggctcagc

SEQ ID NO: 316827 - DNA, 3487 bp, Homo sapiens
gcaccaaatatgtctgagtacgaggctgggtgttaatcggcacgagggtggtcatggcgctgttcccagcctttgcggggcttagtgaggctcccgatggcgggagctccaggaaagtcaaggaaataatgctgcagctgatactggacatcgctttgtttggcttgaggacattcaggctgtgacgggagaaaccttcagaacagataagaaaccagatcctgcgaactgggagtacaagtctctctaccgaggggatatagcaagatacaagaggaaaggagactcctgccttggcattaaccctaagaagcagtgcatatcttgggaagggacttccacagagaagaagcattcacgcaagcaggttgaacgctattttactaagaagagtgtgggattaatgaacatcgatggagttgccattagcagtaaaactgaacctccctcatctgagcccatctcctttataccagtgaaggacttggaagatgcggctcctgttacaacctggttgaatcctctggggatttatgatcagtcaaccacacattggctacaaggacagggtcctccagagcaggaatcaaagcagccagacgcacagccagacagcgagagtgcggctctcaaggccaaggtggaggagtttaacaggagggtgcgggagaatcctcgggatacgcagctgtggatggcatttgttgcttttcaggacgaggtcatgaaaagtcctggcctgtatgccatcgaggaaggagagcaggaaaagcgaaagaggtccctgaagctcattctggagaagaagctggccattctggagcgggccattgagagcaaccagagcagtgtggatctgaaactggccaagctgaagctctgcacagagttctgggagccctccactctggtcaaagagtggcagaaactgatatttttgcatcccaataatacagccctttggcagaaataccttttattttgccagagccagtttagtaccttttcgatatcaaaaattcacagtctttatggaaaatgcttgagcactttgtctgctgttaaggacggcagcatcttatctcaccctgcgttgcctggcacggaagaggccatgtttgcactctttcttcagcagtgccactttctgcggcaggctggccactctgagaaggccatctcattgttccaggccatggtggacttcaccttcttcaaacccgacagcgtaaaagatctgcctaccaaaggacaggtggaattctttgaacccttttgggacagtggagagccccgggctggggagaagggagcccgaggctggaaggcgtggatgcaccagcaggaacgaggtggctgggtggtcatcaacccagatgaggatgacgatgaaccagaagaggatgaccaggaaataaaagataagactctgcccaggtggcagatctggcttgctgctgagcgttcccgtgaccagaggcactggcggccctggcgccctgataagaccaagaagcaaaccgaggaagactgtgaggatcccgagagacaggtgttgtttgatgatattgggcaatctttgatcagactttccagccatgatcttcagttccagctggtggaggccttcctgcagttcttgggtgtgccttctggctttactcctccagcctcctgtctttatctggccatggatgagaacagcatctttgataatggactttatgatgaaaagcccttgacttttttcaaccctttgttttctggggctagctgtgttggccgcatggataggttgggctatcctcgctggaccaggggtcagaaccgagagggcgaggagttcatccgcaatgtcttccaccttgtcatgcctttattttcaggcaaagagaagtcccagctctgcttctcctggttacagtatgagattgcaaaggtcatttggtgcctgcacactaaaaacaagaagagattaaagtctcaagggaagaactgcaaaaaactagccaagaatctccttaaggagccagaaaactgcaacaacttttgcctgtggaagcagtatgcacatctggagtggttgcttggcaacacggaggatgccagaaaagtttttgacacagcacttggcatggcaggaagcagagaactgaaagactctgacctctgtgagctcagtctgctctatgctgagctggaggtggagctgtcgccagaagtgagaagggctgccacagctcgagctgttcacatattaaccaagctgactgagagcagcccctatgggccctacactggacaggtgttggctgttcacattttgaaagcgcgaaaggcttatgagcacgcactgcaggactgtttgggtgacagctgtgtctccaatccagctcccaccgattcctgtagccgcctaattagcctggctaaatgcttcatgctcttccagtatttgaccatagggattgatgctgctgtgcagatatacgaacaggtgtttgcaaaactgaacagttctgttttcccagaaggctctggcgagggggacagtgccagctcccagagttggaccagtgttctcgaagccatcacactgatgcacacgagcctgctgagattccacatgaaagtgagtgtttacccgctggcccctctgcgagaggcactctcacaggctttaaagttgtatccaggcaaccaggttctttggaggtcctatgtacagattcagaataagtcccacagtgccagcaaaaccaggagattttttgacacaatcaccaggtctgccaaacccttggagccttggttgtttgcaattgaagctgagaaactgaggaagagactggtggaaactgtccagaggttagacggtagagagatccacgccacaattcctgagaccggcttaatgcatcggatccaagccctgtttgaaaatgccatgcgcagcgacagtggcagccagtgccccttgctgtggaggatgtatttgaactttctggtttccttaggaaataaagaaagaagcaaaggtgtattctacaaagcacttcagaattgcccttgggcaaaggtgttgtacctggacgccgtggagtatttccccgatgagatgcaggagatcctggacctgatgactgagaaggagctccgggtgcgcctgccgctggaggagctggagctgctgctggaggattagagagcagcgggaaaacgggctgtgcctgcgaggccaagttgcccaccctgcggagctaggaggcgcgagcagagaacgtgtgtgttaggagaactcggcttttgaaatgttctttctcgatagtaataatgtgggctgccagcctctcacatcttgcacactttttgggtgtgtaaatgacacaaaagttatttacatattatatatgtgaatatgtgtatatatgtacatagccagagagtcatgccacgtggtcattaaaccgatgatgattgaggcgtg

SEQ ID NO: 316828 - DNA, 5305 bp, Homo sapiens
gcaccaaatatgtctgagtacgaggctgggtgttaatcggcacgagggtggtcatggcgctgttcccagcctttgcggggcttagtgaggctcccgatggcgggagctccaggaaagtcaaggaaataatgctgcagctgatactggacatcgctttgtttggcttgaggacattcaggctgtgacgggagaaaccttcagaacagataagaaaccagatcctgcgaactgggagtacaagtctctctaccgaggggatatagcaagatacaagaggaaaggagactcctgccttggcattaaccctaagaagcagtgcatatcttgggaagggacttccacagagaagaagcattcacgcaagcaggttgaacgctattttactaagaagagtgtgggattaatgaacatcgatggagttgccattagcagtaaaactgaacctccctcatctgagcccatctcctttataccagtgaaggacttggaagatgcggctcctgttacaacctggttgaatcctctggggatttatgatcagtcaaccacacattggctacaaggacagggtcctccagagcaggaatcaaagcagccagacgcacagccagacagcgagagtgcggctctcaaggccaaggtggaggagtttaacaggagggtgcgggagaatcctcgggatacgcagctgtggatggcatttgttgcttttcaggacgaggtcatgaaaagtcctggcctgtatgccatcgaggaaggagagcaggaaaagcgaaagaggtccctgaagctcattctggagaagaagctggccattctggagcgggccattgagagcaaccagagcagtgtggatctgaaactggccaagctgaagctctgcacagagttctgggagccctccactctggtcaaagagtggcagaaactgatatttttgcatcccaataatacagccctttggcagaaataccttttattttgccagagccagtttagtaccttttcgatatcaaaaattcacagtctttatggaaaatgcttgagcactttgtctgctgttaaggacggcagcatcttatctcaccctgcgttgcctggcacggaagaggccatgtttgcactctttcttcagcagtgccactttctgcggcaggctggccactctgagaaggccatctcattgttccaggccatggtggacttcaccttcttcaaacccgacagcgtaaaagatctgcctaccaaaggacaggtggaattctttgaacccttttgggacagtggagagccccgggctggggagaagggagcccgaggctggaaggcgtggatgcaccagcaggaacgaggtggctgggtggtcatcaacccagatgaggatgacgatgaaccagaagaggatgaccaggaaataaaagataagactctgcccaggtggcagatctggcttgctgctgagcgttcccgtgaccagaggcactggcggccctggcgccctgataagaccaagaagcaaaccgaggaagactgtgaggatcccgagagacaggtgttgtttgatgatattgggcaatctttgatcagactttccagccatgatcttcagttccagctggtggaggccttcctgcagttcttgggtgtgccttctggctttactcctccagcctcctgtctttatctggccatggatgagaacagcatctttgataatggactttatgatgaaaagcccttgacttttttcaaccctttgttttctggggctagctgtgttggccgcatggataggttgggctatcctcgctggaccaggggtcagaaccgagagggcgaggagttcatccgcaatgtcttccaccttgtcatgcctttattttcaggcaaagagaagtcccagctctgcttctcctggttacagtatgagattgcaaaggtcatttggtgcctgcacactaaaaacaagaagagattaaagtctcaagggaagaactgcaaaaaactagccaagaatctccttaaggagccagaaaactgcaacaacttttgcctgtggaagcagtatgcacatctggagtggttgcttggcaacacggaggatgccagaaaagtttttgacacagcacttggcatggcaggaagcagagaactgaaagactctgacctctgtgagctcagtctgctctatgctgagctggaggtggagctgtcgccagaagtgagaagggctgccacagctcgagctgttcacatattaaccaagctgactgagagcagcccctatgggccctacactggacaggtgttggctgttcacattttgaaagcgcgaaaggcttatgagcacgcactgcaggactgtttgggtgacagctgtgtctccaatccagctcccaccgattcctgtagccgcctaattagcctggctaaatgcttcatgctcttccagtatttgaccatagggattgatgctgctgtgcagatatacgaacaggtgtttgcaaaactgaacagttctgttttcccagaaggctctggcgagggggacagtgccagctcccagagttggaccagtgttctcgaagccatcacactgatgcacacgagcctgctgagattccacatgaaagtgagtgtttacccgctggcccctctgcgagaggcactctcacaggctttaaagttgtatccaggcaaccaggttctttggaggtcctatgtacagattcagaataagtcccacagtgccagcaaaaccaggagattttttgacacaatcaccaggtctgccaaacccttggagccttggttgtttgcaattgaagctgagaaactgaggaagagactggtggaaactgtccagaggttagacggtagagagatccacgccacaattcctgagaccggcttaatgcatcggatccaagccctgtttgaaaatgccatgcgcagcgacagtggcagccagtgccccttgctgtggaggatgtatttgaactttctggtttccttaggaaataaagaaagaagcaaaggtgtattctacaaagcacttcagaattgcccttgggcaaaggtgttgtacctggacgccgtggagtatttccccgatgagatgcaggagatcctggacctgatgactgagaaggagctccgggtgcgcctgccgctggaggagctggagctgctgctggaggattagagagcagcgggaaaacgggctgtgcctgcgaggccaagttgcccaccctgcggagctaggaggcgcgagcagagaacgtgtgtgttaggagaactcggcttttgaaatgttctttctcgatagtaataatgtgggctgccagcctctcacatcttgcacactttttgggtgtgtaaatgacacaaaagttatttacatattatatatgtgaatatgtgtatatatgtacatagccagagagtcatgccacgtggtcattaaaccgatgatgattgaggcgtggcagcgtccttgctcattctctccctgtgcgcagccagcactggcccccgcacggtgaatgtgttccctccgctggtgtcgtggtggtcctgccaggccctctctgagataaaggtctggtttttcagcactaggatgtcttccccaggctggtgagcaggagattttgctcttgtgttgagacccgcagttaacgcttggtgttctggcctgcacgcagtgtgtggcaagttccctgagtttacctcggcggcgatgcctccgcctggagctggaggggcagcgtgccctggggctgctgaaaaactcaggcctgtggagtcagaacccgctcttcagcaggtcccaggccacttgagtgtggaaggctgcccggggcactggcagcctctgggggaagcctgctcccaagccgtctaggagccgagcacgctgtaccgccagccccagccctgcctgcatgaggggcccggcacgcttgtgcagcaacgctgcttacactatgaaggccaaggctggcccggttctggtgttgcattcgagggctgtgaacagaatgaaatgtcaacatccatttttcagacttgttctgcctccgaagagatttttagtgctgagtgattttcactattaacatatggctggaaggaatggttttcttatcttctccgagctctagactggctagcttctctctggctttttttgttttgttttcctctctttagaattgctgtatacttgtatctcctcagcacatttagaaaagccagtgtataattttggctggcaactgacggacgcagcgggcagcagcaggcagggcagcgcacgagagcacctcccagggcacggtgggaaactggccagcccagccccactactgccctctcctgctcgtccccagtccctgagctacaggtggctgtaggcagaagcccaccgggtgttccttagcgacagacaggtcgtcagctgctccccttgatgccttttcacagaaacaaccctcaacttgaggaagttgagagctccactccgaggtggacttgctccccctccctgagagctaactggcttgaactgtcatgagttcctggctgcccacaaagagggaccttctccacccttgtcctctgcgtggggcggacatcagccagacatgtcaccgacctgattgggggcagggagtaggaagtccaggaccaaaccatgctccccatgacagcagctggcgcctcagtccccatctgactcatgtctcttctcatctggttcagaacttagaagggcgtggcctctgatcagctggttccctccaaaccccagtggcaacctgtcccttgagagccaggaatggctcttagcagtgggcagtgagcccccgagaggataaagcggctgctcgaacagattgcgagcacattacttgctgcatgggaggaggtttaaaacaaatcaaagattccttgagggcattttacagaaaacaagatgtcaagagcatcactgttgttatttaaaagcccatttgaggccaggcgcggtggctcacgtctgtaatcccagcactttgggaggccgaggcggacggatcacgaggtcaggagatcgagaccatcctggctaacatggtgaaacccccgtctctactaaaaatacaaaaaattagccgggtgtggtggctggcgcctgtagtcccagctactcggaaggctaaggcaggagaatggcgtgaacctgggaggcagagcttgcagtgagccaagatcgcgccactgcactccagcctgggcgacacagcaagactccgtctcg

SEQ ID NO: 316829 - DNA, 2075 bp, Homo sapiens
cggcgctcgctcgccggcgccatccctatagagaagaacggaggtacggcctgtggtcatggcgctgttcccagcctttgcggggcttagtgaggctcccgatggcgggagctccaggaaagagttagactggctgagcaacccaagcttttgtgttggatccataacgtccctgagccaacaaactgaagcagctccagcccatgtttctgaagggttaccgctgacaaggagtcatctgaaatcagagtcttcagatgaaagtgacactaacaaaaagctcaaacaaacaagtagaaaaaagaagaaagagaaaaagaaaaaaaggaagcatcagcatcataagaaaacaaagaggaagcatgggccgtcgagtagcagcaggtctgagacagacaccgattctgaaaaggacaaaccttccagaggcgttggaggcagtaaaaaggaatctgaggaaccgaatcaaggaaataatgctgcagctgatactggacatcgctttgtttggcttgaggacattcaggctgtgacgggagaaaccttcagaacagataagaaaccagatcctgcgaactgggagtacaagtctctctaccgaggggatatagcaagatacaagaggaaaggagactcctgccttggcattaaccctaagaagcagtgcatatcttgggaagggacttccacagagaagaagcattcacgcaagcaggttgaacgctattttactaagaagagtgtgggattaatgaacatcgatggagttgccattagcagtaaaactgaacctccctcatctgagcccatctcctttataccagtgaaggacttggaagatgcggctcctgttacaacctggttgaatcctctggggatttatgatcagtcaaccacacattggctacaaggacagggtcctccagagcaggaatcaaagcagccagacgcacagccagacagcgagagtgcggctctcaaggccaaggtggaggagtttaacaggagggtgcgggagaatcctcgggatacgcagctgtggatggcatttgttgcttttcaggacgaggtcatgaaaagtcctggcctgtatgccatcgaggaaggagagcaggaaaagcgaaagaggtccctgaagctcattctggagaagaagctggccattctggagcgggccattgagagcaaccagagcagtgtggatctgaaactggccaagctgaagctctgcacagagttctgggagccctccactctggtcaaagagtggcagaaactgatatttttgcatcccaataatacagccctttggcagaaataccttttattttgccagagccagtttagtaccttttcgatatcaaaaattcacagtctttatggaaaatgcttgagcactttgtctgctgttaaggacggcagcatcttatctcaccctgcgttgcctggcacggaagaggccatgtttgcactctttcttcagcagtgccactttctgcggcaggctggccactctgagaaggccatctcattgttccaggccatggtggacttcaccttcttcaaacccgacagcgtaaaagatctgcctaccaaaggacaggtggaattctttgaacccttttgggacagtggagagccccgggctggggagaagggagcccgaggctggaaggcgtggatgcaccagcaggaacgaggtggctgggtggtcatcaacccagatgaggatgacgatgaaccagaagaggatgaccaggaaataaaagataagactgctgctggaggattagagagcagcgggaaaacgggctgtgcctgcgaggccaagttgcccaccctgcggagctaggaggcgcgagcagagaacgtgtgtgttaggagaactcggcttttgaaatgttctttctcgatagtaataatgtgggctgccagcctctcacatcttgcacactttttgggtgtgtaaatgacacaaaagttatttacatattatatatgtgaatatgtgtatatatgtacatagccagagagtcatgccacgtggtcattaaaccgatgatgattgaggcgtg

SEQ ID NO: 316830 - DNA, 1884 bp, Homo sapiens
cggcgctcgctcgccggcgccatccctatagagaagaacggaggtacggcctgtggtcatggcgctgttcccagcctttgcggggcttagtgaggctcccgatggcgggagctccaggaaagagttagactggctgagcaacccaagcttttgtgttggatccataacgtccctgagccaacaaactgaagcagctccagcccatgtttctgaagggttaccgctgacaaggagtcatctgaaatcagagtcttcagatgaaagtgacactaacaaaaagctcaaacaaacaagtagaaaaaagaagaaagagaaaaagaaaaaaaggaagcatcagcatcataagaaaacaaagaggaagcatgggccgtcgagtagcagcaggtctgagacagacaccgattctgaaaaggacaaaccttccagaggcgttggaggcagtaaaaaggaatctgaggaaccgaatcaaggaaataatgctgcagctgatactggacatcgctttgtttggcttgaggacattcaggctgtgacgggagaaaccttcagaacagataagaaaccagatcctgcgaactgggagtacaagtctctctaccgaggggatatagcaagatacaagaggaaaggagactcctgccttggcattaaccctaagaagcagtgcatatcttgggaagggacttccacagagaagaagcattcacgcaagcaggttgaacgctattttactaagaagagtgtgggattaatgaacatcgatggagttgccattagcagtaaaactgaacctccctcatctgagcccatctcctttataccagtgaaggacttggaagatgcggctcctgttacaacctggttgaatcctctggggatttatgatcagtcaaccacacattggctacaaggacagggtcctccagagcaggaatcaaagcagccagacgcacagccagacagcgagagtgcggctctcaaggccaaggtggaggagtttaacaggagggtgcgggagaatcctcgggatacgcagctgtggatggcatttgttgcttttcaggacgaggtcatgaaaagtcctggcctgtatgccatcgaggaaggagagcaggaaaagcgaaagaggtccctgaagctcattctggagaagaagctggccattctggagcgggccattgagagcaaccagagcagtgtggatctgaaactggccaagctgaagctctgcacagagttctgggagccctccactctggtcaaagagtggcagaaactgatatttttgcatcccaataatacagccctttggcagaaataccttttattttgccagagccagtttagtaccttttcgatatcaaaaattcacagtctttatggaaaatgcttgagcactttgtctgctgttaaggacggcagcatcttatctcaccctgcgttgcctggcacggaagaggccatgtttgcactctttcttcagcagtgccactttctgcggcaggctggccactctgagaaggccatctcattgttccaggccatggtggacttcaccttcttcaaacccgacagcgtaaaagatctgcctaccaaaggacaggtggaattctttgaacccttttgggacagtggagagccccgggctggggagaagggagcccgaggctggaaggcgtggatgcaccagcaggaacgaggtggctgggtggtcatcaacccagatgaggatgacgatgaaccagaagaggatgaccaggaaataaaagataagactctgcccaggtggcagatctggcttgctgctgagcgttcccgtgaccagaggcactggcggccctggcgccctgataagaccaagaattatcaataaaaaaataaatt

SEQ ID NO: 316831 - DNA, 624 bp, Homo sapiens
  misc_feature (594)..(594): n is a, c, g, or t
  misc_feature (599)..(599): n is a, c, g, or t
  misc_feature (607)..(608): n is a, c, g, or t
cggcgctcgctcgccggcgccatccctatagagaagaacggaggtacggcctgtggtcatggcgctgttcccagcctttgcggggcttagtgaggctcccgatggcgggagctccaggaaagagttagactggctgagcaacccaagcttttgtgttggatccataacgtccctgagccaacaaactgaagcagctccagcccatgtttctgaagggttaccgctgacaaggagtcatctgaaatcagagtcttcagatgaaagtgacactaacaaaaagctcaaacaaacaagtagaaaaaagaagaaagagaaaaagaaaaaaaggaagcatcagcatcataagaaaacaaagaggaagcatgggccgtcgagtagcagcaggtctgagacagacaccgattctgaaaaggacaaaccttccagaggcgttggaggcagtaaaaaggaatctgaggaaccgaatcaaggaaataatgctgcagctgatactggacatcgctttgtttggcttgaggacattcaggctgtgacgggagaaaccttcagatgaaagtgacactaacaaaaagctcaaacaaacaagttgaaaanagaanaaagagannaagaaaaaaaggaagc

SEQ ID NO: 316832 - DNA, 96 bp, Homo sapiens
tttacatagtattatttttcctacatctttttagaaagtaattttaaagttgattttcccaaacaggagtcatctgaaatcagagtcttcagatga

SEQ ID NO: 316833 - DNA, 281 bp, Homo sapiens
agaaagagaaaaagaaaaaaaggaagcatcagcatcataagaaaacaaagaggaagcatgggccgtcgagtagcagcaggtctgagacagacaccgattctgaaaaggacaaaccttccagaggcgttggaggcagtaaaaaggaatctgaggaaccgaagtaggttgctgttctcaagcacctatgatattttaagtcttgagtttttctcccttaattgttgccgcaaattagatatttgaataaccatttagtcactcagtcggaagagagctctacc

SEQ ID NO: 316834 - DNA, 5653 bp, Homo sapiens
cggcgctcgctcgccggcgccatccctatagagaagaacggaggtacggcctgtggtcatggcgctgttcccagcctttgcggggcttagtgaggctcccgatggcgggagctccaggaaagagttagactggctgagcaacccaagcttttgtgttggatccataacgtccctgagccaacaaactgaagcagctccagcccatgtttctgaagggttaccgctgacaaggagtcatctgaaatcagagtcttcagatgaaagtgacactaacaaaaagctcaaacaaacaagtagaaaaaagaagaaagagaaaaagaaaaaaaggaagcatcagcatcataagaaaacaaagaggaagcatgggccgtcgagtagcagcaggtctgagacagacaccgattctgaaaaggacaaaccttccagaggcgttggaggcagtaaaaaggaatctgaggaaccgaatcaaggaaataatgctgcagctgatactggacatcgctttgtttggcttgaggacattcaggctgtgacgggagaaaccttcagaacagataagaaaccagatcctgcgaactgggagtacaagtctctctaccgaggggatatagcaagatacaagaggaaaggagactcctgccttggcattaaccctaagaagcagtgcatatcttgggaagggacttccacagagaagaagcattcacgcaagcaggttgaacgctattttactaagaagagtgtgggattaatgaacatcgatggagttgccattagcagtaaaactgaacctccctcatctgagcccatctcctttataccagtgaaggacttggaagatgcggctcctgttacaacctggttgaatcctctggggatttatgatcagtcaaccacacattggctacaaggacagggtcctccagagcaggaatcaaagcagccagacgcacagccagacagcgagagtgcggctctcaaggccaaggtggaggagtttaacaggagggtgcgggagaatcctcgggatacgcagctgtggatggcatttgttgcttttcaggacgaggtcatgaaaagtcctggcctgtatgccatcgaggaaggagagcaggaaaagcgaaagaggtccctgaagctcattctggagaagaagctggccattctggagcgggccattgagagcaaccagagcagtgtggatctgaaactggccaagctgaagctctgcacagagttctgggagccctccactctggtcaaagagtggcagaaactgatatttttgcatcccaataatacagccctttggcagaaataccttttattttgccagagccagtttagtaccttttcgatatcaaaaattcacagtctttatggaaaatgcttgagcactttgtctgctgttaaggacggcagcatcttatctcaccctgcgttgcctggcacggaagaggccatgtttgcactctttcttcagcagtgccactttctgcggcaggctggccactctgagaaggccatctcattgttccaggccatggtggacttcaccttcttcaaacccgacagcgtaaaagatctgcctaccaaaggacaggtggaattctttgaacccttttgggacagtggagagccccgggctggggagaagggagcccgaggctggaaggcgtggatgcaccagcaggaacgaggtggctgggtggtcatcaacccagatgaggatgacgatgaaccagaagaggatgaccaggaaataaaagataagactctgcccaggtggcagatctggcttgctgctgagcgttcccgtgaccagaggcactggcggccctggcgccctgataagaccaagaagcaaaccgaggaagactgtgaggatcccgagagacaggtgttgtttgatgatattgggcaatctttgatcagactttccagccatgatcttcagttccagctggtggaggccttcctgcagttcttgggtgtgccttctggctttactcctccagcctcctgtctttatctggccatggatgagaacagcatctttgataatggactttatgatgaaaagcccttgacttttttcaaccctttgttttctggggctagctgtgttggccgcatggataggttgggctatcctcgctggaccaggggtcagaaccgagagggcgaggagttcatccgcaatgtcttccaccttgtcatgcctttattttcaggcaaagagaagtcccagctctgcttctcctggttacagtatgagattgcaaaggtcatttggtgcctgcacactaaaaacaagaagagattaaagtctcaagggaagaactgcaaaaaactagccaagaatctccttaaggagccagaaaactgcaacaacttttgcctgtggaagcagtatgcacatctggagtggttgcttggcaacacggaggatgccagaaaagtttttgacacagcacttggcatggcaggaagcagagaactgaaagactctgacctctgtgagctcagtctgctctatgctgagctggaggtggagctgtcgccagaagtgagaagggctgccacagctcgagctgttcacatattaaccaagctgactgagagcagcccctatgggccctacactggacaggtgttggctgttcacattttgaaagcgcgaaaggcttatgagcacgcactgcaggactgtttgggtgacagctgtgtctccaatccagctcccaccgattcctgtagccgcctaattagcctggctaaatgcttcatgctcttccagtatttgaccatagggattgatgctgctgtgcagatatacgaacaggtgtttgcaaaactgaacagttctgttttcccagaaggctctggcgagggggacagtgccagctcccagagttggaccagtgttctcgaagccatcacactgatgcacacgagcctgctgagattccacatgaaagtgagtgtttacccgctggcccctctgcgagaggcactctcacaggctttaaagttgtatccaggcaaccaggttctttggaggtcctatgtacagattcagaataagtcccacagtgccagcaaaaccaggagattttttgacacaatcaccaggtctgccaaacccttggagccttggttgtttgcaattgaagctgagaaactgaggaagagactggtggaaactgtccagaggttagacggtagagagatccacgccacaattcctgagaccggcttaatgcatcggatccaagccctgtttgaaaatgccatgcgcagcgacagtggcagccagtgccccttgctgtggaggatgtatttgaactttctggtttccttaggaaataaagaaagaagcaaaggtgtattctacaaagcacttcagaattgcccttgggcaaaggtgttgtacctggacgccgtggagtatttccccgatgagatgcaggagatcctggacctgatgactgagaaggagctccgggtgcgcctgccgctggaggagctggagctgctgctggaggattagagagcagcgggaaaacgggctgtgcctgcgaggccaagttgcccaccctgcggagctaggaggcgcgagcagagaacgtgtgtgttaggagaactcggcttttgaaatgttctttctcgatagtaataatgtgggctgccagcctctcacatcttgcacactttttgggtgtgtaaatgacacaaaagttatttacatattatatatgtgaatatgtgtatatatgtacatagccagagagtcatgccacgtggtcattaaaccgatgatgattgaggcgtggcagcgtccttgctcattctctccctgtgcgcagccagcactggcccccgcacggtgaatgtgttccctccgctggtgtcgtggtggtcctgccaggccctctctgagataaaggtctggtttttcagcactaggatgtcttccccaggctggtgagcaggagattttgctcttgtgttgagacccgcagttaacgcttggtgttctggcctgcacgcagtgtgtggcaagttccctgagtttacctcggcggcgatgcctccgcctggagctggaggggcagcgtgccctggggctgctgaaaaactcaggcctgtggagtcagaacccgctcttcagcaggtcccaggccacttgagtgtggaaggctgcccggggcactggcagcctctgggggaagcctgctcccaagccgtctaggagccgagcacgctgtaccgccagccccagccctgcctgcatgaggggcccggcacgcttgtgcagcaacgctgcttacactatgaaggccaaggctggcccggttctggtgttgcattcgagggctgtgaacagaatgaaatgtcaacatccatttttcagacttgttctgcctccgaagagatttttagtgctgagtgattttcactattaacatatggctggaaggaatggttttcttatcttctccgagctctagactggctagcttctctctggctttttttgttttgttttcctctctttagaattgctgtatacttgtatctcctcagcacatttagaaaagccagtgtataattttggctggcaactgacggacgcagcgggcagcagcaggcagggcagcgcacgagagcacctcccagggcacggtgggaaactggccagcccagccccactactgccctctcctgctcgtccccagtccctgagctacaggtggctgtaggcagaagcccaccgggtgttccttagcgacagacaggtcgtcagctgctccccttgatgccttttcacagaaacaaccctcaacttgaggaagttgagagctccactccgaggtggacttgctccccctccctgagagctaactggcttgaactgtcatgagttcctggctgcccacaaagagggaccttctccacccttgtcctctgcgtggggcggacatcagccagacatgtcaccgacctgattgggggcagggagtaggaagtccaggaccaaaccatgctccccatgacagcagctggcgcctcagtccccatctgactcatgtctcttctcatctggttcagaacttagaagggcgtggcctctgatcagctggttccctccaaaccccagtggcaacctgtcccttgagagccaggaatggctcttagcagtgggcagtgagcccccgagaggataaagcggctgctcgaacagattgcgagcacattacttgctgcatgggaggaggtttaaaacaaatcaaagattccttgagggcattttacagaaaacaagatgtcaagagcatcactgttgttatttaaaagcccatttgaggccaggcgcggtggctcacgtctgtaatcccagcactttgggaggccgaggcggacggatcacgaggtcaggagatcgagaccatcctggctaacatggtgaaacccccgtctctactaaaaatacaaaaaattagccgggtgtggtggctggcgcctgtagtcccagctactcggaaggctaaggcaggagaatggcgtgaacctgggaggcagagcttgcagtgagccaagatcgcgccactgcactccagcctgggcgacacagcaagactccgtctcg

SEQ ID NO: 316835 - DNA, 5632 bp, Homo sapiens
cggcgctcgctcgccggcgccatccctatagagaagaacggaggtacggcctgtggtcatggcgctgttcccagcctttgcggggcttagtgaggctcccgatggcgggagctccaggaaagagttagactggctgagcaacccaagcttttgtgttggatccataacgtccctgagccaacaaactgaagcagctccagcccatgtttctgaagggttaccgctgacaaggagtcatctgaaatcagagtcttcagatgaaagtgacactaacaaaaagctcaaacaaacaagtagaaaaaagaagaaagagaaaaagaaaaaaaggaagcatcagcatcataagaaaacaaagaggaagcatgggccgtcgagtagcagcaggtctgagacagacaccgattctgaaaaggacaaaccttccagaggcgttggaggcagtaaaaaggaatctgaggaaccgaatcaaggaaataatgctgcagctgatactggacatcgctttgtttggcttgaggacattcaggctgtgacgggagaaaccttcagaacagataagaaaccagatcctgcgaactgggagtacaagtctctctaccgaggggatatagcaagatacaagaggaaaggagactcctgccttggcattaaccctaagaagcagtgcatatcttgggaagggacttccacagagaagaagcattcacgcaagcaggttgaacgctattttactaagaagagtgtgggattaatgaacatcgatggagttgccattagcagtaaaactgaacctccctcatctgagcccatctcctttataccagtgaaggacttggaagatgcggctcctgttacaacctggttgaatcctctggggatttatgatcagtcaaccacacattggctacaaggacagggtcctccagagcaggaatcaaagcagccagacgcacagccagacagcgagagtgcggctctcaaggccaaggtggaggagtttaacaggagggtgcgggagaatcctcgggatacgcagctgtggatggcatttgttgcttttcaggacgaggtcatgaaaagtcctggcctgtatgccatcgaggaaggagagcaggaaaagcgaaagaggtccctgaagctcattctggagaagaagctggccattctggagcgggccattgagagcaaccagagcagtgtggatctgaaactggccaagctgaagctctgcacagagttctgggagccctccactctggtcaaagagtggcagaaactgatatttttgcatcccaataatacagccctttggcagaaataccttttattttgccagagccagtttagtaccttttcgatatcaaaaattcacagtctttatggaaaatgcttgagcactttgtctgctgttaaggacggcagcatcttatctcaccctgcgttgcctggcacggaagaggccatgtttgcactctttcttcagcagtgccactttctgcggcaggctggccactctgagaaggccatctcattgttccaggccatggtggacttcaccttcttcaaacccgacagcgtaaaagatctgcctaccaaaggacaggtggaattctttgaacccttttgggacagtggagagccccgggctggggagaagggagcccgaggctggaaggcgtggatgcaccagcaggaacgaggtggctgggtggtcatcaacccagatgaggatgacgatgaaccagaagaggatgaccaggaaataaaagataagactctgcccaggtggcagatctggcttgctgctgagcgttcccgtgaccagaggcactggcggccctggcgccctgataagaccaagaagcaaaccgaggaagactgtgaggatcccgagagacaggtgttgtttgatgatattgggcaatctttgatcagactttccagccatgatcttcagttccagctggtggaggccttcctgcagttcttgggtgtgccttctggctttactcctccagcctcctgtctttatctggccatggatgagaacagcatctttgataatggactttatgatgaaaagcccttgacttttttcaaccctttgttttctggggctagctgtgttggccgcatggataggttgggctatcctcgctggaccaggggtcagaaccgagagggcgaggagttcatccgcaatgtcttccaccttgtcatgcctttattttcaggcaaagagaagtcccagctctgcttctcctggttacagtatgagattgcaaaggtcatttggtgcctgcacactaaaaacaagaagagattaaagtctcaagggaagaactgcaaaaaactagccaagaatctccttaaggagccagaaaactgcaacaacttttgcctgtggaagcagtatgcacatctggagtggttgcttggcaacacggaggatgccagaaaagtttttgacacagcacttggcatggcaggaagcagagaactgaaagactctgacctctgtgagctcagtctgctctatgctgagctggaggtggagctgtcgccagaagtgagaagggctgccacagctcgagctgttcacatattaaccaagctgactgagagcagcccctatgggccctacactggacaggtgttggctgttcacattttgaaagcgcgaaaggcttatgagcacgcactgcaggactgtttgggtgacagctgtgtctccaatccagctcccaccgattcctgtagccgcctaattagcctggctaaatgcttcatgctcttccagtatttgaccatagggattgatgctgctgtgcagatatacgaacaggtgtttgcaaaactgaacagttctgttttcccagaaggctctggcgagggggacagtgccagctcccagagttggaccagtgttctcgaagccatcacactgatgcacacgagcctgctgagattccacatgaaagtgagtgtttacccgctggcccctctgcgagaggcactctcacaggctttaaagttgtatccaggcaaccaggttctttggaggtcctatgtacagattcagaataagtcccacagtgccagcaaaaccaggagattttttgacacaatcaccaggtctgccaaacccttggagccttggttgtttgcaattgaagctgagaaactgaggaagagactggtggaaactgtccagaggttagacggtagagagatccacgccacaattcctgagaccggcttaatgcatcggatccaagccctgtttgaaaatgccatgcgcagcgacagtggcagccagtgccccttgctgtggaggatgtatttgaactttctggtttccttaggaaataaagaaagaagcaaaggtgtattctacaaagcacttcagaattgcccttgggcaaaggtgttgtacctggacgccgtggagtatttccccgatgagatgcaggagatcctggacctgatgactgagaaggagctccgggtgcgcctgctgctggaggattagagagcagcgggaaaacgggctgtgcctgcgaggccaagttgcccaccctgcggagctaggaggcgcgagcagagaacgtgtgtgttaggagaactcggcttttgaaatgttctttctcgatagtaataatgtgggctgccagcctctcacatcttgcacactttttgggtgtgtaaatgacacaaaagttatttacatattatatatgtgaatatgtgtatatatgtacatagccagagagtcatgccacgtggtcattaaaccgatgatgattgaggcgtggcagcgtccttgctcattctctccctgtgcgcagccagcactggcccccgcacggtgaatgtgttccctccgctggtgtcgtggtggtcctgccaggccctctctgagataaaggtctggtttttcagcactaggatgtcttccccaggctggtgagcaggagattttgctcttgtgttgagacccgcagttaacgcttggtgttctggcctgcacgcagtgtgtggcaagttccctgagtttacctcggcggcgatgcctccgcctggagctggaggggcagcgtgccctggggctgctgaaaaactcaggcctgtggagtcagaacccgctcttcagcaggtcccaggccacttgagtgtggaaggctgcccggggcactggcagcctctgggggaagcctgctcccaagccgtctaggagccgagcacgctgtaccgccagccccagccctgcctgcatgaggggcccggcacgcttgtgcagcaacgctgcttacactatgaaggccaaggctggcccggttctggtgttgcattcgagggctgtgaacagaatgaaatgtcaacatccatttttcagacttgttctgcctccgaagagatttttagtgctgagtgattttcactattaacatatggctggaaggaatggttttcttatcttctccgagctctagactggctagcttctctctggctttttttgttttgttttcctctctttagaattgctgtatacttgtatctcctcagcacatttagaaaagccagtgtataattttggctggcaactgacggacgcagcgggcagcagcaggcagggcagcgcacgagagcacctcccagggcacggtgggaaactggccagcccagccccactactgccctctcctgctcgtccccagtccctgagctacaggtggctgtaggcagaagcccaccgggtgttccttagcgacagacaggtcgtcagctgctccccttgatgccttttcacagaaacaaccctcaacttgaggaagttgagagctccactccgaggtggacttgctccccctccctgagagctaactggcttgaactgtcatgagttcctggctgcccacaaagagggaccttctccacccttgtcctctgcgtggggcggacatcagccagacatgtcaccgacctgattgggggcagggagtaggaagtccaggaccaaaccatgctccccatgacagcagctggcgcctcagtccccatctgactcatgtctcttctcatctggttcagaacttagaagggcgtggcctctgatcagctggttccctccaaaccccagtggcaacctgtcccttgagagccaggaatggctcttagcagtgggcagtgagcccccgagaggataaagcggctgctcgaacagattgcgagcacattacttgctgcatgggaggaggtttaaaacaaatcaaagattccttgagggcattttacagaaaacaagatgtcaagagcatcactgttgttatttaaaagcccatttgaggccaggcgcggtggctcacgtctgtaatcccagcactttgggaggccgaggcggacggatcacgaggtcaggagatcgagaccatcctggctaacatggtgaaacccccgtctctactaaaaatacaaaaaattagccgggtgtggtggctggcgcctgtagtcccagctactcggaaggctaaggcaggagaatggcgtgaacctgggaggcagagcttgcagtgagccaagatcgcgccactgcactccagcctgggcgacacagcaagactccgtctcg

SEQ ID NO: 316836 - DNA, 716 bp, Homo sapiens
  misc_feature (686)..(686): n is a, c, g, or t
  misc_feature (691)..(691): n is a, c, g, or t
  misc_feature (699)..(700): n is a, c, g, or t
cggcgctcgctcgccggcgccatccctatagagaagaacggaggtacggcctgtggtcatggcgctgttcccagcctttgcggggcttagtgaggctcccgatggcgggagctccaggaaagagttagactggctgagcaacccaagcttttgtgttggatccataacgtccctgagccaacaaactgaagcagctccagcccatgtttctgaagggttaccgctgacaaggagtcatctgaaatcagagtcttcagatgaaagtgacactaacaaaaagctcaaacaaacaagtagaaaaaagaagaaagagaaaaagaaaaaaaggaagcatcagcatcataagaaaacaaagaggaagcatgggccgtcgagtagcagcaggtctgagacagacaccgattctgaaaaggacaaaccttccagaggcgttggaggcagtaaaaaggaatctgaggaaccgaatcaaggaaataatgctgcagctgatactggacatcgctttgtttggcttgaggacattcaggctgtgacgggagaaaccttcagaacagataagaaaccagatcctgcgaactgggagtacaagtctctctaccgaggggatatagcaaggagtcatctgaaatcaaagtcttcagatgaaagtgacactaacaaaaagctcaaacaaacaagttgaaaanagaanaaagagannaagaaaaaaaggaagc

SEQ ID NO: 316837 - DNA, 319 bp, Homo sapiens
tgatataatcatttatcttgtttcccattaaaatatgtggttgaaagtaatgggttcaaaatacctatgtaataaatcaatgaaaaatgaattaaccaactcacagattgcctaagaattatgtgatgatgaaattgtatgcttatataaggaactggacttaatatatatttgtgatgatatctaccactttattcctttattaggaaaaattaagtgcactccaatttattcatccattctttcattaaaaaaccgttttctgggcatttcctaaatccacagcactatcccgtgcaaaaaaggggactgaaggagc

SEQ ID NO: 316838 - DNA, 2159 bp, Homo sapiens
acacacagccattgggggttgctcggatccgggactgccgcagggggtgccacagcagtgcctggcagcgtgggctgggaccttgtcactaaagcagagaagccacttcttctgggcccacgaggcagctgtcccatgctctgctgagcacggtggtgccatgcctctgcaactcctcctgttgctgatcctactgggccctggcaacagcttgcagctgtgggacacctgggcagatgaagccgagaaagccttgggtcccctgcttgcccgggaccggagacaggccaccgaatatgagtacctagattatgatttcctgccagaaacggagcctccagaaatgctgaggaacagcactgacaccactcctctgactgggcctggaacccctgagtctaccactgtggagcctgctgcaaggcgttctactggcctggatgcaggaggggcagtcacagagctgaccacggagctggccaacatggggaacctgtccacggattcagcagctatggagatacagaccactcaaccagcagccacggaggcacagaccactccactggcagccacagaggcacagacaactcgactgacggccacggaggcacagaccactccactggcagccacagaggcacagaccactccaccagcagccacggaagcacagaccactcaacccacaggcctggaggcacagaccactgcaccagcagccatggaggcacagaccactgcaccagcagccatggaagcacagaccactccaccagcagccatggaggcacagaccactcaaaccacagccatggaggcacagaccactgcaccagaagccacggaggcacagaccactcaacccacagccacggaggcacagaccactccactggcagccatggaggccctgtccacagaacccagtgccacagaggccctgtccatggaacctactaccaaaagaggtctgttcatacccttttctgtgtcctctgttactcacaagggcattcccatggcagccagcaatttgtccgtcaactacccagtgggggccccagaccacatctctgtgaagcagtgcctgctggccatcctaatcttggcgctggtggccactatcttcttcgtgtgcactgtggtgctggcggtccgcctctcccgcaagggccacatgtaccccgtgcgtaattactcccccaccgagatggtctgcatctcatccctgttgcctgatgggggtgaggggccctctgccacagccaatgggggcctgtccaaggccaagagcccgggcctgacgccagagcccagggaggaccgtgagggggatgacctcaccctgcacagcttcctcccttagctcactctgccatctgttttggcaagaccccacctccacgggctctcctgggccacccctgagtgcccagaccccattccacagctctgggcttcctcggagacccctggggatggggatcttcagggaaggaactctggccacccaaacaggacaagagcagcctggggccaagcagacgggcaagtggagccacctctttcctccctccgcggatgaagcccagccacatttcagccgaggtccaaggcaggaggccatttacttgagacagattctctcctttttcctgtcccccatcttctctgggtccctctaacatctcccatggctctccccgcttctcctggtcactggagtctcctccccatgtacccaaggaagatggagctcccccatcccacacgcactgcactgccattgtcttttggttgccatggtcaccaaacaggaagtggacattctaagggaggagtactgaagagtgacggacttctgaggctgtttcctgctgctcctctgacttggggcagcttgggtcttcttgggcacctctctgggaaaacccagggtgaggttcagcctgtgagggctgggatgggtttcgtgggcccaagggcagacctttctttgggactgtgtggaccaaggagcttccatctagtgacaagtgacccccagctatcgcctcttgccttcccctgtggccactttccagggtggactctgtcttgttcactgcagtatcccaactgcaggtccagtgcaggcaataaatatgtgatggaca

SEQ ID NO: 316839 - DNA, 549 bp, Homo sapiens
cctaatcttggcgctggtggccactatcttcttcgtgtgcactgtggtgctggcggtccgcctctcccgcaagggccacatgtaccccgtgcgtaattactcccccaccgagatggtctgcatctcatccctgttgcctgatgggggtgaggggccctctgccacagccaatgggggcctgtccaaggccaagagccctggcaacagcttgcagctgtgggacacctgggcagatgaagccgagaaagccttgggtcccctgcttgcccgggaccggagacaggccaccgaatatgagtacctagattatgatttcctgccagaaacggagcctccagaaatgctgaggaacagcactgacaccactcctctgactgggcctggaacccctgagtctaccactgtggagcctgctgcaaggcgttctactggcctggatgcaggaggggcagtcacagagctgtggccactttccagggtggactctgtcttgttcactgcagtatcccaactgcaggtccagtgcaggcaataaatatgtgatggaca

SEQ ID NO: 316840 - DNA, 2528 bp, Homo sapiens
acacacagccattgggggttgctcggatccgggactgccgcagggggtgccacagcagtgcctggcagcgtgggctgggaccttgtcactaaagcagagaagccacttcttctgggcccacgaggcagctgtcccatgctctgctgagcacggtggtgccatgcctctgcaactcctcctgttgctgatcctactgggccctggcaacagcttgcagctgtgggacacctgggcagatgaagccgagaaagccttgggtcccctgcttgcccgggaccggagacaggccaccgaatatgagtacctagattatgatttcctgccagaaacggagcctccagaaatgctgaggaacagcactgacaccactcctctgactgggcctggaacccctgagtctaccactgtggagcctgctgcaaggcgttctactggcctggatgcaggaggggcagtcacagagctgaccacggagctggccaacatggggaacctgtccacggattcagcagctatggagatacagaccactcaaccagcagccacggaggcacagaccactccactggcagccacagaggcacagacaactcgactgacggccacggaggcacagaccactccactggcagccacagaggcacagaccactccaccagcagccacggaagcacagaccactcaacccacaggcctggaggcacagaccactgcaccagcagccatggaggcacagaccactgcaccagcagccatggaagcacagaccactccaccagcagccatggaggcacagaccactcaaaccacagccatggaggcacagaccactgcaccagaagccacggaggcacagaccactcaacccacagccacggaggcacagaccactccactggcagccatggaggccctgtccacagaacccagtgccacagaggccctgtccatggaacctactaccaaaagaggtctgttcatacccttttctgtgtcctctgttactcacaagggcattcccatggcagccagcaatttgtccgtcaactacccagtgggggccccagaccacatctctgtgaagcagtgcctgctggccatcctaatcttggcgctggtggccactatcttcttcgtgtgcactgtggtgctggcggtccgcctctcccgcaagggccacatgtaccccgtgcgtaattactcccccaccgagatggtctgcatctcatccctgttgcctgatgggggtgaggggccctctgccacagccaatgggggcctgtccaaggccaagagcccgggcctgacgccagagcccagggaggaccgtgagggggatgacctcaccctgcacagcttcctcccttagctcactctgccatctgttttggcaagaccccacctccacgggctctcctgggccacccctgagtgcccagaccccattccacagctctgggcttcctcggagacccctggggatggggatcttcagggaaggaactctggccacccaaacaggacaagagcagcctggggccaagcagacgggcaagtggagccacctctttcctccctccgcggatgaagcccagccacatttcagccgaggtccaaggcaggaggccatttacttgagacagattctctcctttttcctgtcccccatcttctctgggtccctctaacatctcccatggctctccccgcttctcctggtcactggagtctcctccccatgtacccaaggaagatggagctcccccatcccacacgcactgcactgccattgtcttttggttgccatggtcaccaaacaggaagtggacattctaagggaggagtactgaagagtgacggacttctgaggctgtttcctgctgctcctctgacttggggcagcttgggtcttcttgggcacctctctgggaaaacccagggtgaggttcagcctgtgagggctgggatgggtttcgtgggcccaagggcagacctttctttgggactgtgtggaccaaggagcttccatctagtgacaagtgacccccagctatcgcctcttgccttcccctgtggccactttccagggtggactctgtcttgttcactgcagtatcccaactgcaggtccagtgcaggcaataaatatgtgatggacaaacgatagcggaatccttcaaggtttcaaggctgtctccttcaggcagccttcccggaattctccatccctcagtgcaggatgggggctggtcctcagctgtctgccctcagcccctggccccccaggaagcctctttcatgggctgttaggttgacttcagttttgcctcttggacaacagggggtcttgtacatccttgggtgaccaggaaaagttcaggctatggggggccaaagggagggctgccccttccccaccagtgaccactttattccacttcctccattacccagttttggcccacagagtttggtcccccccaaacctcggaccaatatccctctaaacatcaatctatcctcctgtt

SEQ ID NO: 316841 - DNA, 2189 bp, Homo sapiens
acacacagccattgggggttgctcggatccgggactgccgcagggggtgccacagcagtgcctggcagcgtgggctgggaccttgtcactaaagcagagaagccacttcttctgggcccacgaggcagctgtcccatgctctgctgagcacggtggtgccatgcctctgcaactcctcctgttgctgatcctactgggccctggcaacagcttgcagctgtgggacacctgggcagatgaagccgagaaagccttgggtcccctgcttgcccgggaccggagacaggccaccgaatatgagtacctagattatgatttcctgccagaaacggagcctccagaaatgctgaggaacagcactgacaccactcctctgactgggcctggaacccctgagtctaccactgtggagcctgctgcaaggcgttctactggcctggatgcaggaggggcagtcacagagctgaccacggagctggccaacatggggaacctgtccacggattcagcagctatggagatacagaccactcaaccagcagccacggaggcacagaccactcaaccagtgcccacggaggcacagaccactccactggcagccacagaggcacagacaactcgactgacggccacggaggcacagaccactccactggcagccacagaggcacagaccactccaccagcagccacggaagcacagaccactcaacccacaggcctggaggcacagaccactgcaccagcagccatggaggcacagaccactgcaccagcagccatggaagcacagaccactccaccagcagccatggaggcacagaccactcaaaccacagccatggaggcacagaccactgcaccagaagccacggaggcacagaccactcaacccacagccacggaggcacagaccactccactggcagccatggaggccctgtccacagaacccagtgccacagaggccctgtccatggaacctactaccaaaagaggtctgttcatacccttttctgtgtcctctgttactcacaagggcattcccatggcagccagcaatttgtccgtcaactacccagtgggggccccagaccacatctctgtgaagcagtgcctgctggccatcctaatcttggcgctggtggccactatcttcttcgtgtgcactgtggtgctggcggtccgcctctcccgcaagggccacatgtaccccgtgcgtaattactcccccaccgagatggtctgcatctcatccctgttgcctgatgggggtgaggggccctctgccacagccaatgggggcctgtccaaggccaagagcccgggcctgacgccagagcccagggaggaccgtgagggggatgacctcaccctgcacagcttcctcccttagctcactctgccatctgttttggcaagaccccacctccacgggctctcctgggccacccctgagtgcccagaccccattccacagctctgggcttcctcggagacccctggggatggggatcttcagggaaggaactctggccacccaaacaggacaagagcagcctggggccaagcagacgggcaagtggagccacctctttcctccctccgcggatgaagcccagccacatttcagccgaggtccaaggcaggaggccatttacttgagacagattctctcctttttcctgtcccccatcttctctgggtccctctaacatctcccatggctctccccgcttctcctggtcactggagtctcctccccatgtacccaaggaagatggagctcccccatcccacacgcactgcactgccattgtcttttggttgccatggtcaccaaacaggaagtggacattctaagggaggagtactgaagagtgacggacttctgaggctgtttcctgctgctcctctgacttggggcagcttgggtcttcttgggcacctctctgggaaaacccagggtgaggttcagcctgtgagggctgggatgggtttcgtgggcccaagggcagacctttctttgggactgtgtggaccaaggagcttccatctagtgacaagtgacccccagctatcgcctcttgccttcccctgtggccactttccagggtggactctgtcttgttcactgcagtatcccaactgcaggtccagtgcaggcaataaatatgtgatggaca

SEQ ID NO: 316842 - DNA, 2265 bp, Homo sapiens
gaattccgttgctgtcgccgttgctgtcgattttatttgtatcaactcaaagcaaaatagagcattttattaaatatgtcttcataaattacgcacagtaaaatcccattaattggaccacacccagttcattatagtgtttattataattttagcattagttgaactgaaaattggtttttgtttactatgagaaaaaggtagactaaacaagataaaacctgttgtttgcatattatgtttgtacatctttattagcaactatttttccaactattttcaactatttttccaactattttctagttataaaagcaatacataaatactatagaaaatttagcaatgcagaaaggaatttttaaaaatccctcatagattagccattgttaacattttggtgtatttccttcaagtcttagtaaaatgtgaacctttaaatatagatccctgtatcttaggaattagaaaggcagcaaaggcagttcctaatgagatggagaaaatgttgatttagtcatgcccttgtactgtgggggccatactgtctgttgacagagcatattaaaagacgttccctacattcgtcagccttagctaattggcagtctggtatttatgattttatattttgttatcagcttgggagctgcagtaccccccagcctcctagaaaaacttggcttccctagctgggaggcctcgttccaggagtcgttgttgagagtcaagccagggaagtgtgtttttttcagggagcagccagtcctgtgctgggagcatcttcagggggcacctgccgttgaattgttctcacttgtcgtttgtaagaatccaagtatgtcacccttacaccaagtgagtcacacagtgacacaatcccctttcaatgtagataacattgcttcagagctggagaacttcatggggctcatcgaggtggtgacgggctacgtgaagatccgccattctcatgccttggtctccttgtccttcctaaaaaaccttcgcctcatcctaggagaggagcagctagaagggtaagtgcctccaaatttcatgagctgacgttctattacaaaataagcagcgtgcttatgaaactgtgttgcagaggtaagagccctccctgccttgttaaagagaagaaaggaggaagccgcagtattgcctgtgctgctcgagtaggtcttgggtggagtcatggttctccattcttaggaggttgctgtttggaaaacagagatgttatcacccttactggattttgcctcatcagtcaagggttgcgttgtctgactgtgaccagtcagacggcagacgggggtgcgcttagggcttttctgccaagaatgacagcagttggtctggagtgctcacctccctgtgaaatcattgttagcgcgaccctcatctgcctcaggatgctgtactcactacgcacaactgctccatctttaagatattggagtgagagcacgggaggagcatgggcggttcgttttgttagaaagaaacccggattcacgagatggtttttattgattagtttacaggatttgcactattgatagagtttttgccttggcacaggcctgctttgtgataggggttttaaaataaccgtgggcttttcactggaggataaaagccggtgcttattgcatgcacaattgctttccagccgtcagcctgtgtgtacctttgcatatgtacttttctctttaaactctcccttttaaatacgactcttgccaggctttaagtgaatgcttcaaaataaaaggagttatcaattaaagagtgaattccttccaaagagaatttgggaaaataatttaggaaaagaagaggcgagaaggtcatgggaaaggttgtctttgctgatttatctgccccaactggataaagttactgcataagggtttctttacagcctccctgtttttctcagactaactcttggtcagtcttaaattcttaaaattccatcatctgatagagctaacgagagcgggcagctcttcattccatccttgaaaagcacagtgtcctccccactggggaacaccaatccttaaaaaacttctttctcattgcaaatcgaaggaggctgccgctgcacccagccccagactcctcagtcacttacctggcaagctgaggccctaccagtttaaggtgatgattattgtttcttgtattaaattttaaaatgaatttttctccgctttttttttttctaagtaggtttgtgtttctgga

SEQ ID NO: 316843 - DNA, 929 bp, Homo sapiens
gtagggaagttggtgccggggcgggctccgcggttcccgggccccgcgacccgcacctcgccccttccgtgcgcacgagcctctccgcacacagcgctgatccccctgcggcgcgcaggcagcagcgacagcaccctgggccgcaccgcgtctccgctgctggggctgaccgggcagtggggagcgggcagccgcccggcccgcggggtgcgagttgccctcgaggggggaggtgccctgcggagaggccccgaagccccaggacacgtctccaagcgcccgtcgctgcctcccgtcgcccaacgtgcttttgcccctcgggctcctcgggttcctggccttgcccgtcactttggcccgctcctcgttgggttacctgcccccggcgtcccggggctgggcggtggggtgaggggaagcgctctctgggcagccccccgggaagtgcgaggccgggagtcttcctcagcttgtctcttccggggagcgccactgggtccccagttcagagggctctgggatggtctcccagtttctcccgggccgggggatggaggggtactagggccgcatccgagtgtgcgttggtgggtgtgtggtcggagccgacgtgcattccgacacacgtgctcgcagcgcggggtgtagtcgccgcctcacggggacacctagacgcccgtccctggcgagaggtgtcgtacgctgtggtttcagcgccagggtctgcggcggcgcggggagggtgttgtgttttgcgagcgcggagccctggccttggttttgttgtggtcggcgtcgtcgtcgccctctcttctgccgccccgcacttcctttgtacgtagttaataagcagtgtcgctccacattcgctgtcttttgcaatctgatagcttttgttttggtggtgtcgggtgggggttagtagggaa

SEQ ID NO: 316844 - DNA, 6579 bp, Homo sapiens
  misc_feature (10)..(12): n is a, c, g, or t
tttttttttnnntttatgtcccccccccatccccccggcaattatacctaaatatggtgttttttttttttttttgagaaaggggaatttcatcccaaataaaaggaatgaagtctggctccggaggagggtccccgacctcgctgtgggggctcctgtttctctccgccgcgctctcgctctggccgacgagtggagaaatctgcgggccaggcatcgacatccgcaacgactatcagcagctgaagcgcctggagaactgcacggtgatcgagggctacctccacatcctgctcatctccaaggccgaggactaccgcagctaccgcttccccaagctcacggtcattaccgagtacttgctgctgttccgagtggctggcctcgagagcctcggagacctcttccccaacctcacggtcatccgcggctggaaactcttctacaactacgccctggtcatcttcgagatgaccaatctcaaggatattgggctttacaacctgaggaacattactcggggggccatcaggattgagaaaaatgctgacctctgttacctctccactgtggactggtccctgatcctggatgcggtgtccaataactacattgtggggaataagcccccaaaggaatgtggggacctgtgtccagggaccatggaggagaagccgatgtgtgagaagaccaccatcaacaatgagtacaactaccgctgctggaccacaaaccgctgccagaaaatgtgcccaagcacgtgtgggaagcgggcgtgcaccgagaacaatgagtgctgccaccccgagtgcctgggcagctgcagcgcgcctgacaacgacacggcctgtgtagcttgccgccactactactatgccggtgtctgtgtgcctgcctgcccgcccaacacctacaggtttgagggctggcgctgtgtggaccgtgacttctgcgccaacatcctcagcgccgagagcagcgactccgaggggtttgtgatccacgacggcgagtgcatgcaggagtgcccctcgggcttcatccgcaacggcagccagagcatgtactgcatcccttgtgaaggtccttgcccgaaggtctgtgaggaagaaaagaaaacaaagaccattgattctgttacttctgctcagatgctccaaggatgcaccatcttcaagggcaatttgctcattaacatccgacgggggaataacattgcttcagagctggagaacttcatggggctcatcgaggtggtgacgggctacgtgaagatccgccattctcatgccttggtctccttgtccttcctaaaaaaccttcgcctcatcctaggagaggagcagctagaagggaattactccttctacgtcctcgacaaccagaacttgcagcaactgtgggactgggaccaccgcaacctgaccatcaaagcagggaaaatgtactttgctttcaatcccaaattatgtgtttccgaaatttaccgcatggaggaagtgacggggactaaagggcgccaaagcaaaggggacataaacaccaggaacaacggggagagagcctcctgtgaaagtgacgtcctgcatttcacctccaccaccacgtcgaagaatcgcatcatcataacctggcaccggtaccggccccctgactacagggatctcatcagcttcaccgtttactacaaggaagcaccctttaagaatgtcacagagtatgatgggcaggatgcctgcggctccaacagctggaacatggtggacgtggacctcccgcccaacaaggacgtggagcccggcatcttactacatgggctgaagccctggactcagtacgccgtttacgtcaaggctgtgaccctcaccatggtggagaacgaccatatccgtggggccaagagtgagatcttgtacattcgcaccaatgcttcagttccttccattcccttggacgttctttcagcatcgaactcctcttctcagttaatcgtgaagtggaaccctccctctctgcccaacggcaacctgagttactacattgtgcgctggcagcggcagcctcaggacggctacctttaccggcacaattactgctccaaagacaaaatccccatcaggaagtatgccgacggcaccatcgacattgaggaggtcacagagaaccccaagactgaggtgtgtggtggggagaaagggccttgctgcgcctgccccaaaactgaagccgagaagcaggccgagaaggaggaggctgaataccgcaaagtctttgagaatttcctgcacaactccatcttcgtgcccagacctgaaaggaagcggagagatgtcatgcaagtggccaacaccaccatgtccagccgaagcaggaacaccacggccgcagacacctacaacatcaccgacccggaagagctggagacagagtaccctttctttgagagcagagtggataacaaggagagaactgtcatttctaaccttcggcctttcacattgtaccgcatcgatatccacagctgcaaccacgaggctgagaagctgggctgcagcgcctccaacttcgtctttgcaaggactatgcccgcagaaggagcagatgacattcctgggccagtgacctgggagccaaggcctgaaaactccatctttttaaagtggccggaacctgagaatcccaatggattgattctaatgtatgaaataaaatacggatcacaagttgaggatcagcgagaatgtgtgtccagacaggaatacaggaagtatggaggggccaagctaaaccggctaaacccggggaactacacagcccggattcaggccacatctctctctgggaatgggtcgtggacagatcctgtgttcttctatgtccaggccaaaacaggatatgaaaacttcatccatctgatcatcgctctgcccgtcgctgtcctgttgatcgtgggagggttggtgattatgctgtacgtcttccatagaaagagaaataacagcaggctggggaatggagtgctgtatgcctctgtgaacccggagtacttcagcgctgctgatgtgtacgttcctgatgagtgggaggtggctcgggagaagatcaccatgagccgggaacttgggcaggggtcgtttgggatggtctatgaaggagttgccaagggtgtggtgaaagatgaacctgaaaccagagtggccattaaaacagtgaacgaggccgcaagcatgcgtgagaggattgagtttctcaacgaagcttctgtgatgaaggagttcaattgtcaccatgtggtgcgattgctgggtgtggtgtcccaaggccagccaacactggtcatcatggaactgatgacacggggcgatctcaaaagttatctccggtctctgaggccagaaatggagaataatccagtcctagcacctccaagcctgagcaagatgattcagatggccggagagattgcagacggcatggcatacctcaacgccaataagttcgtccacagagaccttgctgcccggaattgcatggtagccgaagatttcacagtcaaaatcggagattttggtatgacgcgagatatctatgagacagactattaccggaaaggagggaaagggctgctgcccgtgcgctggatgtctcctgagtccctcaaggatggagtcttcaccacttactcggacgtctggtccttcggggtcgtcctctgggagatcgccacactggccgagcagccctaccagggcttgtccaacgagcaagtccttcgcttcgtcatggagggcggccttctggacaagccagacaactgtcctgacatgctgtttgaactgatgcgcatgtgctggcagtataaccccaagatgaggccttccttcctggagatcatcagcagcatcaaagaggagatggagcctggcttccgggaggtctccttctactacagcgaggagaacaagctgcccgagccggaggagctggacctggagccagagaacatggagagcgtccccctggacccctcggcctcctcgtcctccctgccactgcccgacagacactcaggacacaaggccgagaacggccccggccctggggtgctggtcctccgcgccagcttcgacgagagacagccttacgcccacatgaacgggggccgcaagaacgagcgggccttgccgctgccccagtcttcgacctgctgatccttggatcctgaatctgtgcaaacagtaacgtgtgcgcacgcgcagcggggtggggggggagagagagttttaacaatccattcacaagcctcctgtacctcagtggatcttcagaactgcccttgctgcccgcgggagacagcttctctgcagtaaaacacatttgggatgttccttttttcaatatgcaagcagctttttattccctgcccaaacccttaactgacatgggcctttaagaaccttaatgacaacacttaatagcaacagagcacttgagaaccagtctcctcactctgtccctgtccttccctgttctccctttctctctcctctctgcttcataacggaaaaataattgccacaagtccagctgggaagccctttttatcagtttgaggaagtggctgtccctgtggccccatccaaccactgtacacacccgcctgacaccgtgggtcattacaaaaaaacacgtggagatggaaatttttacctttatctttcacctttctagggacatgaaatttacaaagggccatcgttcatccaaggctgttaccattttaacgctgcctaattttgccaaaatcctgaactttctccctcatcggcccggcgctgattcctcgtgtccggaggcatgggtgagcatggcagctggttgctccatttgagagacacgctggcgacacactccgtccatccgactgcccctgctgtgctgctcaaggccacaggcacacaggtctcattgcttctgactagattattatttgggggaactggacacaataggtctttctctcagtgaaggtggggagaagctgaaccggcttccctgccctgcctccccagccccctgcccaacccccaagaatctggtggccatgggccccgaagcagtctggcggacaggcttggagtcaaggggccccatgcctgcttctctcccagccccagctcccccgcccgcccccaaggacacagatgggaaggggtttccagggactcagccccactgttgatgcaggtttgcaaggaaagaaattcaaacaccacaacagcagtaagaagaaaagcagtcaatggattcaagcattctaagctttgttgacattttctctgttcctaggacttcttcatgggtcttacagttctatgttagaccatgaaacatttgcatacacatcgtctttaatgtcacttttataacttttttacggttcagatattcatctatacgtctgtacagaaaaaaaaaagctgctattttttttgttcttgatctttgtggatttaatctatgaaaaccttcaggtccaccctctcccctttctgctcactccaagaaacttcttatgctttgtactagagtgcgtgactttcttcctcttttcccggtaatggatacttctatcacataatttgccatgaactgttggatgcctttttataaatacatcccccatccctgctcccacctgcccctttagttgttttctaacccgtaggctctctgggcacgaggcagaaagcaggccgggcacccatcctgagagggccgcgctcctctccccagcctgccctcacagcattggagcctgttacagtgcaagacatgatacaaactcaggtcagaaaaacaaaggttaaatatttcacacgtctttgttcagtgtttccactcaccgtggttgagaagcctcaccctctctttcccttgcctttgcttaggttgtgacacacatatatatatatttttttaattcttgggtacaacagcagtgttaaccgcagacactaggcatttggattactatttttcttaatggctatttaatccttccatcccacgagtggccctcgccacccccctcaccggaccgactgacctgtctttggaaccagaacatcccaagggaactccttcgcactggcgttgagtgggaccccgggatccaggctggcccagggcggcaccctcagggctgtgcccgctggagtgctaggtggaggcagcacagacgccacggtggcccaagagcccctttgcttcttgctgggggaccagggctgtggtgctggcccactttccctcggccaggaatccaggtccttggggcccaggggtcttgtcttgtttcatttttagcacttctcaccagagagatgacagcacaagagttgcttctgggatagaaatgtttaggagtaagaacaaagctgggatacggtgattgctagttgtgactgaagattcaacacagaaaagaaagtttatacggcttttttgctggtcagcagtttgtcccactgctttctctagtctctatcccatagcgtgttccctttaaaaaaaaaa

SEQ ID NO: 316845 - DNA, 6564 bp, Homo sapiens
  misc_feature (10)..(12): n is a, c, g, or t
tttttttttnnntttatgtcccccccccatccccccggcaattatacctaaatatggtgttttttttttttttttgagaaaggggaatttcatcccaaataaaaggaatgaagtctggctccggaggagggtccccgacctcgctgtgggggctcctgtttctctccgccgcgctctcgctctggccgacgagtggagaaatctgcgggccaggcatcgacatccgcaacgactatcagcagctgaagcgcctggagaactgcacggtgatcgagggctacctccacatcctgctcatctccaaggccgaggactaccgcagctaccgcttccccaagctcacggtcattaccgagtacttgctgctgttccgagtggctggcctcgagagcctcggagacctcttccccaacctcacggtcatccgcggctggaaactcttctacaactacgccctggtcatcttcgagatgaccaatctcaaggatattgggctttacaacctgaggaacattactcggggggccatcaggattgagaaaaatgctgacctctgttacctctccactgtggactggtccctgatcctggatgcggtgtccaataactacattgtggggaataagcccccaaaggaatgtggggacctgtgtccagggaccatggaggagaagccgatgtgtgagaagaccaccatcaacaatgagtacaactaccgctgctggaccacaaaccgctgccagaaaatgtgcccaagcacgtgtgggaagcgggcgtgcaccgagaacaatgagtgctgccaccccgagtgcctgggcagctgcagcgcgcctgacaacgacacggcctgtgtagcttgccgccactactactatgccggtgtctgtgtgcctgcctgcccgcccaacacctacaggtttgagggctggcgctgtgtggaccgtgacttctgcgccaacatcctcagcgccgagagcagcgactccgaggggtttgtgatccacgacggcgagtgcatgcaggagtgcccctcgggcttcatccgcaacggcagccagagcatgtactgcatcccttgtgaaggtccttgcccgaaggtctgtgaggaagaaaagaaaacaaagaccattgattctgttacttctgctcagatgctccaaggatgcaccatcttcaagggcaatttgctcattaacatccgacgggggaataacattgcttcagagctggagaacttcatggggctcatcgaggtggtgacgggctacgtgaagatccgccattctcatgccttggtctccttgtccttcctaaaaaaccttcgcctcatcctaggagaggagcagctagaagggaattactccttctacgtcctcgacaaccagaacttgcagcaactgtgggactgggaccaccgcaacctgaccatcaaagcagggaaaatgtactttgctttcaatcccaaattatgtgtttccgaaatttaccgcatggaggaagtgacggggactaaagggcgccaaagcaaaggggacataaacaccaggaacaacggggagagagcctcctgtgaaagtgacgtcctgcatttcacctccaccaccacgtcgaagaatcgcatcatcataacctggcaccggtaccggccccctgactacagggatctcatcagcttcaccgtttactacaaggaagcaccctttaagaatgtcacagagtatgatgggcaggatgcctgcggctccaacagctggaacatggtggacgtggacctcccgcccaacaaggacgtggagcccggcatcttactacatgggctgaagccctggactcagtacgccgtttacgtcaaggctgtgaccctcaccatggtggagaacgaccatatccgtggggccaagagtgagatcttgtacattcgcaccaatgcttcagttccttccattcccttggacgttctttcagcatcgaactcctcttctcagttaatcgtgaagtggaaccctccctctctgcccaacggcaacctgagttactacattgtgcgctggcagcggcagcctcaggacggctacctttaccggcacaattactgctccaaagacaaaatccccatcaggaagtatgccgacggcaccatcgacattgaggaggtcacagagaaccccaagactgaggtgtgtggtggggagaaagggccttgctgcgcctgccccaaaactgaagccgagaagcaggccgagaaggaggaggctgaataccgcaaagtctttgagaatttcctgcacaactccatcttcgtgcccagacctgaaaggaagcggagagatgtcatgcaagtggccaacaccaccatgtccagccgaagcaggaacaccacggccgcagacacctacaacatcaccgacccggaagagctggagacagagtaccctttctttgagagcagagtggataacaaggagagaactgtcatttctaaccttcggcctttcacattgtaccgcatcgatatccacagctgcaaccacgaggctgagaagctgggctgcagcgcctccaacttcgtctttgcaaggactatgcccgcagaaggagcagatgacattcctgggccagtgacctgggagccaaggcctgaaaactccatctttttaaagtggccggaacctgagaatcccaatggattgattctaatgtatgaaataaaatacggatcacaagttgaggatcagcgagaatgtgtgtccagacaggaatacaggaagtatggaggggccaagctaaaccggctaaacccggggaactacacagcccggattcaggccacatctctctctgggaatgggtcgtggacagatcctgtgttcttctatgtccaggccaaaacaggatatgaaaacttcatccatctgatcatcgctctgcccgtcgctgtcctgttgatcgtgggagggttggtgattatgctgtacgtcttccatagaaagagaaataacagcaggctggggaatggagtgctgtatgcctctgtgaacccggagtacttcagcgctgctgatgtgtacgttcctgatgagtgggaggtggctcgggagaagatcaccatgagccgggaacttgggcaggggtcgtttgggatggtctatgaaggagttgccaagggtgtggtgaaagatgaacctgaaaccagagtggccattaaaacagtgaacgaggccgcaagcatgcgtgagaggattgagtttctcaacgaagcttctgtgatgaaggagttcaattgtcaccatgtggtgcgattgctgggtgtggtgtcccaaggccagccaacactggtcatcatggaactgatgacacggggcgatctcaaaagttatctccggtctctgaggccagaaatggagaataatccagtcctagcacctccaagcctgagcaagatgattcagatggccggagagattgcagacggcatggcatacctcaacgccaataagttcgtccacagagaccttgctgcccggaattgcatggtagccgaagatttcacagtcaaaatcggagattttggtatgacgcgagatatctatgagacagactattaccggaaaggagggaaagggctgctgcccgtgcgctggatgtctcctgagtccctcaaggatggagtcttcaccacttactcggacgtctggtccttcggggtcgtcctctgggagatcgccacactggccgagcagccctaccagggcttgtccaacgagcaagtccttcgcttcgtcatggagggcggccttctggacaagccagacaactgtcctgacatgctgtttgaactgatgcgcatgtgctggcagtataaccccaagatgaggccttccttcctggagatcatcagcagcatcaaagaggagctggacctggagccagagaacatggagagcgtccccctggacccctcggcctcctcgtcctccctgccactgcccgacagacactcaggacacaaggccgagaacggccccggccctggggtgctggtcctccgcgccagcttcgacgagagacagccttacgcccacatgaacgggggccgcaagaacgagcgggccttgccgctgccccagtcttcgacctgctgatccttggatcctgaatctgtgcaaacagtaacgtgtgcgcacgcgcagcggggtggggggggagagagagttttaacaatccattcacaagcctcctgtacctcagtggatcttcagaactgcccttgctgcccgcgggagacagcttctctgcagtaaaacacatttgggatgttccttttttcaatatgcaagcagctttttattccctgcccaaacccttaactgacatgggcctttaagaaccttaatgacaacacttaatagcaacagagcacttgagaaccagtctcctcactctgtccctgtccttccctgttctccctttctctctcctctctgcttcataacggaaaaataattgccacaagtccagctgggaagccctttttatcagtttgaggaagtggctgtccctgtggccccatccaaccactgtacacacccgcctgacaccgtgggtcattacaaaaaaacacgtggagatggaaatttttacctttatctttcacctttctagggacatgaaatttacaaagggccatcgttcatccaaggctgttaccattttaacgctgcctaattttgccaaaatcctgaactttctccctcatcggcccggcgctgattcctcgtgtccggaggcatgggtgagcatggcagctggttgctccatttgagagacacgctggcgacacactccgtccatccgactgcccctgctgtgctgctcaaggccacaggcacacaggtctcattgcttctgactagattattatttgggggaactggacacaataggtctttctctcagtgaaggtggggagaagctgaaccggcttccctgccctgcctccccagccccctgcccaacccccaagaatctggtggccatgggccccgaagcagtctggcggacaggcttggagtcaaggggccccatgcctgcttctctcccagccccagctcccccgcccgcccccaaggacacagatgggaaggggtttccagggactcagccccactgttgatgcaggtttgcaaggaaagaaattcaaacaccacaacagcagtaagaagaaaagcagtcaatggattcaagcattctaagctttgttgacattttctctgttcctaggacttcttcatgggtcttacagttctatgttagaccatgaaacatttgcatacacatcgtctttaatgtcacttttataacttttttacggttcagatattcatctatacgtctgtacagaaaaaaaaaagctgctattttttttgttcttgatctttgtggatttaatctatgaaaaccttcaggtccaccctctcccctttctgctcactccaagaaacttcttatgctttgtactagagtgcgtgactttcttcctcttttcccggtaatggatacttctatcacataatttgccatgaactgttggatgcctttttataaatacatcccccatccctgctcccacctgcccctttagttgttttctaacccgtaggctctctgggcacgaggcagaaagcaggccgggcacccatcctgagagggccgcgctcctctccccagcctgccctcacagcattggagcctgttacagtgcaagacatgatacaaactcaggtcagaaaaacaaaggttaaatatttcacacgtctttgttcagtgtttccactcaccgtggttgagaagcctcaccctctctttcccttgcctttgcttaggttgtgacacacatatatatatatttttttaattcttgggtacaacagcagtgttaaccgcagacactaggcatttggattactatttttcttaatggctatttaatccttccatcccacgaaaaacagctgctgagtccaagggagcagcagagcgtggtccggcagggcctgttgtggccctcgccacccccctcaccggaccgactgacctgtctttggaaccagaacatcccaagggaactccttcgcactggcgttgagtgggaccccgggatccaggctggcccagggcggcaccctcagggctgtgcccgctggagtgctaggtggaggcagcacagacgccacggtggcccaagagcccctttgcttcttgctgggggaccagggctgtggtgctggcccactttccctcggccaggaatccaggtccttggggcccaggggtcttgtcttgtttcatttttagcacttctcaccagagagatgacagcacaagagttgcttctgggatagaaatgtttaggagtaagaacaaagctgggatacggtgattgctagttgtgactgaagattcaacacagaaaagaaagtttatacggcttttttgctggtcagcagtttgtcccactgctttctctagtctctatcccatagcgtgttccctttaaaaaaaaaa

SEQ ID NO: 316846 - DNA, 4717 bp, Homo sapiens
ctcctaacctcaggtgatttgcccgcctcggcctcccaaagtgctgggattatagccttgagccaccacatctggccgagaccagctatcttcttgattaaaggtactgagagctattatttttccttacaagcatgtataacggctttcattcccactcttgttttggcttttcttttccgagaagacaaaatccccatcaggaagtatgccgacggcaccatcgacattgaggaggtcacagagaaccccaagactgaggtgtgtggtggggagaaagggccttgctgcgcctgccccaaaactgaagccgagaagcaggccgagaaggaggaggctgaataccgcaaagtctttgagaatttcctgcacaactccatcttcgtgcccagacctgaaaggaagcggagagatgtcatgcaagtggccaacaccaccatgtccagccgaagcaggaacaccacggccgcagacacctacaacatcaccgacccggaagagctggagacagagtaccctttctttgagagcagagtggataacaaggagagaactgtcatttctaaccttcggcctttcacattgtaccgcatcgatatccacagctgcaaccacgaggctgagaagctgggctgcagcgcctccaacttcgtctttgcaaggactatgcccgcagaaggagcagatgacattcctgggccagtgacctgggagccaaggcctgaaaactccatctttttaaagtggccggaacctgagaatcccaatggattgattctaatgtatgaaataaaatacggatcacaagttgaggatcagcgagaatgtgtgtccagacaggaatacaggaagtatggaggggccaagctaaaccggctaaacccggggaactacacagcccggattcaggccacatctctctctgggaatgggtcgtggacagatcctgtgttcttctatgtccaggccaaaacaggatatgaaaacttcatccatctgatcatcgctctgcccgtcgctgtcctgttgatcgtgggagggttggtgattatgctgtacgtcttccatagaaagagaaataacagcaggctggggaatggagtgctgtatgcctctgtgaacccggagtacttcagcgctgctgatgtgtacgttcctgatgagtgggaggtggctcgggagaagatcaccatgagccgggaacttgggcaggggtcgtttgggatggtctatgaaggagttgccaagggtgtggtgaaagatgaacctgaaaccagagtggccattaaaacagtgaacgaggccgcaagcatgcgtgagaggattgagtttctcaacgaagcttctgtgatgaaggagttcaattgtcaccatgtggtgcgattgctgggtgtggtgtcccaaggccagccaacactggtcatcatggaactgatgacacggggcgatctcaaaagttatctccggtctctgaggccagaaatggagaataatccagtcctagcacctccaagcctgagcaagatgattcagatggccggagagattgcagacggcatggcatacctcaacgccaataagttcgtccacagagaccttgctgcccggaattgcatggtagccgaagatttcacagtcaaaatcggagattttggtatgacgcgagatatctatgagacagactattaccggaaaggagggaaagggctgctgcccgtgcgctggatgtctcctgagtccctcaaggatggagtcttcaccacttactcggacgtctggtccttcggggtcgtcctctgggagatcgccacactggccgagcagccctaccagggcttgtccaacgagcaagtccttcgcttcgtcatggagggcggccttctggacaagccagacaactgtcctgacatgctgtttgaactgatgcgcatgtgctggcagtataaccccaagatgaggccttccttcctggagatcatcagcagcatcaaagaggagatggagcctggcttccgggaggtctccttctactacagcgaggagaacaagctgcccgagccggaggagctggacctggagccagagaacatggagagcgtccccctggacccctcggcctcctcgtcctccctgccactgcccgacagacactcaggacacaaggccgagaacggccccggccctggggtgctggtcctccgcgccagcttcgacgagagacagccttacgcccacatgaacgggggccgcaagaacgagcgggccttgccgctgccccagtcttcgacctgctgatccttggatcctgaatctgtgcaaacagtaacgtgtgcgcacgcgcagcggggtggggggggagagagagttttaacaatccattcacaagcctcctgtacctcagtggatcttcagaactgcccttgctgcccgcgggagacagcttctctgcagtaaaacacatttgggatgttccttttttcaatatgcaagcagctttttattccctgcccaaacccttaactgacatgggcctttaagaaccttaatgacaacacttaatagcaacagagcacttgagaaccagtctcctcactctgtccctgtccttccctgttctccctttctctctcctctctgcttcataacggaaaaataattgccacaagtccagctgggaagccctttttatcagtttgaggaagtggctgtccctgtggccccatccaaccactgtacacacccgcctgacaccgtgggtcattacaaaaaaacacgtggagatggaaatttttacctttatctttcacctttctagggacatgaaatttacaaagggccatcgttcatccaaggctgttaccattttaacgctgcctaattttgccaaaatcctgaactttctccctcatcggcccggcgctgattcctcgtgtccggaggcatgggtgagcatggcagctggttgctccatttgagagacacgctggcgacacactccgtccatccgactgcccctgctgtgctgctcaaggccacaggcacacaggtctcattgcttctgactagattattatttgggggaactggacacaataggtctttctctcagtgaaggtggggagaagctgaaccggcttccctgccctgcctccccagccccctgcccaacccccaagaatctggtggccatgggccccgaagcagtctggcggacaggcttggagtcaaggggccccatgcctgcttctctcccagccccagctcccccgcccgcccccaaggacacagatgggaaggggtttccagggactcagccccactgttgatgcaggtttgcaaggaaagaaattcaaacaccacaacagcagtaagaagaaaagcagtcaatggattcaagcattctaagctttgttgacattttctctgttcctaggacttcttcatgggtcttacagttctatgttagaccatgaaacatttgcatacacatcgtctttaatgtcacttttataacttttttacggttcagatattcatctatacgtctgtacagaaaaaaaaaagctgctattttttttgttcttgatctttgtggatttaatctatgaaaaccttcaggtccaccctctcccctttctgctcactccaagaaacttcttatgctttgtactagagtgcgtgactttcttcctcttttcccggtaatggatacttctatcacataatttgccatgaactgttggatgcctttttataaatacatcccccatccctgctcccacctgcccctttagttgttttctaacccgtaggctctctgggcacgaggcagaaagcaggccgggcacccatcctgagagggccgcgctcctctccccagcctgccctcacagcattggagcctgttacagtgcaagacatgatacaaactcaggtcagaaaaacaaaggttaaatatttcacacgtctttgttcagtgtttccactcaccgtggttgagaagcctcaccctctctttcccttgcctttgcttaggttgtgacacacatatatatatatttttttaattcttgggtacaacagcagtgttaaccgcagacactaggcatttggattactatttttcttaatggctatttaatccttccatcccacgaaaaacagctgctgagtccaagggagcagcagagcgtggtccggcagggcctgttgtggccctcgccacccccctcaccggaccgactgacctgtctttggaaccagaacatcccaagggaactccttcgcactggcgttgagtgggaccccgggatccaggctggcccagggcggcaccctcagggctgtgcccgctggagtgctaggtggaggcagcacagacgccacggtggcccaagagcccctttgcttcttgctgggggaccagggctgtggtgctggcccactttccctcggccaggaatccaggtccttggggcccaggggtcttgtcttgtttcatttttagcacttctcaccagagagatgacagcacaagagttgcttctgggatagaaatgtttaggagtaagaacaaagctgggatacggtgattgctagttgtgactgaagattcaacacagaaaagaaagtttatacggcttttttgctggtcagcagtttgtcccactgctttctctagtctctatcccatagcgtgttccctttaaaaaaaaaa

SEQ ID NO: 316847 - DNA, 3638 bp, Homo sapiens
tggttagactgtgaactatcgtaatagtaatgcctctgtgaacccggagtaatttagcgctgctgaagtgtacgttcctgatgagtgggaggtggctcgggagaagatcaccatgagccgggaacttgggcaggggtcgtttgggatggtctatgaaggagttgccaagggtgtggtgaaagatgaacctgaaaccagagtggccattaaaacagtgaacgaggccgcaagcatgcgtgagaggattgagtttctcaacgaagcttctgtgatgaaggagttcaattgtcaccatgtggtgcgattgctgggtgtggtgtcccaaggccagccaacactggtcatcatggaactgatgacacggggcgatctcaaaagttatctccggtctctgaggccagaaatggagaataatccagtcctagcacctccaagcctgagcaagatgattcagatggccggagagattgcagacggcatggcatacctcaacgccaataagttcgtccacagagaccttgctgcccggaattgcatggtagccgaagatttcacagtcaaaatcggagattttggtatgacgcgagatatctatgagacagactattaccggaaaggagggaaagggctgctgcccgtgcgctggatgtctcctgagtccctcaaggatggagtcttcaccacttactcggacgtctggtccttcggggtcgtcctctgggagatcgccacactggccgagcagccctaccagggcttgtccaacgagcaagtccttcgcttcgtcatggagggcggccttctggacaagccagacaactgtcctgacatgctgtttgaactgatgcgcatgtgctggcagtataaccccaagatgaggccttccttcctggagatcatcagcagcatcaaagaggagatggagcctggcttccgggaggtctccttctactacagcgaggagaacaagctgcccgagccggaggagctggacctggagccagagaacatggagagcgtccccctggacccctcggcctcctcgtcctccctgccactgcccgacagacactcaggacacaaggccgagaacggccccggccctggggtgctggtcctccgcgccagcttcgacgagagacagccttacgcccacatgaacgggggccgcaagaacgagcgggccttgccgctgccccagtcttcgacctgctgatccttggatcctgaatctgtgcaaacagtaacgtgtgcgcacgcgcagcggggtggggggggagagagagttttaacaatccattcacaagcctcctgtacctcagtggatcttcagaactgcccttgctgcccgcgggagacagcttctctgcagtaaaacacatttgggatgttccttttttcaatatgcaagcagctttttattccctgcccaaacccttaactgacatgggcctttaagaaccttaatgacaacacttaatagcaacagagcacttgagaaccagtctcctcactctgtccctgtccttccctgttctccctttctctctcctctctgcttcataacggaaaaataattgccacaagtccagctgggaagccctttttatcagtttgaggaagtggctgtccctgtggccccatccaaccactgtacacacccgcctgacaccgtgggtcattacaaaaaaacacgtggagatggaaatttttacctttatctttcacctttctagggacatgaaatttacaaagggccatcgttcatccaaggctgttaccattttaacgctgcctaattttgccaaaatcctgaactttctccctcatcggcccggcgctgattcctcgtgtccggaggcatgggtgagcatggcagctggttgctccatttgagagacacgctggcgacacactccgtccatccgactgcccctgctgtgctgctcaaggccacaggcacacaggtctcattgcttctgactagattattatttgggggaactggacacaataggtctttctctcagtgaaggtggggagaagctgaaccggcttccctgccctgcctccccagccccctgcccaacccccaagaatctggtggccatgggccccgaagcagtctggcggacaggcttggagtcaaggggccccatgcctgcttctctcccagccccagctcccccgcccgcccccaaggacacagatgggaaggggtttccagggactcagccccactgttgatgcaggtttgcaaggaaagaaattcaaacaccacaacagcagtaagaagaaaagcagtcaatggattcaagcattctaagctttgttgacattttctctgttcctaggacttcttcatgggtcttacagttctatgttagaccatgaaacatttgcatacacatcgtctttaatgtcacttttataacttttttacggttcagatattcatctatacgtctgtacagaaaaaaaaaagctgctattttttttgttcttgatctttgtggatttaatctatgaaaaccttcaggtccaccctctcccctttctgctcactccaagaaacttcttatgctttgtactagagtgcgtgactttcttcctcttttcccggtaatggatacttctatcacataatttgccatgaactgttggatgcctttttataaatacatcccccatccctgctcccacctgcccctttagttgttttctaacccgtaggctctctgggcacgaggcagaaagcaggccgggcacccatcctgagagggccgcgctcctctccccagcctgccctcacagcattggagcctgttacagtgcaagacatgatacaaactcaggtcagaaaaacaaaggttaaatatttcacacgtctttgttcagtgtttccactcaccgtggttgagaagcctcaccctctctttcccttgcctttgcttaggttgtgacacacatatatatatatttttttaattcttgggtacaacagcagtgttaaccgcagacactaggcatttggattactatttttcttaatggctatttaatccttccatcccacgaaaaacagctgctgagtccaagggagcagcagagcgtggtccggcagggcctgttgtggccctcgccacccccctcaccggaccgactgacctgtctttggaaccagaacatcccaagggaactccttcgcactggcgttgagtgggaccccgggatccaggctggcccagggcggcaccctcagggctgtgcccgctggagtgctaggtggaggcagcacagacgccacggtggcccaagagcccctttgcttcttgctgggggaccagggctgtggtgctggcccactttccctcggccaggaatccaggtccttggggcccaggggtcttgtcttgtttcatttttagcacttctcaccagagagatgacagcacaagagttgcttctgggatagaaatgtttaggagtaagaacaaagctgggatacggtgattgctagttgtgactgaagattcaacacagaaaagaaagtttatacggcttttttgctggtcagcagtttgtcccactgctttctctagtctctatcccatagcgtgttccctttaaaaaaaaaa

SEQ ID NO: 316848 - DNA, 567 bp, Homo sapiens
  misc_feature (10)..(12): n is a, c, g, or t
tttttttttnnntttatgtcccccccccatccccccggcaattatacctaaatatggtgttttttttttttttttgagaaaggggaatttcatcccaaataaaaggaatgaagtctggctccggaggagggtccccgacctcgctgtgggggctcctgtttctctccgccgcgctctcgctctggccgacgagtggagaaagtgagtatgtgcccgccgcccgcggccactgcgggaacttttcctccgaggggctgcgccctgtttgcgaaacccgagttgccaccgtcgcagctgtcgggcccccgggctcgggagcggcggggtggggcgcagggcggctctgccgggagggaggctgcagcggacccgggacccgggctcgttcgtctggagccccgcggccctggccttggttttgttgtggtcggcgtcgtcgtcgccctctcttctgccgccccgcacttcctttgtacgtagttaataagcagtgtcgctccacattcgctgtcttttgcaatctgatagcttttgttttggtggtgtcgggtgggggttagtagggaa

SEQ ID NO: 316849 - DNA, 422 bp, Homo sapiens
accaccacgtcgaagaatcgcatcatcataacctggcaccggtaccggccccctgactacagggatctcatcagcttcaccgtttactacaaggaagcgtgagtttctgctttgggtgatgccattctgttgacagggctacgaatgggagaggccagtctttcgatccttgaatgggctggctgaatacagggggtcagcagagtccccagggagagccacgccaaacatccctacttcatcctcatgcaccctctcgggctgtccctgtgatgtcagtcacagccagtgacagccatgattgggaaagtgttagctcgaggcctgtcattctttagtgagtgattagaggtgtttgaataaaataaacccaaaatggggaaagcttgctttttccagaattaggtcagtccagactcatg

SEQ ID NO: 316850 - DNA, 6633 bp, Homo sapiens
  misc_feature (10)..(12): n is a, c, g, or t
tttttttttnnntttatgtcccccccccatccccccggcaattatacctaaatatggtgttttttttttttttttgagaaaggggaatttcatcccaaataaaaggaatgaagtctggctccggaggagggtccccgacctcgctgtgggggctcctgtttctctccgccgcgctctcgctctggccgacgagtggagaaatctgcgggccaggcatcgacatccgcaacgactatcagcagctgaagcgcctggagaactgcacggtgatcgagggctacctccacatcctgctcatctccaaggccgaggactaccgcagctaccgcttccccaagctcacggtcattaccgagtacttgctgctgttccgagtggctggcctcgagagcctcggagacctcttccccaacctcacggtcatccgcggctggaaactcttctacaactacgccctggtcatcttcgagatgaccaatctcaaggatattgggctttacaacctgaggaacattactcggggggccatcaggattgagaaaaatgctgacctctgttacctctccactgtggactggtccctgatcctggatgcggtgtccaataactacattgtggggaataagcccccaaaggaatgtggggacctgtgtccagggaccatggaggagaagccgatgtgtgagaagaccaccatcaacaatgagtacaactaccgctgctggaccacaaaccgctgccagaaaatgtgcccaagcacgtgtgggaagcgggcgtgcaccgagaacaatgagtgctgccaccccgagtgcctgggcagctgcagcgcgcctgacaacgacacggcctgtgtagcttgccgccactactactatgccggtgtctgtgtgcctgcctgcccgcccaacacctacaggtttgagggctggcgctgtgtggaccgtgacttctgcgccaacatcctcagcgccgagagcagcgactccgaggggtttgtgatccacgacggcgagtgcatgcaggagtgcccctcgggcttcatccgcaacggcagccagagcatgtactgcatcccttgtgaaggtccttgcccgaaggtctgtgaggaagaaaagaaaacaaagaccattgattctgttacttctgctcagatgctccaaggatgcaccatcttcaagggcaatttgctcattaacatccgacgggggaataacattgcttcagagctggagaacttcatggggctcatcgaggtggtgacgggctacgtgaagatccgccattctcatgccttggtctccttgtccttcctaaaaaaccttcgcctcatcctaggagaggagcagctagaagggaattactccttctacgtcctcgacaaccagaacttgcagcaactgtgggactgggaccaccgcaacctgaccatcaaagcagggaaaatgtactttgctttcaatcccaaattatgtgtttccgaaatttaccgcatggaggaagtgacggggactaaagggcgccaaagcaaaggggacataaacaccaggaacaacggggagagagcctcctgtgaaagtgacgtcctgcatttcacctccaccaccacgtcgaagaatcgcatcatcataacctggcaccggtaccggccccctgactacagggatctcatcagcttcaccgtttactacaaggaagcaccctttaagaatgtcacagagtatgatgggcaggatgcctgcggctccaacagctggaacatggtggacgtggacctcccgcccaacaaggacgtggagcccggcatcttactacatgggctgaagccctggactcagtacgccgtttacgtcaaggctgtgaccctcaccatggtggagaacgaccatatccgtggggccaagagtgagatcttgtacattcgcaccaatgcttcagttccttccattcccttggacgttctttcagcatcgaactcctcttctcagttaatcgtgaagtggaaccctccctctctgcccaacggcaacctgagttactacattgtgcgctggcagcggcagcctcaggacggctacctttaccggcacaattactgctccaaagacaaaatccccatcaggaagtatgccgacggcaccatcgacattgaggaggtcacagagaaccccaagactgaggtgtgtggtggggagaaagggccttgctgcgcctgccccaaaactgaagccgagaagcaggccgagaaggaggaggctgaataccgcaaagtctttgagaatttcctgcacaactccatcttcgtgcccagacctgaaaggaagcggagagatgtcatgcaagtggccaacaccaccatgtccagccgaagcaggaacaccacggccgcagacacctacaacatcaccgacccggaagagctggagacagagtaccctttctttgagagcagagtggataacaaggagagaactgtcatttctaaccttcggcctttcacattgtaccgcatcgatatccacagctgcaaccacgaggctgagaagctgggctgcagcgcctccaacttcgtctttgcaaggactatgcccgcagaaggagcagatgacattcctgggccagtgacctgggagccaaggcctgaaaactccatctttttaaagtggccggaacctgagaatcccaatggattgattctaatgtatgaaataaaatacggatcacaagttgaggatcagcgagaatgtgtgtccagacaggaatacaggaagtatggaggggccaagctaaaccggctaaacccggggaactacacagcccggattcaggccacatctctctctgggaatgggtcgtggacagatcctgtgttcttctatgtccaggccaaaacaggatatgaaaacttcatccatctgatcatcgctctgcccgtcgctgtcctgttgatcgtgggagggttggtgattatgctgtacgtcttccatagaaagagaaataacagcaggctggggaatggagtgctgtatgcctctgtgaacccggagtacttcagcgctgctgatgtgtacgttcctgatgagtgggaggtggctcgggagaagatcaccatgagccgggaacttgggcaggggtcgtttgggatggtctatgaaggagttgccaagggtgtggtgaaagatgaacctgaaaccagagtggccattaaaacagtgaacgaggccgcaagcatgcgtgagaggattgagtttctcaacgaagcttctgtgatgaaggagttcaattgtcaccatgtggtgcgattgctgggtgtggtgtcccaaggccagccaacactggtcatcatggaactgatgacacggggcgatctcaaaagttatctccggtctctgaggccagaaatggagaataatccagtcctagcacctccaagcctgagcaagatgattcagatggccggagagattgcagacggcatggcatacctcaacgccaataagttcgtccacagagaccttgctgcccggaattgcatggtagccgaagatttcacagtcaaaatcggagattttggtatgacgcgagatatctatgagacagactattaccggaaaggagggaaagggctgctgcccgtgcgctggatgtctcctgagtccctcaaggatggagtcttcaccacttactcggacgtctggtccttcggggtcgtcctctgggagatcgccacactggccgagcagccctaccagggcttgtccaacgagcaagtccttcgcttcgtcatggagggcggccttctggacaagccagacaactgtcctgacatgctgtttgaactgatgcgcatgtgctggcagtataaccccaagatgaggccttccttcctggagatcatcagcagcatcaaagaggagatggagcctggcttccgggaggtctccttctactacagcgaggagaacaagctgcccgagccggaggagctggacctggagccagagaacatggagagcgtccccctggacccctcggcctcctcgtcctccctgccactgcccgacagacactcaggacacaaggccgagaacggccccggccctggggtgctggtcctccgcgccagcttcgacgagagacagccttacgcccacatgaacgggggccgcaagaacgagcgggccttgccgctgccccagtcttcgacctgctgatccttggatcctgaatctgtgcaaacagtaacgtgtgcgcacgcgcagcggggtggggggggagagagagttttaacaatccattcacaagcctcctgtacctcagtggatcttcagaactgcccttgctgcccgcgggagacagcttctctgcagtaaaacacatttgggatgttccttttttcaatatgcaagcagctttttattccctgcccaaacccttaactgacatgggcctttaagaaccttaatgacaacacttaatagcaacagagcacttgagaaccagtctcctcactctgtccctgtccttccctgttctccctttctctctcctctctgcttcataacggaaaaataattgccacaagtccagctgggaagccctttttatcagtttgaggaagtggctgtccctgtggccccatccaaccactgtacacacccgcctgacaccgtgggtcattacaaaaaaacacgtggagatggaaatttttacctttatctttcacctttctagggacatgaaatttacaaagggccatcgttcatccaaggctgttaccattttaacgctgcctaattttgccaaaatcctgaactttctccctcatcggcccggcgctgattcctcgtgtccggaggcatgggtgagcatggcagctggttgctccatttgagagacacgctggcgacacactccgtccatccgactgcccctgctgtgctgctcaaggccacaggcacacaggtctcattgcttctgactagattattatttgggggaactggacacaataggtctttctctcagtgaaggtggggagaagctgaaccggcttccctgccctgcctccccagccccctgcccaacccccaagaatctggtggccatgggccccgaagcagtctggcggacaggcttggagtcaaggggccccatgcctgcttctctcccagccccagctcccccgcccgcccccaaggacacagatgggaaggggtttccagggactcagccccactgttgatgcaggtttgcaaggaaagaaattcaaacaccacaacagcagtaagaagaaaagcagtcaatggattcaagcattctaagctttgttgacattttctctgttcctaggacttcttcatgggtcttacagttctatgttagaccatgaaacatttgcatacacatcgtctttaatgtcacttttataacttttttacggttcagatattcatctatacgtctgtacagaaaaaaaaaagctgctattttttttgttcttgatctttgtggatttaatctatgaaaaccttcaggtccaccctctcccctttctgctcactccaagaaacttcttatgctttgtactagagtgcgtgactttcttcctcttttcccggtaatggatacttctatcacataatttgccatgaactgttggatgcctttttataaatacatcccccatccctgctcccacctgcccctttagttgttttctaacccgtaggctctctgggcacgaggcagaaagcaggccgggcacccatcctgagagggccgcgctcctctccccagcctgccctcacagcattggagcctgttacagtgcaagacatgatacaaactcaggtcagaaaaacaaaggttaaatatttcacacgtctttgttcagtgtttccactcaccgtggttgagaagcctcaccctctctttcccttgcctttgcttaggttgtgacacacatatatatatatttttttaattcttgggtacaacagcagtgttaaccgcagacactaggcatttggattactatttttcttaatggctatttaatccttccatcccacgaaaaacagctgctgagtccaagggagcagcagagcgtggtccggcagggcctgttgtggccctcgccacccccctcaccggaccgactgacctgtctttggaaccagaacatcccaagggaactccttcgcactggcgttgagtgggaccccgggatccaggctggcccagggcggcaccctcagggctgtgcccgctggagtgctaggtggaggcagcacagacgccacggtggcccaagagcccctttgcttcttgctgggggaccagggctgtggtgctggcccactttccctcggccaggaatccaggtccttggggcccaggggtcttgtcttgtttcatttttagcacttctcaccagagagatgacagcacaagagttgcttctgggatagaaatgtttaggagtaagaacaaagctgggatacggtgattgctagttgtgactgaagattcaacacagaaaagaaagtttatacggcttttttgctggtcagcagtttgtcccactgctttctctagtctctatcccatagcgtgttccctttaaaaaaaaaa

SEQ ID NO: 316851 - DNA, 6491 bp, Homo sapiens
  misc_feature (10)..(12): n is a, c, g, or t
tttttttttnnntttatgtcccccccccatccccccggcaattatacctaaatatggtgttttttttttttttttgagaaaggggaatttcatcccaaataaaaggaatgaagtctggctccggaggagggtccccgacctcgctgtgggggctcctgtttctctccgccgcgctctcgctctggccgacgagtggagaaatctgcgggccaggcatcgacatccgcaacgactatcagcagctgaagcgcctggagaactgcacggtgatcgagggctacctccacatcctgctcatctccaaggccgaggactaccgcagctaccgcttccccaagctcacggtcattaccgagtacttgctgctgttccgagtggctggcctcgagagcctcggagacctcttccccaacctcacggtcatccgcggctggaaactcttctacaactacgccctggtcatcttcgagatgaccaatctcaaggatattgggctttacaacctgaggaacattactcggggggccatcaggattgagaaaaatgctgacctctgttacctctccactgtggactggtccctgatcctggatgcggtgtccaataactacattgtggggaataagcccccaaaggaatgtggggacctgtgtccagggaccatggaggagaagccgatgtgtgagaagaccaccatcaacaatgagtacaactaccgctgctggaccacaaaccgctgccagaaaatgtgcccaagcacgtgtgggaagcgggcgtgcaccgagaacaatgagtgctgccaccccgagtgcctgggcagctgcagcgcgcctgacaacgacacggcctgtgtagcttgccgccactactactatgccggtgtctgtgtgcctgcctgcccgcccaacacctacaggtttgagggctggcgctgtgtggaccgtgacttctgcgccaacatcctcagcgccgagagcagcgactccgaggggtttgtgatccacgacggcgagtgcatgcaggagtgcccctcgggcttcatccgcaacggcagccagagcatgtactgcatcccttgtgaaggtccttgcccgaaggtctgtgaggaagaaaagaaaacaaagaccattgattctgttacttctgctcagatgctccaaggatgcaccatcttcaagggcaatttgctcattaacatccgacgggggaataacattgcttcagagctggagaacttcatggggctcatcgaggtggtgacgggctacgtgaagatccgccattctcatgccttggtctccttgtccttcctaaaaaaccttcgcctcatcctaggagaggagcagctagaagggaattactccttctacgtcctcgacaaccagaacttgcagcaactgtgggactgggaccaccgcaacctgaccatcaaagcagggaaaatgtactttgctttcaatcccaaattatgtgtttccgaaatttaccgcatggaggaagtgacggggactaaagggcgccaaagcaaaggggacataaacaccaggaacaacggggagagagcctcctgtgaaagtgacgtcctgcatttcacctccaccaccacgtcgaagaatcgcatcatcataacctggcaccggtaccggccccctgactacagggatctcatcagcttcaccgtttactacaaggaagcaccctttaagaatgtcacagagtatgatgggcaggatgcctgcggctccaacagctggaacatggtggacgtggacctcccgcccaacaaggacgtggagcccggcatcttactacatgggctgaagccctggactcagtacgccgtttacgtcaaggctgtgaccctcaccatggtggagaacgaccatatccgtggggccaagagtgagatcttgtacattcgcaccaatgcttcagttccttccattcccttggacgttctttcagcatcgaactcctcttctcagttaatcgtgaagtggaaccctccctctctgcccaacggcaacctgagttactacattgtgcgctggcagcggcagcctcaggacggctacctttaccggcacaattactgctccaaagacaaaatccccatcaggaagtatgccgacggcaccatcgacattgaggaggtcacagagaaccccaagactgaggtgtgtggtggggagaaagggccttgctgcgcctgccccaaaactgaagccgagaagcaggccgagaaggaggaggctgaataccgcaaagtctttgagaatttcctgcacaactccatcttcgtgcccagacctgaaaggaagcggagagatgtcatgcaagtggccaacaccaccatgtccagccgaagcaggaacaccacggccgcagacacctacaacatcaccgacccggaagagctggagacagagtaccctttctttgagagcagagtggataacaaggagagaactgtcatttctaaccttcggcctttcacattgtaccgcatcgatatccacagctgcaaccacgaggctgagaagctgggctgcagcgcctccaacttcgtctttgcaaggactatgcccgcagaaggagcagatgacattcctgggccagtgacctgggagccaaggcctgaaaactccatctttttaaagtggccggaacctgagaatcccaatggattgattctaatgtatgaaataaaatacggatcacaagttgaggatcagcgagaatgtgtgtccagacaggaatacaggaagtatggaggggccaagctaaaccggctaaacccggggaactacacagcccggattcaggccacatctctctctgggaatgggtcgtggacagatcctgtgttcttctatgtccaggccaaaacaggatatgaaaacttcatccatctgatcatcgctctgcccgtcgctgtcctgttgatcgtgggagggttggtgattatgctgtacgtcttccatagaaagagaaataacagcaggctggggaatggagtgctgtatgcctctgtgaacccggagtacttcagcgctgctgatgtgtacgttcctgatgagtgggaggtggctcgggagaagatcaccatgagccgggaacttgggcaggggtcgtttgggatggtctatgaaggagttgccaagggtgtggtgaaagatgaacctgaaaccagagtggccattaaaacagtgaacgaggccgcaagcatgcgtgagaggattgagtttctcaacgaagcttctgtgatgaaggagttcaattgtcaccatgtggtgcgattgctgggtgtggtgtcccaaggccagccaacactggtcatcatggaactgatgacacggggcgatctcaaaagttatctccggtctctgaggccagaaatggagaataatccagtcctagcacctccaagcctgagcaagatgattcagatggccggagagattgcagacggcatggcatacctcaacgccaataagttcgtccacagagaccttgctgcccggaattgcatggtagccgaagatttcacagtcaaaatcggagattttggtatgacgcgagatatctatgagacagactattaccggaaaggagggaaagggctgctgcccgtgcgctggatgtctcctgagtccctcaaggatggagtcttcaccacttactcggacgtctggtccttcggggtcgtcctctgggagatcgccacactggccgagcagccctaccagggcttgtccaacgagcaagtccttcgcttcgtcatggagggcggccttctggacaagccagacaactgtcctgacatgctgtttgaactgatgcgcatgtgctggcagtataaccccaagatgaggccttccttcctggagatcatcagcagcatcaaagaggagatggagcctggcttccgggaggtctccttctactacagcgaggagaacaagctgcccgagccggaggagctggacctggagccagagaacatggagagcgtccccctggacccctcggcctcctcgtcctccctgccactgcccgacagacactcaggacacaaggccgagaacggccccggccctggggtgctggtcctccgcgccagcttcgacgagagacagccttacgcccacatgaacgggggccgcaagaacgagcgggccttgccgctgccccagtcttcgacctgctgatccttggatcctgaatctgtgcaaacagtaacgtgtgcgcacgcgcagcggggtggggggggagagagagttttaacaatccattcacaagcctcctgtacctcagtggatcttcagaactgcccttgctgcccgcgggagacagcttctctgcagtaaaacacatttgggatgttccttttttcaatatgcaagcagctttttattccctgcccaaacccttaactgacatgggcctttaagaaccttaatgacaacacttaatagcaacagagcacttgagaaccagtctcctcactctgtccctgtccttccctgttctccctttctctctcctctctgcttcataacggaaaaataattgccacaagtccagctgggaagccctttttatcagtttgaggaagtggctgtccctgtggccccatccaaccactgtacacacccgcctgacaccgtgggtcattacaaaaaaacacgtggagatggaaatttttacctttatctttcacctttctagggacatgaaatttacaaagggccatcgttcatccaaggctgttaccattttaacgctgcctaattttgccaaaatcctgaactttctccctcatcggcccggcgctgattcctcgtgtccggaggcatgggtgagcatggcagctggttgctccatttgagagacacgctggcgacacactccgtccatccgactgcccctgctgtgctgctcaaggccacaggcacacaggtctcattgcttctgactagattattatttgggggaactggacacaataggtctttctctcagtgaaggtggggagaagctgaaccggcttccctgccctgcctccccagccccctgcccaacccccaagaatctggtggccatgggccccgaagcagtctggcggacaggcttggagtcaaggggccccatgcctgcttctctcccagccccagctcccccgcccgcccccaaggacacagatgggaaggggtttccagggactcagccccactgttgatgcaggtttgcaaggaaagaaattcaaacaccacaacagcagtaagaagaaaagcagtcaatggattcaagcattctaagctttgttgacattttctctgttcctaggacttcttcatgggtcttacagttctatgttagaccatgaaacatttgcatacacatcgtctttaatgtcacttttataacttttttacggttcagatattcatctatacgtctgtacagaaaaaaaaaagctgctattttttttgttcttgatctttgtggatttaatctatgaaaaccttcaggtccaccctctcccctttctgctcactccaagaaacttcttatgctttgtactagagtgcgtgactttcttcctcttttcccggtaatggatacttctatcacataatttgccatgaactgttggatgcctttttataaatacatcccccatccctgctcccacctgcccctttagttgttttctaacccgtaggctctctgggcacgaggcagaaagcaggccgggcacccatcctgagagggccgcgctcctctccccagcctgccctcacagcattggagcctgttacagtgcaagacatgatacaaactcaggtcagaaaaacaaaggttaaatatttcacacgtctttgttcagtgtttccactcaccgtggttgagaagcctcaccctctctttcccttgcctttgcttaggttgtgacacacatatatatatatttttttaattcttgggtacaacagcagtgttaaccgcagacactaggcatttggattactatttttcttaatggctatttaatccttccatcccacgaaaaacagctgctgagtccaagggagcagcagagcgtggtccggcagggcctgttgtggccctcgccacccccctcaccggaccgactgacctgtctttggaaccagaacatcccaagggaactccttcgcactggcgttgagtgggaccccgggatccaggaatccaggtccttggggcccaggggtcttgtcttgtttcatttttagcacttctcaccagagagatgacagcacaagagttgcttctgggatagaaatgtttaggagtaagaacaaagctgggatacggtgattgctagttgtgactgaagattcaacacagaaaagaaagtttatacggcttttttgctggtcagcagtttgtcccactgctttctctagtctctatcccatagcgtgttccctttaaaaaaaaaa

SEQ ID NO: 316852 - DNA, 4137 bp, Homo sapiens
ccgtgtggatgggggggttattctcaggtcagcccagtgttggcctccctccctgggaacccaaatccaactttgtcacctgtttaaattgtacagaaggagcagatgacattcctgggccagtgacctgggagccaaggcctgaaaactccatctttttaaagtggccggaacctgagaatcccaatggattgattctaatgtatgaaataaaatacggatcacaagttgaggatcagcgagaatgtgtgtccagacaggaatacaggaagtatggaggggccaagctaaaccggctaaacccggggaactacacagcccggattcaggccacatctctctctgggaatgggtcgtggacagatcctgtgttcttctatgtccaggccaaaacaggatatgaaaacttcatccatctgatcatcgctctgcccgtcgctgtcctgttgatcgtgggagggttggtgattatgctgtacgtcttccatagaaagagaaataacagcaggctggggaatggagtgctgtatgcctctgtgaacccggagtacttcagcgctgctgatgtgtacgttcctgatgagtgggaggtggctcgggagaagatcaccatgagccgggaacttgggcaggggtcgtttgggatggtctatgaaggagttgccaagggtgtggtgaaagatgaacctgaaaccagagtggccattaaaacagtgaacgaggccgcaagcatgcgtgagaggattgagtttctcaacgaagcttctgtgatgaaggagttcaattgtcaccatgtggtgcgattgctgggtgtggtgtcccaaggccagccaacactggtcatcatggaactgatgacacggggcgatctcaaaagttatctccggtctctgaggccagaaatggagaataatccagtcctagcacctccaagcctgagcaagatgattcagatggccggagagattgcagacggcatggcatacctcaacgccaataagttcgtccacagagaccttgctgcccggaattgcatggtagccgaagatttcacagtcaaaatcggagattttggtatgacgcgagatatctatgagacagactattaccggaaaggagggaaagggctgctgcccgtgcgctggatgtctcctgagtccctcaaggatggagtcttcaccacttactcggacgtctggtccttcggggtcgtcctctgggagatcgccacactggccgagcagccctaccagggcttgtccaacgagcaagtccttcgcttcgtcatggagggcggccttctggacaagccagacaactgtcctgacatgctgtttgaactgatgcgcatgtgctggcagtataaccccaagatgaggccttccttcctggagatcatcagcagcatcaaagaggagatggagcctggcttccgggaggtctccttctactacagcgaggagaacaagctgcccgagccggaggagctggacctggagccagagaacatggagagcgtccccctggacccctcggcctcctcgtcctccctgccactgcccgacagacactcaggacacaaggccgagaacggccccggccctggggtgctggtcctccgcgccagcttcgacgagagacagccttacgcccacatgaacgggggccgcaagaacgagcgggccttgccgctgccccagtcttcgacctgctgatccttggatcctgaatctgtgcaaacagtaacgtgtgcgcacgcgcagcggggtggggggggagagagagttttaacaatccattcacaagcctcctgtacctcagtggatcttcagaactgcccttgctgcccgcgggagacagcttctctgcagtaaaacacatttgggatgttccttttttcaatatgcaagcagctttttattccctgcccaaacccttaactgacatgggcctttaagaaccttaatgacaacacttaatagcaacagagcacttgagaaccagtctcctcactctgtccctgtccttccctgttctccctttctctctcctctctgcttcataacggaaaaataattgccacaagtccagctgggaagccctttttatcagtttgaggaagtggctgtccctgtggccccatccaaccactgtacacacccgcctgacaccgtgggtcattacaaaaaaacacgtggagatggaaatttttacctttatctttcacctttctagggacatgaaatttacaaagggccatcgttcatccaaggctgttaccattttaacgctgcctaattttgccaaaatcctgaactttctccctcatcggcccggcgctgattcctcgtgtccggaggcatgggtgagcatggcagctggttgctccatttgagagacacgctggcgacacactccgtccatccgactgcccctgctgtgctgctcaaggccacaggcacacaggtctcattgcttctgactagattattatttgggggaactggacacaataggtctttctctcagtgaaggtggggagaagctgaaccggcttccctgccctgcctccccagccccctgcccaacccccaagaatctggtggccatgggccccgaagcagtctggcggacaggcttggagtcaaggggccccatgcctgcttctctcccagccccagctcccccgcccgcccccaaggacacagatgggaaggggtttccagggactcagccccactgttgatgcaggtttgcaaggaaagaaattcaaacaccacaacagcagtaagaagaaaagcagtcaatggattcaagcattctaagctttgttgacattttctctgttcctaggacttcttcatgggtcttacagttctatgttagaccatgaaacatttgcatacacatcgtctttaatgtcacttttataacttttttacggttcagatattcatctatacgtctgtacagaaaaaaaaaagctgctattttttttgttcttgatctttgtggatttaatctatgaaaaccttcaggtccaccctctcccctttctgctcactccaagaaacttcttatgctttgtactagagtgcgtgactttcttcctcttttcccggtaatggatacttctatcacataatttgccatgaactgttggatgcctttttataaatacatcccccatccctgctcccacctgcccctttagttgttttctaacccgtaggctctctgggcacgaggcagaaagcaggccgggcacccatcctgagagggccgcgctcctctccccagcctgccctcacagcattggagcctgttacagtgcaagacatgatacaaactcaggtcagaaaaacaaaggttaaatatttcacacgtctttgttcagtgtttccactcaccgtggttgagaagcctcaccctctctttcccttgcctttgcttaggttgtgacacacatatatatatatttttttaattcttgggtacaacagcagtgttaaccgcagacactaggcatttggattactatttttcttaatggctatttaatccttccatcccacgaaaaacagctgctgagtccaagggagcagcagagcgtggtccggcagggcctgttgtggccctcgccacccccctcaccggaccgactgacctgtctttggaaccagaacatcccaagggaactccttcgcactggcgttgagtgggaccccgggatccaggctggcccagggcggcaccctcagggctgtgcccgctggagtgctaggtggaggcagcacagacgccacggtggcccaagagcccctttgcttcttgctgggggaccagggctgtggtgctggcccactttccctcggccaggaatccaggtccttggggcccaggggtcttgtcttgtttcatttttagcacttctcaccagagagatgacagcacaagagttgcttctgggatagaaatgtttaggagtaagaacaaagctgggatacggtgattgctagttgtgactgaagattcaacacagaaaagaaagtttatacggcttttttgctggtcagcagtttgtcccactgctttctctagtctctatcccatagcgtgttccctttaaaaaaaaaa

SEQ ID NO: 316853 - DNA, 3298 bp, Homo sapiens
tcggacccccagttaacaagcgtcaggggatgccacgctgggctgcttcacgccagctcaaggggcccctgtccgtgcctctcgggcttctccaccactggcttctctctctgactctttctcccttggtctctgtctgtctgtctctgtctccgtctgtgtgtctctgtcttcctctttctctctctctgtttctgtctcctgtctctgtttctttctatctccctctgtctctgtctatatctctatgtctcctgtttctgtctctatctgcctctatctctgtctctccaagcctccctgtctctgtctcctgagtccctcaaggatggagtcttcaccacttactcggacgtctggtccttcggggtcgtcctctgggagatcgccacactggccgagcagccctaccagggcttgtccaacgagcaagtccttcgcttcgtcatggagggcggccttctggacaagccagacaactgtcctgacatgctgtttgaactgatgcgcatgtgctggcagtataaccccaagatgaggccttccttcctggagatcatcagcagcatcaaagaggagatggagcctggcttccgggaggtctccttctactacagcgaggagaacaagctgcccgagccggaggagctggacctggagccagagaacatggagagcgtccccctggacccctcggcctcctcgtcctccctgccactgcccgacagacactcaggacacaaggccgagaacggccccggccctggggtgctggtcctccgcgccagcttcgacgagagacagccttacgcccacatgaacgggggccgcaagaacgagcgggccttgccgctgccccagtcttcgacctgctgatccttggatcctgaatctgtgcaaacagtaacgtgtgcgcacgcgcagcggggtggggggggagagagagttttaacaatccattcacaagcctcctgtacctcagtggatcttcagaactgcccttgctgcccgcgggagacagcttctctgcagtaaaacacatttgggatgttccttttttcaatatgcaagcagctttttattccctgcccaaacccttaactgacatgggcctttaagaaccttaatgacaacacttaatagcaacagagcacttgagaaccagtctcctcactctgtccctgtccttccctgttctccctttctctctcctctctgcttcataacggaaaaataattgccacaagtccagctgggaagccctttttatcagtttgaggaagtggctgtccctgtggccccatccaaccactgtacacacccgcctgacaccgtgggtcattacaaaaaaacacgtggagatggaaatttttacctttatctttcacctttctagggacatgaaatttacaaagggccatcgttcatccaaggctgttaccattttaacgctgcctaattttgccaaaatcctgaactttctccctcatcggcccggcgctgattcctcgtgtccggaggcatgggtgagcatggcagctggttgctccatttgagagacacgctggcgacacactccgtccatccgactgcccctgctgtgctgctcaaggccacaggcacacaggtctcattgcttctgactagattattatttgggggaactggacacaataggtctttctctcagtgaaggtggggagaagctgaaccggcttccctgccctgcctccccagccccctgcccaacccccaagaatctggtggccatgggccccgaagcagtctggcggacaggcttggagtcaaggggccccatgcctgcttctctcccagccccagctcccccgcccgcccccaaggacacagatgggaaggggtttccagggactcagccccactgttgatgcaggtttgcaaggaaagaaattcaaacaccacaacagcagtaagaagaaaagcagtcaatggattcaagcattctaagctttgttgacattttctctgttcctaggacttcttcatgggtcttacagttctatgttagaccatgaaacatttgcatacacatcgtctttaatgtcacttttataacttttttacggttcagatattcatctatacgtctgtacagaaaaaaaaaagctgctattttttttgttcttgatctttgtggatttaatctatgaaaaccttcaggtccaccctctcccctttctgctcactccaagaaacttcttatgctttgtactagagtgcgtgactttcttcctcttttcccggtaatggatacttctatcacataatttgccatgaactgttggatgcctttttataaatacatcccccatccctgctcccacctgcccctttagttgttttctaacccgtaggctctctgggcacgaggcagaaagcaggccgggcacccatcctgagagggccgcgctcctctccccagcctgccctcacagcattggagcctgttacagtgcaagacatgatacaaactcaggtcagaaaaacaaaggttaaatatttcacacgtctttgttcagtgtttccactcaccgtggttgagaagcctcaccctctctttcccttgcctttgcttaggttgtgacacacatatatatatatttttttaattcttgggtacaacagcagtgttaaccgcagacactaggcatttggattactatttttcttaatggctatttaatccttccatcccacgaaaaacagctgctgagtccaagggagcagcagagcgtggtccggcagggcctgttgtggccctcgccacccccctcaccggaccgactgacctgtctttggaaccagaacatcccaagggaactccttcgcactggcgttgagtgggaccccgggatccaggctggcccagggcggcaccctcagggctgtgcccgctggagtgctaggtggaggcagcacagacgccacggtggcccaagagcccctttgcttcttgctgggggaccagggctgtggtgctggcccactttccctcggccaggaatccaggtccttggggcccaggggtcttgtcttgtttcatttttagcacttctcaccagagagatgacagcacaagagttgcttctgggatagaaatgtttaggagtaagaacaaagctgggatacggtgattgctagttgtgactgaagattcaacacagaaaagaaagtttatacggcttttttgctggtcagcagtttgtcccactgctttctctagtctctatcccatagcgtgttccctttaaaaaaaaaa

SEQ ID NO: 316854 - DNA, 2784 bp, Homo sapiens
  misc_feature (2652)..(2652): n is a, c, g, or t
aggcccggatggggccgagacccccgctgtccctgtacataaagagaccgatgggtgggagggggtcggctgctccccgagatccccctggcagagtcattcttccagccccaaccctgagttcctaaagggacacctccctcctgtccagcccttcaacagatcttctgttagatgacaaccgtgccgtgggccccgcgttgggccttgtctgaagggagaggccctggcatgcggatgggagatttagaggctgtggagaagggaacttggggctttccttccttcgtggcctcactcccctggggcctctctctatggagggggcaatggtttggtgaccagcaggctggattccaactagctaatgcattcagcaggtctgaggctggggccaggtgtcagccctaggcctccatccaacaccgtggaaatgttgctgccctcttcttggcgctgaccccaagattggggtttcctttctgccgctccctccactgttgtttatctaactgggcccccactccaggtccagagggactgtgctcactgcacagacatcactcagcttccgctccccagtcctgcagagctgttgccagggtgcagtggggaggggagtgaaatgtggaggactgtgtacctcagtcctctctctaaactcctcagcctcccaacaggggcctcctcacctgggttctgagtgtgtaccccttttagagagtgagatgccacccgggcagcactcgttaaagctggccagcacgagtgactaaggggagagagcatgacatagacctgggtggcaacggggacctctggaagcaggtgggagtaacagaggagagggcagtggagggtagaggaaaaggacctccagaggtggggtgtctgtgggggcggcctttgcctccctaaacctgtgcggaggagtggagtgtgcttgtcgctcaaacacatctctgggggactgaggacgttgtcacaagccccaactggagaaataattccaatggcagggtcagaggcaagcattctctaaatcttgcccaacccttccatccttccctatcctatgagctgaagccctgctgtgtgtcgcagggtcttcaaaggggcatcctgccaccaccccagggcgctggccccacgtcctgttcccctaaagctctgacaccgccttctctccgtgtgctccccccaccacctccaccctgatgtgcttcagtgtgcatgtctgtgaacagccctcctgccctgccaactcccctggctaaagtctccccagcagatttagcacccagggattgagctcacatttcaggctagagaggataacccttgggccacccacatctctcacccctgatgcttcttacttcgcctgagccatcagaactcctccttaccctccttcagcccctctcatcttccttcagcccagccaggcctgcaccaccaactgtgtggcctccacctatgcaacatcgcctctggctccccttcccttcttcctagcggggagtgtgaggggcccaaattgtggggataccatggcccatggcttctaaagggtttagctttactttcaggtagagatggctgagtgaggagggagaagaggctagagagagggaggcttgggcgggggaaacagctgcccaccaggttttcctggacagcagtgcccacctgcctactagcactgaacctgcctggaccctgagtctgtgctccttgggggcctggcgtttggagcacccttctttccctctgaatggacatctgtgaggtacaggtggtgagctgcagcctcaggctccatttcttagccagctggcacctggatgtcatgctttgtgtggggacagcctggccacctcagggctccaaggaaggaggaacgtggctcctcctccctcaggcctgttcctgagacagagcctggtctcacaagaggggaagggggacctctattattatttttgcctgtattgaccatttctgcctaggtcgtctcagacagcctcatctcccacacatgcacagacttagagagaaaccaattctttggtctattttcttggtagctttactgattgccagggaaaatgaaaaccagaaaattaattaatctctaaaattaaactttacactgaatgttcttgtttctctaattagaacttctgctagcagctgtggctatacacacacacacacacacacacacacaccctcacacctacacgtttgcactccggaactgtcagagggtgtcaggcacagacagactctaggttgcctagacaggcacacacatgcagtcactcccaagccccctttggtgctctgctcagcgcctgcttagcggaaggagtccctggagagcaggcactcctggactggggttgtagcccatgacctgccctttggggacacagttctggaggctctgggccaatgaatcagcccaaggaggatgggcaatggcgctcagcctgaatcagtcagctaggtctcttgtggccctgggggctgatgtgattcctgtaggtgtggccccagggtggacagctacagagtgatgggggactcatgtagggcacctggaaggctccatgtgtcctggggacaagggcttgtggggtgggntgggcctggctggggagaagacaggtctctgtcaattgggtgcatcacactgtggcctttttgtcgtggatttaagcgcaaagattgtacaaatcaaactggtggataataaagtcgtggatgactcactga

SEQ ID NO: 316855 - DNA, 1533 bp, Homo sapiens
  misc_feature (1472)..(1472): n is a, c, g, or t
  misc_feature (1477)..(1477): n is a, c, g, or t
aggcccggatggggccgagacccccgctgtccctgtacataaagagaccgatgggtgggagggggtcggctgctccccgagatccccctggcagagtcattcttccagccccaaccctgagttcctaaagggacacctccctcctgtccagcccttcaacagatcttctgttagatgacaaccgtgccgtgggccccgcgttgggccttgtctgaagggagaggccctggcatgcggatgggagatttagaggctgtggagaagggaacttggggctttccttccttcgtggcctcactcccctggggcctctctctatggagggggcaatggtttggtgaccagcaggctggattccaactagctaatgcattcagcaggtctgaggctggggccaggtgtcagccctaggcctccatccaacaccgtggaaatgttgctgccctcttcttggcgctgaccccaagattggggtttcctttctgccgctccctccactgttgtttatctaactgggcccccactccaggtccagagggactgtgctcactgcacagacatcactcagcttccgctccccagtcctgcagagctgttgccagggtgcagtggggaggggagtgaaatgtggaggactgtgtacctcagtcctctctctaaactcctcagcctcccaacaggggcctcctcacctgggttctgagtgtgtaccccttttagagagtgagatgccacccgggcagcactcgttaaagctggccagcacgagtgactaaggggagagagcatgacatagacctgggtggcaacggggacctctggaagcaggtgggagtaacagaggagagggcagtggagggtagaggaaaaggacctccagaggtggggtgtctgtgggggcggcctttgcctccctaaacctgtgcggaggagtggagtgtgcttgtcgctcaaacacatctctgggggactgaggacgttgtcacaagccccaactggagaaataattccaatggcagggtcagaggcaagcattctctaaatcttgcccaacccttccatccttccctatcctatgagctgaagccctgctgtgtgtcgcagggtcttcaaaggggcatcctgccaccaccccagggcgctggccccacgtcctgttcccctaaagctctgacaccgccttctctccgtgtgctccccccaccacctccaccctgatgtgcttcagtgtgcatgtctgtgaacagccctcctgccctgccaactcccctggctaaagtctccccagcagatttagcacccagggattgagctcacatttcaggctagagaggataacccttgggccacccacatctctcacccctgatgcttcttacttcgcctgagccatcagaactcctccttaccctccttcagcccctctcatcttccttcagcccagccaggcctgcactcgtgccgaattcggnacgantggccatggaggaggaggaggagaagaacgtggccgagctgaccgtcatggacgtg

SEQ ID NO: 316856 - DNA, 2159 bp, Homo sapiens
aggcccggatggggccgagacccccgctgtccctgtacataaagagaccgatgggtgggagggggtcggctgctccccgagatccccctggcagagtcattcttccagccccaaccctgagttcctaaagggacacctccctcctgtccagcccttcaacagatcttctgttagatgacaaccgtgccgtgggccccgcgttgggccttgtctgaagggagaggccctggcatgcggatgggagatttagaggctgtggagaagggaacttggggctttccttccttcgtggcctcactcccctggggcctctctctatggagggggcaatggtttggtgaccagcaggctggattccaactagctaatgcattcagcaggtctgaggctggggccaggtgtcagccctaggcctccatccaacaccgtggaaatgttgctgccctcttcttggcgctgaccccaagattggggtttcctttctgccgctccctccactgttgtttatctaactgggcccccactccaggtccagagggactgtgctcactgcacagacatcactcagcttccgctccccagtcctgcagagctgttgccagggtgcagtggggaggggagtgaaatgtggaggactgtgtacctcagtcctctctctaaactcctcagcctcccaacaggggcctcctcacctgggttctgagtgtgtaccccttttagagagtgagatgccacccgggcagcactcgttaaagctggccagcacgagtgactaaggggagagagcatgacatagacctgggtggcaacggggacctctggaagcaggtgggagtaacagaggagagggcagtggagggtagaggaaaaggacctccagaggtggggtgtctgtgggggcggcctttgcctccctaaacctgtgcggaggagtggagtgtgcttgtcgctcaaacacatctctgggggactgaggacgttgtcacaagccccaactggagaaataattccaatggcagggtcagaggcaagcattctctaaatcttgcccaacccttccatccttccctatcctatgagctgaagccctgctgtgtgtcgcagggtcttcaaaggggcatcctgccaccaccccagggcgctggccccacgtcctgttcccctaaagctctgacaccgccttctctccgtgtgctccccccaccacctccaccctgatgtgcttcagtgtgcatgtctgtgaacagccctcctgccctgccaactcccctggctaaagtctccccagcagatttagcacccagggattgagctcacatttcaggctagagaggataacccttgggccacccacatctctcacccctgatgcttcttacttcgcctgagccatcagaactcctccttaccctccttcagcccctctcatcttccttcagcccagccaggcctgcaccaccaactgtgtggcctccacctatgcaacatcgcctctggctccccttcccttcttcctagcggggagtgtgaggggcccaaattgtggggataccatggcccatggcttctaaagggtttagctttactttcaggtagagatggctgagtgaggagggagaagaggctagagagagggaggcttgggcgggggaaacagctgcccaccaggttttcctggacagcagtgcccacctgcctactagcactgaacctgcctggaccctgagtctgtgctccttgggggcctggcgtttggagcacccttctttccctctgaatggacatctgtgaggtacaggtggtgagctgcagcctcaggctccatttcttagccagctggcacctggatgtcatgctttgtgtggggacagcctggccacctcagggctccaaggaaggaggaacgtggctcctcctccctcaggcctgttcctgagacagagcctggtctcacaagaggggaagggggacctctattattatttttgcctgtattgaccatttctgcctaggtcgtctcagacagcctcatctcccacacatgcacagacttagagagaaaccaattctttggtctattttcttggtagctttactgattgccagggaaaatgaaaaccagaaaattaattaatctctaaaattaaactttacactga

SEQ ID NO: 316857 - DNA, 994 bp, Homo sapiens
gggctccaagcagctgcgactagcggaaagcgcgcgccagctgcacgcagggaaacagttctcattttgtgtgctcggctgactgcacgtccagcctcgggccagctcgagacggccacattgcctggttgaagatggctgagcgtaaaacagaatgcaagtcagctggagcacgtactactggaggcagagccccatgagaaggggccaagaacccgcacccatcaaaatcaagaagaaaggctgaacccggagagaaaagggagcaactgatgttgccatgcagatcccttggttgctatgagatggtaacatcactctgccccaccattggccagtgcctcctcagctgcggtgcctcccaggctgtgtggttctcacgcgggccactgacacagagctgttactatggtgaactttacaatttcctttgattggtggatttcagaaataggccatcagcggaattcattatattcagctaaatgctcttccagaaagaaaagccaggagtactcctggctggaggcggcatgcctgaggtcagagtcaaagtagggtttgtgctgtctgaatcctttctcccactctccccagcctggctcagcttctcagcttctcaggtggattggcctctgagcccaagccaagccatcgcatcccctgtgacttgcccgtatatatgcccagatggcctgaagtaactgaagaatcacaaaagaagtgaatatgccttgccccaccttgactgatgacattccaccacaaaagaagtgtaaatggccggtccttgccttaactgatgacattaccttgtgaaagtccttttcctggctcatcctggctcaaaaagcacccccactgagcatcttgcgactcccactcctgcccactgagcaccttgtgacccccactcctgcctgccagagaacaaaccccctttgactgtaattttcctttacctacccaaatcctataaaacggctccaccctt

SEQ ID NO: 316858 - DNA, 1495 bp, Homo sapiens
gggctccaagcagctgcgactagcggaaagcgcgcgccagctgcacgcagggaaacagttctcattttgtgtgctcggctgactgcacgtccagcctcgggccagctcgagacggccacattgcctggttgaagatggctgagcgtaaaacagaatgcaagtcagctggagcacgtactactggaggcagagccccatgagaaggggccaagaacccgcacccatcaaaatcaagaagaaaggctgaacccggagagaaaagggagcaactgatgttgccatgcagatcccttggttgctatgagatggtaacatcactctgccccaccattggccagtgcctcctcagctgcggtgcctcccaggctgtgtggttctcacgcgggccactgacacagagctgttactatggtgaactttacaatttcctttgattggtggatttcagaaataggccatcagcggaattcattatattcagctaagtaaaaatgaaaaataaatactataactttcccctcatcactaacatgaaggaaacgtgacccttcatgacataataaatcgctgttcggtaacttaggatccttcaggggactgaagcgggatgatcctcctatgccaaatttgggtgggaaagatattccctgtagctttgagtcgactcttcagagttaagggcagtgggccaaccagagttggaacttcagagttgggaggaggtgtgggatggggcatgcattgaacatgtaaactctattgtctctgaagtgatgggtgatgctgggggcctgagtgtggagggcagttttacatctcaggacaatgttttctcagatgctcttccagaaagaaaagccaggagtactcctggctggaggcggcatgcctgaggtcagagtcaaagtagggtttgtgctgtctgaatcctttctcccactctccccagcctggctcagcttctcagcttctcaggtggattggtgagtcctggccaattacgcttcagctcatctctactctcagcaaataggaaaagggagtgaaggactgagttttaactcttctaatttcgtaacctgactctctataagaaaaagtaggagaaagactgaagaacccgagagaacaggcctctgagcccaagccaagccatcgcatcccctgtgacttgcccgtatatatgcccagatggcctgaagtaactgaagaatcacaaaagaagtgaatatgccttgccccaccttgactgatgacattccaccacaaaagaagtgtaaatggccggtccttgccttaactgatgacattaccttgtgaaagtccttttcctggctcatcctggctcaaaaagcacccccactgagcatcttgcgactcccactcctgcccactgagcaccttgtgacccccactcctgcctgccagagaacaaaccccctttgactgtaattttcctttacctacccaaatcctataaaacggctccaccctt

SEQ ID NO: 316859 - DNA, 1824 bp, Homo sapiens
tcggagcatttttcactaagtctttagaggttttaagattcaaacactatgtaagaagaattatggtttgaactacgtaacaattacctagacatcttttggacttcagttaacctgtgtcaagcactgcagtagattctgaagatacaaaaataaataaaacattcctgccctcaagacacttacactcttatgtgtaacactgtgtgaccattcatctgggccttcctgagacagtcttggtttacacctgttttcccaatcagagcatcactgcctttcccactattctcctgcagaagagcaggggaaggaagcaccagggtccatcatggaggaagggtgttgccctgaacagctgacacaccctcagcaatgaagcttagttttgctggaacttttcagttgtgacaactgagattcagagatgtccaatctactcacataaatagcctggttgaagatggctgagcgtaaaacagaatgcaagtcagctggagcacgtactactggaggcagagccccatgagaaggggccaagaacccgcacccatcaaaatcaagaagaaaggctgaacccggagagaaaagggagcaactgatgttgccatgcagatcccttggttgctatgagatggtaacatcactctgccccaccattggccagtgcctcctcagctgcggtgcctcccaggctgtgtggttctcacgcgggccactgacacagagctgttactatggtgaactttacaatttcctttgattggtggatttcagaaataggccatcagcggaattcattatattcagctaagtaaaaatgaaaaataaatactataactttcccctcatcactaacatgaaggaaacgtgacccttcatgacataataaatcgctgttcggtaacttaggatccttcaggggactgaagcgggatgatcctcctatgccaaatttgggtgggaaagatattccctgtagctttgagtcgactcttcagagttaagggcagtgggccaaccagagttggaacttcagagttgggaggaggtgtgggatggggcatgcattgaacatgtaaactctattgtctctgaagtgatgggtgatgctgggggcctgagtgtggagggcagttttacatctcaggacaatgttttctcagatgctcttccagaaagaaaagccaggagtactcctggctggaggcggcatgcctgaggtcagagtcaaagtagggtttgtgctgtctgaatcctttctcccactctccccagcctggctcagcttctcagcttctcaggtggattggtgagtcctggccaattacgcttcagctcatctctactctcagcaaataggaaaagggagtgaaggactgagttttaactcttctaatttcgtaacctgactctctataagaaaaagtaggagaaagactgaagaacccgagagaacaggcctctgagcccaagccaagccatcgcatcccctgtgacttgcccgtatatatgcccagatggcctgaagtaactgaagaatcacaaaagaagtgaatatgccttgccccaccttgactgatgacattccaccacaaaagaagtgtaaatggccggtccttgccttaactgatgacattaccttgtgaaagtccttttcctggctcatcctggctcaaaaagcacccccactgagcatcttgcgactcccactcctgcccactgagcaccttgtgacccccactcctgcctgccagagaacaaaccccctttgactgtaattttcctttacctacccaaatcctataaaacggctccaccctt

SEQ ID NO: 316860 - DNA, 1756 bp, Homo sapiens
tcggagcatttttcactaagtctttagaggttttaagattcaaacactatgtaagaagaattatggtttgaactacgtaacaattacctagacatcttttggacttcagttaacctgtgtcaagcactgcagtagattctgaagatacaaaaataaataaaacattcctgccctcaagacacttacactcttatgtgtaacactgtgtgaccattcatctgggccttcctgagacagtcttggtttacacctgttttcccaatcagagcatcactgcctttcccactattctcctgcagaagagcaggggaaggaagcaccagggtccatcatggagttgtgacaactgagattcagagatgtccaatctactcacataaatagcctggttgaagatggctgagcgtaaaacagaatgcaagtcagctggagcacgtactactggaggcagagccccatgagaaggggccaagaacccgcacccatcaaaatcaagaagaaaggctgaacccggagagaaaagggagcaactgatgttgccatgcagatcccttggttgctatgagatggtaacatcactctgccccaccattggccagtgcctcctcagctgcggtgcctcccaggctgtgtggttctcacgcgggccactgacacagagctgttactatggtgaactttacaatttcctttgattggtggatttcagaaataggccatcagcggaattcattatattcagctaagtaaaaatgaaaaataaatactataactttcccctcatcactaacatgaaggaaacgtgacccttcatgacataataaatcgctgttcggtaacttaggatccttcaggggactgaagcgggatgatcctcctatgccaaatttgggtgggaaagatattccctgtagctttgagtcgactcttcagagttaagggcagtgggccaaccagagttggaacttcagagttgggaggaggtgtgggatggggcatgcattgaacatgtaaactctattgtctctgaagtgatgggtgatgctgggggcctgagtgtggagggcagttttacatctcaggacaatgttttctcagatgctcttccagaaagaaaagccaggagtactcctggctggaggcggcatgcctgaggtcagagtcaaagtagggtttgtgctgtctgaatcctttctcccactctccccagcctggctcagcttctcagcttctcaggtggattggtgagtcctggccaattacgcttcagctcatctctactctcagcaaataggaaaagggagtgaaggactgagttttaactcttctaatttcgtaacctgactctctataagaaaaagtaggagaaagactgaagaacccgagagaacaggcctctgagcccaagccaagccatcgcatcccctgtgacttgcccgtatatatgcccagatggcctgaagtaactgaagaatcacaaaagaagtgaatatgccttgccccaccttgactgatgacattccaccacaaaagaagtgtaaatggccggtccttgccttaactgatgacattaccttgtgaaagtccttttcctggctcatcctggctcaaaaagcacccccactgagcatcttgcgactcccactcctgcccactgagcaccttgtgacccccactcctgcctgccagagaacaaaccccctttgactgtaattttcctttacctacccaaatcctataaaacggctccaccctt

SEQ ID NO: 316861 - DNA, 1952 bp, Homo sapiens
tcggagcatttttcactaagtctttagaggttttaagattcaaacactatgtaagaagaattatggtttgaactacgtaacaattacctagacatcttttggacttcagttaacctgtgtcaagcactgcagtagattctgaagatacaaaaataaataaaacattcctgccctcaagacacttacactcttatgtgtaacactgtgtgaccattcatctgggccttcctgagacagtcttggtttacacctgttttcccaatcagagcatcactgcctttcccactattctcctgcagaagagcaggggaaggaagcaccagggtccatcatggaggaagggtgttgccctgaacagctgacacaccctcagcaatgaagcttagttttgctggaacttttcagttgtgacaactgagattcagagatgtccaatctactcacataaatatttctagcccatgacagactgacgtatctaaaaatcatagattaggtaaagaatgtgtgcaaattaaaatccatgcacagaaacctatgtgagaagaaggagcgttgtcatcgcagacgtttaactgggcctggttgaagatggctgagcgtaaaacagaatgcaagtcagctggagcacgtactactggaggcagagccccatgagaaggggccaagaacccgcacccatcaaaatcaagaagaaaggctgaacccggagagaaaagggagcaactgatgttgccatgcagatcccttggttgctatgagatggtaacatcactctgccccaccattggccagtgcctcctcagctgcggtgcctcccaggctgtgtggttctcacgcgggccactgacacagagctgttactatggtgaactttacaatttcctttgattggtggatttcagaaataggccatcagcggaattcattatattcagctaagtaaaaatgaaaaataaatactataactttcccctcatcactaacatgaaggaaacgtgacccttcatgacataataaatcgctgttcggtaacttaggatccttcaggggactgaagcgggatgatcctcctatgccaaatttgggtgggaaagatattccctgtagctttgagtcgactcttcagagttaagggcagtgggccaaccagagttggaacttcagagttgggaggaggtgtgggatggggcatgcattgaacatgtaaactctattgtctctgaagtgatgggtgatgctgggggcctgagtgtggagggcagttttacatctcaggacaatgttttctcagatgctcttccagaaagaaaagccaggagtactcctggctggaggcggcatgcctgaggtcagagtcaaagtagggtttgtgctgtctgaatcctttctcccactctccccagcctggctcagcttctcagcttctcaggtggattggtgagtcctggccaattacgcttcagctcatctctactctcagcaaataggaaaagggagtgaaggactgagttttaactcttctaatttcgtaacctgactctctataagaaaaagtaggagaaagactgaagaacccgagagaacaggcctctgagcccaagccaagccatcgcatcccctgtgacttgcccgtatatatgcccagatggcctgaagtaactgaagaatcacaaaagaagtgaatatgccttgccccaccttgactgatgacattccaccacaaaagaagtgtaaatggccggtccttgccttaactgatgacattaccttgtgaaagtccttttcctggctcatcctggctcaaaaagcacccccactgagcatcttgcgactcccactcctgcccactgagcaccttgtgacccccactcctgcctgccagagaacaaaccccctttgactgtaattttcctttacctacccaaatcctataaaacggctccaccctt

SEQ ID NO: 316862 - DNA, 1031 bp, Homo sapiens
gggctccaagcagctgcgactagcggaaagcgcgcgccagctgcacgcagggaaacagttctcattttgtgtgctcggctgactgcacgtccagcctcgggccagctcgagacggccacattgcctggttgaagatggctgagcgtaaaacagaatgcaagtcagctggagcacgtactactggaggcagagccccatgagaaggggccaagaacccgcacccatcaaaatcaagaagaaaggctgaacccggagagaaaagggagcaactgatgttgccatgcagatcccttggttgctatgagatggtaacatcactctgccccaccattggccagtgcctcctcagctgcggtgcctcccaggctgtgtggttctcacgcgggccactgacacagagctgttactatggtgaactttacaatttcctttgattggtggatttcagaaataggccatcagcggaattcattatattcagctaacctggctcagcttctcagcttctcaggtggattggtgagtcctggccaattacgcttcagctcatctctactctcagcaaataggaaaagggagtgaaggactgagttttaactcttctaatttcgtaacctgactctctataagaaaaagtaggagaaagactgaagaacccgagagaacaggcctctgagcccaagccaagccatcgcatcccctgtgacttgcccgtatatatgcccagatggcctgaagtaactgaagaatcacaaaagaagtgaatatgccttgccccaccttgactgatgacattccaccacaaaagaagtgtaaatggccggtccttgccttaactgatgacattaccttgtgaaagtccttttcctggctcatcctggctcaaaaagcacccccactgagcatcttgcgactcccactcctgcccactgagcaccttgtgacccccactcctgcctgccagagaacaaaccccctttgactgtaattttcctttacctacccaaatcctataaaacggctccaccctt

SEQ ID NO: 316863 - DNA, 165 bp, Homo sapiens
cctcatccaatgagttgaaggcctgcagagatcaaaaggctgaccacccctagaagacaagaaggaattctgccagtcgacagcatttggacgtgaactgcaacattaggtcttccttgggtctccagcctgccagcccaccctacagattttggacttgccaga

SEQ ID NO: 316864 - DNA, 4717 bp, Homo sapiens
gcggccgctgcagccagccccgcggctccctcagacccgcgggcgcagccgccgggggtgaggcgcttggggaccgcgggccgagcggcggggatccccgagcaccatgctggacccgtcttccagcgaagaggagtcggacgaggggctggaagaggaaagccgcgatgtgctggtggcagccggcagctcgcagcgagctcctccagccccgactcgggaagggcggcgggacgcgccggggcgcgcgggcggcggcggcgcggccagatctgtgagcccgagcccctctgtgctcagcgaggggcgagacgagccccagcggcagctggacgatgagcaggagcggaggatccgcctgcagctctacgtcttcgtcgtgaggtgcatcgcgtaccccttcaacgccaagcagcccaccgacatggcccggaggcagcagaagcttaacaaacaacagttgcagttactgaaagaacggttccaggccttcctcaatggggaaacccaaattgtagctgacgaagcattttgcaacgcagttcggagttattatgaggtttttctaaagagtgaccgagtggccagaatggtacagagtggagggtgttctgctaatgacttcagagaagtatttaagaaaaacatagaaaaacgtgtgcggagtttgccagaaatagatggcttgagcaaagagacagtgttgagctcatggatagccaaatatgatgccatttacagaggtgaagaggacttgtgcaaacagccaaatagaatggccctaagtgcagtgtctgaacttattctgagcaaggaacaactctatgaaatgtttcagcagattctgggtattaaaaaactggaacaccagctcctttataatgcatgtcagctggataacgcagatgaacaagcagcccagatcagaagggaacttgatggccggctgcaattggcagataaaatggcaaaggaaagaaaattccccaaatttatagcaaaagatatggagaatatgtatatagaagagttgcggtcttcagtgaatttgctaatggccaatttggaaagtcttccagtttcgaaaggtggtccggaatttaaattacaaaaattaaaacgttcacagaactctgcatttttggacataggagatgagaatgagattcagctgtcaaagtccgacgtggtactgtcattcaccttagagattgtcataatggaagtgcaaggcctgaagtcagttgctcccaatcgaattgtttactgtacaatggaagtggaaggagaaaaacttcagacagaccaggccgaagcctcaaggccacaatgggggactcaaggagatttcaccaccacccatcctcggcctgtggtcaaagtgaaactcttcacagaaagcactggagttctggccctggaagataaagaactgggaagggtgatattatacccaacttctaatagctccaaatcagctgaattacaccgaatggtagttccaaaaaatagccaggattctgacttaaaaatcaaactggcagtgcgaatggataaaccagcacatatgaagcatagtggatatctgtatgcccttggacagaaggtttggaaaagatggaaaaaacgttactttgttctagttcaggttagccaatatacctttgctatgtgcagttatagagaaaagaagtctgaaccacaagaattaatgcagcttgaaggctatactgtggattataccgatccccacccaggccttcagggtggttgtatgttctttaatgctgttaaagaaggagatactgtaatctttgccagtgatgatgaacaggacagaatattatgggttcaagccatgtatagggccacaggtcaatcatataaaccagttcctgcaattcaaacccagaaactgaatcctaaaggaggaactctccatgcagatgctcagctttatgcagatcgttttcagaaacatggtatggatgagtttatttctgcaaacccctgcaagcttgatcatgccttcctttttagaatactccagaggcagactttggatcacagactgaatgattcctattcttgcttgggatggtttagccctggccaagtctttgtgttagatgagtactgtgcccgttatggtgtgagaggctgtcacagacatctctgctaccttgcagaactgatggaacattcagaaaatggtgctgtcattgaccctaccctgctccattacagctttgcattctgtgcctctcatgtgcacggcaacaggcctgatggaattgggactgtttcagtggaagaaaaagaaagatttgaggagataaaagagagactctcttcccttttagaaaatcagataagccatttcagatactgttttccctttggacgacctgaaggtgctctaaaagctacactttcattacttgaaagggttttaatgaaagatattgccactcccataccagcagaagaggtgaagaaagtggtcagaaaatgtctcgagaaagctgccttgatcaattacactagactcacagaatatgccaaaatagaagagaccatgaaccaggcatctcctgctagaaagctggaagagattcttcatctggcagagctctgcatagaagtcttacagcagaatgaagagcatcatgcagaggcatttgcctggtggcctgatttattggctgaacatgcagagaaattttgggctttatttacagtggatatggacactgcactagaggctcaaccgcaagactcctgggatagttttcctcttttccaactgcttaataatttcctccgaaatgacacacttttgtgtaatggaaaatttcacaaacacttgcaagaaatctttgtacccttggttgtccgctatgtggatctcatggagtcttccatcgcccagtcaattcacagaggttttgagcaggagacatggcagcctgtcaacaatggctcagcaacatcagaagaccttttttggaagcttgatgcactgcaaatgtttgtctttgatctgcactggccagaacaggaatttgcccaccacttagagcaaagacttaaactaatggccagtgatatgctagaggcctgtgtcaaaagaacaagaactgcatttgaactcaagctacaaaaggcaagcaaaacaactgacttgcgcattccagcttccgtttgcactatgtttaatgtattagtcgatgccaaaaagcaaagcaccaaactctgtgccctggatggaggacaagagtttggtagtcaatggcaacagtaccattcaaaaatagatgatctgatcgacaacagtgtaaaagaaatcatttcactgttagtttcaaagtttgtttcagtgttggaaggcgtgttgtctaagctgtcaaggtatgatgaaggcactttcttttcatccattctgtcattcactgtgaaagcagctgcaaaatatgttgatgttccaaaaccaggaatggatctggcagacacctatattatgtttgttcggcaaaaccaagatattcttcgagaaaaggtcaatgaggaaatgtatatagaaaagttatttgatcaatggtacagcagttccatgaaagtcatttgcgtgtggttgactgatagattagacctccaactccatatttaccagctgaagacgctcatcaagattgtgaagaaaacctacagggactttcgattgcagggtgtgttggaaggaacactgaacagtaagacttatgatactgtgcacagacgtttaacagtagaggaggccacagcctctgtttcagaaggaggaggacttcagggcattactatgaaagacagtgacgaagaagaagaaggctgatatcacacagctttgcagaaggaaggaagaccttgatcgacattgttttttatttttttaaccttgtccttgtaattacattcattgtttgttttggccaaataaaaatgcttgtatttctttaaaaagtaagcctgaatgtagagtaaaaggggaaatgccaagattttggggtttttttgtttcctttttttgtttgtttgtttgtttgtttttttggagaagagcatcctcttttgtgtagtttgacctaaaaatgaaccttggctctgcttgtgatcagaacatgaacttttttttttaaagaagatttgagcatttttctgtaatcacatcaaaatgatgttttctgtgtaaagcgagatacatatttctcataatgcagcattgtgagaagtcagttcggaccactgcaccaacactgtcgtatccttgttaaaatggtgtgtaccttacaaattataatttatgtgccaggttcgttttgtacttaatttgctattattgtgatgtgtataaaatctttaatcttggttcttagtactttgaattggtctacaggtatattcctgggatgaaaggattgccaaacccaaatatagactagattatccaatgggtttgtgtctttgttccattctcaacatttcttctttcaactataagtaatccccaggtgtggggtagcaagtgtgcttccgtcaagataccatattctcctgctccagtataacagcttgcaggcaataaaaatctatttgctcataactacttctgtatttattagacttatatagagcaaatgcagtaaaagaggtttgcagtgtttcaaacatccaacta

SEQ ID NO: 316865 - DNA, 512 bp, Homo sapiens
  misc_feature (18)..(18): n is a, c, g, or t
  misc_feature (50)..(50): n is a, c, g, or t
agagagagagagagaganagagagagagagagagagagaggagagagagngagagagagagagaagtcagttcggaccactgcaccaacactgtcgtatccttgttaaaatggtgtgtaccttacaaattataatttatgtgccaggttcgttttgtacttaatttgctattattgtgatgtgtataaaatctttaatcttggttcttagtactttgaattggtctacaggtatattcctgggatgaaaggattgccaaacccaaatatagactagattatccaatgggtttgtgtctttgttccattctcaacatttcttctttcaactataagtaatccccaggtgtggggtagcaagtgtgcttccgtcaagataccatattctcctgctccagtataacagcttgcaggcaataaaaatctatttgctcataactacttctgtatttattagacttatatagagcaaatgcagtaaaagaggtttgcagtgtttcaaacatccaacta

SEQ ID NO: 316866 - DNA, 261 bp, Homo sapiens
aaaccaggaatggatctggcagacacctatattatgtttgttcggcaaaaccaagatattcttcgagaaaaggtcaatgaggaaatgtatatagaaaagttatttgatgtaagtagcttcccttgcaaggtatgctgacaccatagataaactgcaaagagaaaagttgaattttgatggtatgtttgcaaagcatagtctcctttttgtgatcctgtatcttctatactaaaaagttgaagctggccaggcatagtggct

SEQ ID NO: 316867 - DNA, 417 bp, Homo sapiens
acgcatataatctaagtgagctaagcaaattttatcttctttcttcagaaaacctacagggactttcgattgcagggtgtgttggaaggaacactgaacagtaagacttatgatactgtgcacagacgtttaacagtagaggaggccacagcctctgtttcagaaggaggaggacttcagggcattactatgaaagacagtgacgaagaagaagaaggctgatatcacacagctttgcagaaggaaggaagaccttgatcgacattgttttttatttttttaaccttgtccttgtaattacattcattgtttgttttggccaaataaaaatgcttgtatttctttaaaaagtaagcctgaatgtagagtaaaaggggaaatgccaagattttggggtttttttgtttcctttttttg

SEQ ID NO: 316868 - DNA, 3997 bp, Homo sapiens
gcggccgctgcagccagccccgcggctccctcagacccgcgggcgcagccgccgggggtgaggcgcttggggaccgcgggccgagcggcggggatccccgagcaccatgctggacccgtcttccagcgaagaggagtcggacgaggggctggaagaggaaagccgcgatgtgctggtggcagccggcagctcgcagcgagctcctccagccccgactcgggaagggcggcgggacgcgccggggcgcgcgggcggcggcggcgcggccagatctgtgagcccgagcccctctgtgctcagcgaggggcgagacgagccccagcggcagctggacgatgagcaggagcggaggatccgcctgcagctctacgtcttcgtcgtgaggtgcatcgcgtaccccttcaacgccaagcagcccaccgacatggcccggaggcagcagaagcttaacaaacaacagttgcagttactgaaagaacggttccaggccttcctcaatggggaaacccaaattgtagctgacgaagcattttgcaacgcagttcggagttattatgaggtttttctaaagagtgaccgagtggccagaatggtacagagtggagggtgttctgctaatgacttcagagaagtatttaagaaaaacatagaaaaacgtgtgcggagtttgccagaaatagatggcttgagcaaagagacagtgttgagctcatggatagccaaatatgatgccatttacagaggtgaagaggacttgtgcaaacagccaaatagaatggccctaagtgcagtgtctgaacttattctgagcaaggaacaactctatgaaatgtttcagcagattctgggtattaaaaaactggaacaccagctcctttataatgcatgtcagctggataacgcagatgaacaagcagcccagatcagaagggaacttgatggccggctgcaattggcagataaaatggcaaaggaaagaaaattccccaaatttatagcaaaagatatggagaatatgtatatagaagagttgcggtcttcagtgaatttgctaatggccaatttggaaagtcttccagtttcgaaaggtggtccggaatttaaattacaaaaattaaaacgttcacagaactctgcatttttggacataggagatgagaatgagattcagctgtcaaagtccgacgtggtactgtcattcaccttagagattgtcataatggaagtgcaaggcctgaagtcagttgctcccaatcgaattgtttactgtacaatggaagtggaaggagaaaaacttcagacagaccaggccgaagcctcaaggccacaatgggggactcaaggagatttcaccaccacccatcctcggcctgtggtcaaagtgaaactcttcacagaaagcactggagttctggccctggaagataaagaactgggaagggtgatattatacccaacttctaatagctccaaatcagctgaattacaccgaatggtagttccaaaaaatagccaggattctgacttaaaaatcaaactggcagtgcgaatggataaaccagcacatatgaagcatagtggatatctgtatgcccttggacagaaggtttggaaaagatggaaaaaacgttactttgttctagttcaggttagccaatatacctttgctatgtgcagttatagagaaaagaagtctgaaccacaagaattaatgcagcttgaaggctatactgtggattataccgatccccacccaggccttcagggtggttgtatgttctttaatgctgttaaagaaggagatactgtaatctttgccagtgatgatgaacaggacagaatattatgggttcaagccatgtatagggccacaggtcaatcatataaaccagttcctgcaattcaaacccagaaactgaatcctaaaggaggaactctccatgcagatgctcagctttatgcagatcgttttcagaaacatggtatggatgagtttatttctgcaaacccctgcaagcttgatcatgccttcctttttagaatactccagaggcagactttggatcacagactgaatgattcctattcttgcttgggatggtttagccctggccaagtctttgtgttagatgagtactgtgcccgttatggtgtgagaggctgtcacagacatctctgctaccttgcagaactgatggaacattcagaaaatggtgctgtcattgaccctaccctgctccattacagctttgcattctgtgcctctcatgtgcacggcaacaggcctgatggaattgggactgtttcagtggaagaaaaagaaagatttgaggagataaaagagagactctcttcccttttagaaaatcagataagccatttcagatactgttttccctttggacgacctgaaggtgctctaaaagctacactttcattacttgaaagggttttaatgaaagatattgccactcccataccagcagaagaggtgaagaaagtggtcagaaaatgtctcgagaaagctgccttgatcaattacactagactcacagaatatgccaaaatagaagagaccatgaaccaggcatctcctgctagaaagctggaagagattcttcatctggcagagctctgcatagaagtcttacagcagaatgaagagcatcatgcagaggcatttgcctggtggcctgatttattggctgaacatgcagagaaattttgggctttatttacagtggatatggacactgcactagaggctcaaccgcaagactcctgggatagttttcctcttttccaactgcttaataatttcctccgaaatgacacacttttgtgtaatggaaaatttcacaaacacttgcaagaaatctttgtacccttggttgtccgctatgtggatctcatggagtcttccatcgcccagtcaattcacagaggttttgagcaggagacatggcagcctgtcaacaatggctcagcaacatcagaagaccttttttggaagcttgatgcactgcaaatgtttgtctttgatctgcactggccagaacaggaatttgcccaccacttagagcaaagacttaaactaatggccagtgatatgctagaggcctgtgtcaaaagaacaagaactgcatttgaactcaagctacaaaaggcaagcaaaacaactgacttgcgcattccagcttccgtttgcactatgtttaatgtattagtcgatgccaaaaagcaaagcaccaaactctgtgccctggatggaggacaagagtttggtagtcaatggcaacagtaccattcaaaaatagatgatctgatcgacaacagtgtaaaagaaatcatttcactgttagtttcaaagtttgtttcagtgttggaaggcgtgttgtctaagctgtcaaggtatgatgaaggcactttcttttcatccattctgtcattcactgtgaaagcagctgcaaaatatgttgatgttccaaaaccaggaatggatctggcagacacctatattatgtttgttcggcaaaaccaagatattcttcgagaaaaggtcaatgaggaaatgtatatagaaaagttatttgatcaatggtacagcagttccatgaaagtcatttgcgtgtggttgactgatagattagacctccaactccatatttaccagctgaagacgctcatcaagattgtgaagaaaacctacagggactttcgattgcagggtgtgttggaaggaacactgaacagtaagacttatgatactgtgcacagacgtttaacagtagaggaggccacagcctctgtttcagaaggaggaggacttcagggcattactatgaaagacagtgacgaagaagaagaaggctgatatcacacagctttgcagaaggaaggaagaccttgatcgacattgttttttatttttttaaccttgtccttgtaattacattcattgtttgttttggccaaataaaaatgcttgtatttcttt

SEQ ID NO: 316869 - DNA, 2498 bp, Homo sapiens
gacgagccgagccgagccaagcggagctgggccactgtgcacgcccggagggtcctggcggcgcccccgctcctgcgcgcactctcggcgccggacacgagcactgcctgccgggaacaggctgggggaggtgcgggggcttggcccacttggtggaagaacagctttggggattttttttttttcattgtcggatacaggcatttcaaagggaaaccgttgaaatgcataacctgcaaacactgcctcctaaaccaccaaaacctactactgtagccaacaacggtatgaataacaatatgtccttacaagatgctgaatggtactggggagatatctcgagggaagaagtgaatgaaaaacttcgagatacagcagacgggacctttttggtacgagatgcgtctactaaaatgcatggtgattatactcttacactaaggaaagggggaaataacaaattaatcaaaatatttcatcgagatgggaaatatggcttctctgacccattaaccttcagttctgtggttgaattaataaaccactaccggaatgaatctctagctcagtataatcccaaattggatgtgaaattactttatccagtatccaaataccaacaggatcaagttgtcaaagaagataatattgaagctgtagggaaaaaattacatgaatataacactcagtttcaagaaaaaagtcgagaatatgatagattatatgaagaatatacccgcacatcccaggaaatccaaatgaaaaggacagctattgaagcatttaatgaaaccataaaaatatttgaagaacagtgccagacccaagagcggtacagcaaagaatacatagaaaagtttaaacgtgaaggcaatgagaaagaaatacaaaggattatgcataattatgataagttgaagtctcgaatcagtgaaattattgacagtagaagaagattggaagaagacttgaagaagcaggcagctgagtatcgagaaattgacaaacgtatgaacagcattaaaccagaccttatccagctgagaaagacgagagaccaatacttgatgtggttgactcaaaaaggtgttcggcaaaagaagttgaacgagtggttgggcaatgaaaacactgaagaccaatattcactggtggaagatgatgaagatttgccccatcatgatgagaagacatggaatgttggaagcagcaaccgaaacaaagctgaaaacctgttgcgagggaagcgagatggcacttttcttgtccgggagagcagtaaacagggctgctatgcctgctctgtagtggtggacggcgaagtaaagcattgtgtcataaacaaaacagcaactggctatggctttgccgagccctataacttgtacagctctctgaaagaactggtgctacattaccaacacacctcccttgtgcagcacaacgactccctcaatgtcacactagcctacccagtatatgcacagcagaggcgatgaagcgcttactctttgatccttctcctgaagttcagccaccctgaggcctctggaaagcaaagggctcctctccagtctgatctgtgaattgagctgcagaaacgaagccatctttctttggatgggactagagctttctttcacaaaaaagaagtaggggaagacatgcagcctaaggctgtatgatgaccacacgttcctaagctggagtgcttatcccttctttttctttttttctttggtttaatttaaagccacaaccacatacaacacaaagagaaaaagaaatgcaaaaatctctgcgtgcagggacaaagaggcctttaaccatggtgcttgttaatgctttctgaagctttaccagctgaaagttgggactctggagagcggaggagagagaggcagaagaaccctggcctgagaaggtttggtccagcctggtttagcctggatgttgctgtgcacggtggacccagacacatcgcactgtggattatttcattttgtaacaaatgaacgatatgtagcagaaaggcacgtccactcacaagggacgctttgggagaatgtcagttcatgtatgttcagaagaaattctgtcatagaaagtgccagaaagtgtttaacttgtcaaaaaacaaaaacccagcaacagaaaaatggagtttggaaaacaggacttaaaatgacattcagtatataaaatatgtacataatattggatgactaactatcaaatagatggatttgtatcaataccaaatagcttctgttttgttttgctgaaggctaaattcacagcgctatgcaattcttaattttcattaagttgttatttcagttttaaatgtaccttcagaataagcttccccaccccagtttttgttgcttgaaaatattgttgtcccggatttttgttaatattcatttttgttatccttttttaaaagtaaatgtacaggatgccagtaaaaaaaaaaaatggcttcagaattaaaa

SEQ ID NO: 316870 - DNA, 6600 bp, Homo sapiens
cattcgggcggggtgaagctcgtgtgtggagtgccacggtacaatcagacgacagatggacagtgtgacaaaagtgtcagaaaggattgggcctcgctgtgagagtcagcctggattcaaagtgttgacaagttgctgaaaaggaagccagtgagaggactgtggcacgcagaggaagtggagccctgtcttcggtcacaccattgatggaggacagatggacagccgtatggccagtcacctctcctcttaaacctttggagagtggtcctttgtcctctgctggacacataataggaattctaacacattctctgaattcacttttcataaaaacgtaaaatcagactgctctgtacaaccaggctcaactgttgcatggtagcagatttgcaaacatgagtgctgaggggtaccagtacagagcgctgtatgattataaaaaggaaagagaagaagatattgacttgcacttgggtgacatattgactgtgaataaagggtccttagtagctcttggattcagtgatggacaggaagccaggcctgaagaaattggctggttaaatggctataatgaaaccacaggggaaaggggggactttccgggaacttacgtagaatatattggaaggaaaaaaatctcgcctcccacaccaaagccccggccacctcggcctcttcctgttgcaccaggttcttcgaaaactgaagcagatgttgaacaacaagctttgactctcccggatcttgcagagcagtttgcccctcctgacattgccccgcctcttcttatcaagctcgtggaagccattgaaaagaaaggtctggaatgttcaactctatacagaacacagagctccagcaacctggcagaattacgacagcttcttgattgtgatacaccctccgtggacttggaaatgatcgatgtgcacgttttggctgacgctttcaaacgctatctcctggacttaccaaatcctgtcattccagcagccgtttacagtgaaatgatttctttagctccagaagtacaaagctccgaagaatatattcagctattgaagaagcttattaggtcgcctagcatacctcatcagtattggcttacgcttcagtatttgttaaaacatttcttcaagctctctcaaacctccagcaaaaatctgttgaatgcaagagtactctctgaaattttcagccctatgcttttcagattctcagcagccagctctgataatactgaaaacctcataaaagttatagaaattttaatctcaactgaatggaatgaacgacagcctgcaccagcactgcctcctaaaccaccaaaacctactactgtagccaacaacggtatgaataacaatatgtccttacaagatgctgaatggtactggggagatatctcgagggaagaagtgaatgaaaaacttcgagatacagcagacgggacctttttggtacgagatgcgtctactaaaatgcatggtgattatactcttacactaaggaaagggggaaataacaaattaatcaaaatatttcatcgagatgggaaatatggcttctctgacccattaaccttcagttctgtggttgaattaataaaccactaccggaatgaatctctagctcagtataatcccaaattggatgtgaaattactttatccagtatccaaataccaacaggatcaagttgtcaaagaagataatattgaagctgtagggaaaaaattacatgaatataacactcagtttcaagaaaaaagtcgagaatatgatagattatatgaagaatatacccgcacatcccaggaaatccaaatgaaaaggacagctattgaagcatttaatgaaaccataaaaatatttgaagaacagtgccagacccaagagcggtacagcaaagaatacatagaaaagtttaaacgtgaaggcaatgagaaagaaatacaaaggattatgcataattatgataagttgaagtctcgaatcagtgaaattattgacagtagaagaagattggaagaagacttgaagaagcaggcagctgagtatcgagaaattgacaaacgtatgaacagcattaaaccagaccttatccagctgagaaagacgagagaccaatacttgatgtggttgactcaaaaaggtgttcggcaaaagaagttgaacgagtggttgggcaatgaaaacactgaagaccaatattcactggtggaagatgatgaagatttgccccatcatgatgagaagacatggaatgttggaagcagcaaccgaaacaaagctgaaaacctgttgcgagggaagcgagatggcacttttcttgtccgggagagcagtaaacagggctgctatgcctgctctgtagtggtggacggcgaagtaaagcattgtgtcataaacaaaacagcaactggctatggctttgccgagccctataacttgtacagctctctgaaagaactggtgctacattaccaacacacctcccttgtgcagcacaacgactccctcaatgtcacactagcctacccagtatatgcacagcagaggcgatgaagcgcttactctttgatccttctcctgaagttcagccaccctgaggcctctggaaagcaaagggctcctctccagtctgatctgtgaattgagctgcagaaacgaagccatctttctttggatgggactagagctttctttcacaaaaaagaagtaggggaagacatgcagcctaaggctgtatgatgaccacacgttcctaagctggagtgcttatcccttctttttctttttttctttggtttaatttaaagccacaaccacatacaacacaaagagaaaaagaaatgcaaaaatctctgcgtgcagggacaaagaggcctttaaccatggtgcttgttaatgctttctgaagctttaccagctgaaagttgggactctggagagcggaggagagagaggcagaagaaccctggcctgagaaggtttggtccagcctggtttagcctggatgttgctgtgcacggtggacccagacacatcgcactgtggattatttcattttgtaacaaatgaacgatatgtagcagaaaggcacgtccactcacaagggacgctttgggagaatgtcagttcatgtatgttcagaagaaattctgtcatagaaagtgccagaaagtgtttaacttgtcaaaaaacaaaaacccagcaacagaaaaatggagtttggaaaacaggacttaaaatgacattcagtatataaaatatgtacataatattggatgactaactatcaaatagatggatttgtatcaataccaaatagcttctgttttgttttgctgaaggctaaattcacagcgctatgcaattcttaattttcattaagttgttatttcagttttaaatgtaccttcagaataagcttccccaccccagtttttgttgcttgaaaatattgttgtcccggatttttgttaatattcatttttgttatccttttttaaaagtaaatgtacaggatgccagtaaaaaaaaaaaatggcttcagaattaaaactatgaaatattttacagtttttcttgtacagagtacttggctgttagcccaaggttaaaaagttcataacagattttttttggactgttttgttgggcagtgcctgataagcttcaaagctgctttattcaataaaaaaaagaaatgaaaaagatatatgaatatgacaaagtattgctgagtccaacaatgttgttttaagactcttaaaatacggtacctggcaatgtttatttcataaagaattgtgaacttcttgaatctagggagggggaatgtagtgaagggatgtatcaagtggggtggtgggagggggaggcaaggttatatgcactttctcatgatttacagagaagtgaataactgcaaagtgaagttgcttcttctacttcagtcttctctcactttgatttgctagttgttatcaattaatgacaattacaaacctactgtatctctaatacagtgtgactggtcaggtatttcagttcttaggaaggaagtgccaagtttgtttttgggttcctggaacagcgctcacctttgtttagaacactggtttaaagggataatcatctctgtcacattagactatccatcatgaccagcaaatactcattttaggaaaaaaaaaagcatgatctgaaaaatacttttggtggtatgttggttaccctcctagctttccatttggtttagaacataaagcaaatagacacagtcatactgtcactgctctggactgtgtggagctcgctaaagtcatggtcattgcaggaatccaagtggcagtccttctcattcattctaatcattgtatgtgcttcactacgggggggagaaggaaacgttagcatcatgtttcccatttagggcaggagtgagaggtctctcttcctgatttagatatgcaaaagctggtatgttcagtaggaactgtacatgtgttgggaggcataaagactaattagcaaccataatatggtcactaccctaatagactaaatgaaatcttgcaatttcaaattactctttctccatattagatttacccacagctatatttctgtttaagtactagggtgagggttttctgttactttgttttttaatgttgttccttttgaaagaatcagtcttgcagctgagtgaaaaatctgtggaatgtattatttgtcctctttacatgaaactactcatacttaagcaaaagtcagtcttatagcaagactgttagccctcaaacttgactctactgatctgaccatttccctctcatcgccagacaactgacgatttccctggttttagtctgcgtctctgctttaaagttattgtgatatccttctagatcatacacaagtctaacagttaattagttaacagtttttaaactaggtttgtgggtatttttttggtagcacatgtatgctattacatacaaatttttatttctaaaatataagatctgagattgaatattttcattaaaagctacagttttgtgaatctttgtgcttcaacattctttgcaagatgatacggtatttaggcatttgccttatttttgcatctcacaaacataagtgcaatagatcttttcattgaacagcaaagtaggattcatcattccatatgacttgagttacaccagacctattctgcccaatgcctttttgattacagtgtagcttgcccaccgcatttgtcgttttagatactttgctagccggccactttggatttcatcagacagtcctaacaatattgtctgaacggctgaatatgaatagatacagcagaggcactcctgatatatgatttttatccatgcgtcagtttttcccacccagtgtagcatcctaaagataaagccagaagctaagctgccagtgaggctgtgattgggcgtagaagtgggagcattgggacctcacattacacacacgagagatcataaccatgtgaaaaggcaaaaagcatgtgtttgcaacatctgataacttcatggcctttgataaatgtatatatgtatatgtgcatggactgtgtttccagtacacctttcagccaaaacagatccacagtagttgttgagttcaagtacataaagtacataacaagcgaacgtctagtacaattcttacttatgtgtatgggatttttccctttgaggttgctttgttttgtcttacaaaggtgaaaattgtttgtaagtgaagtgagaagttcatatttctttggcttttttgtgtttttaaaagttactccttttagggagctggtctgatgacttgcttagcttggaaatccttgttttcagtgtgtcgagtcaaaatgtgtttatgtgagctgtcactgtggggaaccaattgctttgtcatatagctggttatgaactagtaacatgtttgggaagtcctactgatgttcctttggaagaaaaaatctgctggttttaacaactgtgcttttgctatgtatggtatccaagttagttgaaacgcagacactgagatctgtttgagtttagggtcatttttagaaaggggcagtttaaagcacaatgtctcacatgggacaaagttccaaaatgccaaattcttattttttaaaaagctagttctataaaatactggtattatgggtggggaggaaatagaattgagtcaattggaaagactatccaacttaacatgaaacttgtcaccatgagatagcattagctgcccaggatgctgctatatatatatatatatatatatatgtgtgtgtgtgtgtgtgtgtgtatatatatatatatatatatatatatatatatgtgtgtgtgtatatatatatatatgtgtatatatatatgtatatacatatatgtatatatacgcacatatatatatgtatttaaaaaaatcaaaacaaaaaaaaactcatttatacctgtgtattttttaaagctacaatctgttcaatgtttttaaaaatctgtttatatgacattgttaaaataaagttggtcttttgacgaga

SEQ ID NO: 316871 - DNA, 6348 bp, Homo sapiens
cattcgggcggggtgaagctcgtgtgtggagtgccacggtacaatcagacgacagatggacagtgtgacaaaagtgtcagaaaggattgggcctcgctgtgagagtcagcctggattcaaagtgttgacaagttgctgaaaaggaagccagtgagaggactgtggcacgcagaggaagtggagccctgtcttcggtcacaccattgatggaggacagatggacagccgtatggccagtcacctctcctcttaaacctttggagagtggtcctttgtcctctgctggacacataataggaattctaacacattctctgaattcacttttcataaaaacgtaaaatcagactgctctgtacaaccaggctcaactgttgcatggtagcagatttgcaaacatgagtgctgaggggtaccagtacagagcgctgtatgattataaaaaggaaagagaagaagatattgacttgcacttgggtgacatattgactgtgaataaagggtccttagtagctcttggattcagtgatggacaggaagccaggcctgaagaaattggctggttaaatggctataatgaaaccacaggggaaaggggggactttccgggaacttacgtagaatatattggaaggaaaaaaatctcgcctcccacaccaaagccccggccacctcggcctcttcctgttgcaccaggttcttcgaaaactgaagcagatgttgaacaacaagctttgactctcccggatcttgcagagcagtttgcccctcctgacattgccccgcctcttcttatcaagctcgtggaagccattgaaaagaaaggtctggaatgttcaactctatacagaacacagagctccagcaacctggcagaattacgacagcttcttgattgtgatacaccctccgtggacttggaaatgatcgatgtgcacgttttggctgacgctttcaaacgctatctcctggacttaccaaatcctgtcattccagcagccgtttacagtgaaatgatttctttagctccagaagtacaaagctccgaagaatatattcagctattgaagaagcttattaggtcgcctagcatacctcatcagtattggcttacgcttcagtatttgttaaaacatttcttcaagctctctcaaacctccagcaaaaatctgttgaatgcaagagtactctctgaaattttcagccctatgcttttcagattctcagcagccagctctgataatactgaaaacctcataaaagttatagaaattttaatctcaactgaatggaatgaacgacagcctgcaccagcactgcctcctaaaccaccaaaacctactactgtagccaacaacggtatgaataacaatatgtccttacaagatgctgaatggtactggggagatatctcgagggaagaagtgaatgaaaaacttcgagatacagcagacgggacctttttggtacgagatgcgtctactaaaatgcatggtgattatactcttacactaaggaaagggggaaataacaaattaatcaaaatatttcatcgagatgggaaatatggcttctctgacccattaaccttcagttctgtggttgaattaataaaccactaccggaatgaatctctagctcagtataatcccaaattggatgtgaaattactttatccagtatccaaataccaacaggatcaagttgtcaaagaagataatattgaagctgtagggaaaaaattacatgaatataacactcagtttcaagaaaaaagtcgagaatatgatagattatatgaagaatatacccgcacatcccaggaaatccaaatgaaaaggacagctattgaagcatttaatgaaaccataaaaatatttgaagaacagtgccagacccaagagcggtacagcaaagaatacatagaaaagtttaaacgtgaaggcaatgagaaagaaatacaaaggattatgcataattatgataagttgaagtctcgaatcagtgaaattattgacagtagaagaagattggaagaagacttgaagaagcaggcagctgagtatcgagaaattgacaaacgtatgaacagcattaaaccagaccttatccagctgagaaagacgagagaccaatacttgatgtggttgactcaaaaaggtgttcggcaaaagaagttgaacgagtggttgggcaatgaaaacactgaagaccaatattcactggtggaagatgatgaagatttgccccatcatgatgagaagacatggaatgttggaagcagcaaccgaaacaaagctgaaaacctgttgcgagggaagcgagatggcacttttcttgtccgggagagcagtaaacagggctgctatgcctgctctgtagtggtggacggcgaagtaaagcattgtgtcataaacaaaacagcaactggctatggctttgccgagccctataacttgtacagctctctgaaagaactggtgctacattaccaacacacctcccttgtgcagcacaacgactccctcaatgtcacactagcctacccagtatatgcacagcagaggcgatgaagcgcttactctttgatccttctcctgaagttcagccaccctgaggcctctggaaagcaaagggctcctctccagtctgatctgtgaattgagctgcagaaacgaagccatctttctttggatgggactagagctttctttcacaaaaaagaagtaggggaagacatgcagcctaaggctgtatgatgaccacacgttcctaagctggagtgcttatcccttctttttctttttttctttggtttaatttaaagccacaaccacatacaacacaaagagaaaaagaaatgcaaaaatctctgcgtgcagggacaaagaggcctttaaccatggtgcttgttaatgctttctgaagctttaccagctgaaagttgggactctggagagcggaggagagagaggcagaagaaccctggcctgagaaggtttggtccagcctggtttagcctggatgttgctgtgcacggtggacccagacacatcgcactgtggattatttcattttgtaacaaatgaacgatatgtagcagaaaggcacgtccactcacaagggacgctttgggagaatgtcagttcatgtatgttcagaagaaattctgtcatagaaagtgccagaaagtgtttaacttgtcaaaaaacaaaaacccagcaacagaaaaatggagtttggaaaacaggacttaaaatgacattcagtatataaaatatgtacataatattggatgactaactatcaaatagatggatttgtatcaataccaaatagcttctgttttgttttgctgaaggctaaattcacagcgctatgcaattcttaattttcattaagttgttatttcagttttaaatgtaccttcagaataagcttccccaccccagtttttgttgcttgaaaatattgttgtcccggatttttgttaatattcatttttgttatccttttttaaaagtaaatgtacaggatgccagtaaaaaaaaaaaatggcttcagaattaaaactatgaaatattttacagtttttcttgtacagagtacttggctgttagcccaaggttaaaaagttcataacagattttttttggactgttttgttgggcagtgcctgataagcttcaaagctgctttattcaataaaaaaaagaaatgaaaaagatatatgaatatgacaaagtattgctgagtccaacaatgttgttttaagactcttaaaatacggtacctggcaatgtttatttcataaagaattgtgaacttcttgaatctagggagggggaatgtagtgaagggatgtatcaagtggggtggtgggagggggaggcaaggttatatgcactttctcatgatttacagagaagtgaataactgcaaagtgaagttgcttcttctacttcagtcttctctcactttgatttgctagttgttatcaattaatgacaattacaaacctactgtatctctaatacagtgtgactggtcaggtatttcagttcttaggaaggaagtgccaagtttgtttttgggttcctggaacagcgctcacctttgtttagaacactggtttaaagggataatcatctctgtcacattagactatccatcatgaccagcaaatactcattttaggaaaaaaaaaagcatgatctgaaaaatacttttggtggtatgttggttaccctcctagctttccatttggtttagaacataaagcaaatagacacagtcatactgtcactgctctggactgtgtggagctcgctaaagtcatggtcattgcaggaatccaagtggcagtccttctcattcattctaatcattgtatgtgcttcactacgggggggagaaggaaacgttagcatcatgtttcccatttagggcaggagtgagaggtctctcttcctgatttagatatgcaaaagctggtatgttcagtaggaactgtacatgtgttgggaggcataaagactaattagcaaccataatatggtcactaccctaatagactaaatgaaatcttgcaatttcaaattactctttctccatattagatttacccacagctatatttctgtttaagtactagggtgagggttttctgttactttgttttttaatgttgttccttttgaaagaatcagtcttgcagctgagtgaaaaatctgtggaatgtattatttgtcctctttacatgaaactactcatacttaagcaaaagtcagtcttatagcaagactgttagccctcaaacttgactctactgatctgaccatttccctctcatcgccagacaactgacgatttccctggttttagtctgcgtctctgctttaaagttattgtgatatccttctagatcatacacaagtctaacagttaattagttaacagtttttaaactaggtttgtgggtatttttttggtagcacatgtatgctattacatacaaatttttatttctaaaatataagatctgagattgaatattttcattaaaagctacagttttgtgaatctttgtgcttcaacattctttgcaagatgatacggtatttaggcatttgccttatttttgcatctcacaaacataagtgcaatagatcttttcattgaacagcaaagtaggattcatcattccatatgacttgagttacaccagacctattctgcccaatgcctttttgattacagtgtagcttgcccaccgcatttgtcgttttagatactttgctagccggccactttggatttcatcagacagtcctaacaatattgtctgaacggctgaatatgaatagatacagcagaggcactcctgatatatgatttttatccatgcgtcagtttttcccacccagtgtagcatcctaaagataaagccagaagctaagctgccagtgaggctgtgattgggcgtagaagtgggagcattgggacctcacattacacacacgagagatcataaccatgtgaaaaggcaaaaagcatgtgtttgcaacatctgataacttcatggcctttgataaatgtatatatgtatatgtgcatggactgtgtttccagtacacctttcagccaaaacagatccacagtagttgttgagttcaagtacataaagtacataacaagcgaacgtctagtacaattcttacttatgtgtatgggatttttccctttgaggttgctttgttttgtcttacaaaggtgaaaattgtttgtaagtgaagtgagaagttcatatttctttggcttttttgtgtttttaaaagttactccttttagggagctggtctgatgacttgcttagcttggaaatccttgttttcagtgtgtcgagtcaaaatgtgtttatgtgagctgtcactgtggggaaccaattgctttgtcatatagctggttatgaactagtaacatgtttgggaagtcctactgatgttcctttggaagaaaaaatctgctggttttaacaactgtgcttttgctatgtatggtatccaagttagttgaaacgcagacactgagatctgtttgagtttagggtcatttttagaaaggggcagtttaaagcacaatgtctcacatgggacaaagttccaaaatgccaaattcttattttttaaaaagctagttctataaaatactggtattatgggtgggggtagtgtgcctccttgacatttcgttcaagttatagattcaatggagctatgtcttgttttaagttgctttaatgcattgtattagatcttcaaacagaataaaggttgttttgaaactgaa

SEQ ID NO: 316872 - DNA, 5639 bp, Homo sapiens
cattacaaagaaagccggactcttttcttataactgagctcagccaaggaaactcttgcacaaatgtacaatactgtttggaatatggaagacctggatttagaatatgccaagacagatataaattgtggcacagacttgatgttttatatagaaatggacccaccagcactgcctcctaaaccaccaaaacctactactgtagccaacaacggtatgaataacaatatgtccttacaagatgctgaatggtactggggagatatctcgagggaagaagtgaatgaaaaacttcgagatacagcagacgggacctttttggtacgagatgcgtctactaaaatgcatggtgattatactcttacactaaggaaagggggaaataacaaattaatcaaaatatttcatcgagatgggaaatatggcttctctgacccattaaccttcagttctgtggttgaattaataaaccactaccggaatgaatctctagctcagtataatcccaaattggatgtgaaattactttatccagtatccaaataccaacaggatcaagttgtcaaagaagataatattgaagctgtagggaaaaaattacatgaatataacactcagtttcaagaaaaaagtcgagaatatgatagattatatgaagaatatacccgcacatcccaggaaatccaaatgaaaaggacagctattgaagcatttaatgaaaccataaaaatatttgaagaacagtgccagacccaagagcggtacagcaaagaatacatagaaaagtttaaacgtgaaggcaatgagaaagaaatacaaaggattatgcataattatgataagttgaagtctcgaatcagtgaaattattgacagtagaagaagattggaagaagacttgaagaagcaggcagctgagtatcgagaaattgacaaacgtatgaacagcattaaaccagaccttatccagctgagaaagacgagagaccaatacttgatgtggttgactcaaaaaggtgttcggcaaaagaagttgaacgagtggttgggcaatgaaaacactgaagaccaatattcactggtggaagatgatgaagatttgccccatcatgatgagaagacatggaatgttggaagcagcaaccgaaacaaagctgaaaacctgttgcgagggaagcgagatggcacttttcttgtccgggagagcagtaaacagggctgctatgcctgctctgtagtggtggacggcgaagtaaagcattgtgtcataaacaaaacagcaactggctatggctttgccgagccctataacttgtacagctctctgaaagaactggtgctacattaccaacacacctcccttgtgcagcacaacgactccctcaatgtcacactagcctacccagtatatgcacagcagaggcgatgaagcgcttactctttgatccttctcctgaagttcagccaccctgaggcctctggaaagcaaagggctcctctccagtctgatctgtgaattgagctgcagaaacgaagccatctttctttggatgggactagagctttctttcacaaaaaagaagtaggggaagacatgcagcctaaggctgtatgatgaccacacgttcctaagctggagtgcttatcccttctttttctttttttctttggtttaatttaaagccacaaccacatacaacacaaagagaaaaagaaatgcaaaaatctctgcgtgcagggacaaagaggcctttaaccatggtgcttgttaatgctttctgaagctttaccagctgaaagttgggactctggagagcggaggagagagaggcagaagaaccctggcctgagaaggtttggtccagcctggtttagcctggatgttgctgtgcacggtggacccagacacatcgcactgtggattatttcattttgtaacaaatgaacgatatgtagcagaaaggcacgtccactcacaagggacgctttgggagaatgtcagttcatgtatgttcagaagaaattctgtcatagaaagtgccagaaagtgtttaacttgtcaaaaaacaaaaacccagcaacagaaaaatggagtttggaaaacaggacttaaaatgacattcagtatataaaatatgtacataatattggatgactaactatcaaatagatggatttgtatcaataccaaatagcttctgttttgttttgctgaaggctaaattcacagcgctatgcaattcttaattttcattaagttgttatttcagttttaaatgtaccttcagaataagcttccccaccccagtttttgttgcttgaaaatattgttgtcccggatttttgttaatattcatttttgttatccttttttaaaagtaaatgtacaggatgccagtaaaaaaaaaaaatggcttcagaattaaaactatgaaatattttacagtttttcttgtacagagtacttggctgttagcccaaggttaaaaagttcataacagattttttttggactgttttgttgggcagtgcctgataagcttcaaagctgctttattcaataaaaaaaagaaatgaaaaagatatatgaatatgacaaagtattgctgagtccaacaatgttgttttaagactcttaaaatacggtacctggcaatgtttatttcataaagaattgtgaacttcttgaatctagggagggggaatgtagtgaagggatgtatcaagtggggtggtgggagggggaggcaaggttatatgcactttctcatgatttacagagaagtgaataactgcaaagtgaagttgcttcttctacttcagtcttctctcactttgatttgctagttgttatcaattaatgacaattacaaacctactgtatctctaatacagtgtgactggtcaggtatttcagttcttaggaaggaagtgccaagtttgtttttgggttcctggaacagcgctcacctttgtttagaacactggtttaaagggataatcatctctgtcacattagactatccatcatgaccagcaaatactcattttaggaaaaaaaaaagcatgatctgaaaaatacttttggtggtatgttggttaccctcctagctttccatttggtttagaacataaagcaaatagacacagtcatactgtcactgctctggactgtgtggagctcgctaaagtcatggtcattgcaggaatccaagtggcagtccttctcattcattctaatcattgtatgtgcttcactacgggggggagaaggaaacgttagcatcatgtttcccatttagggcaggagtgagaggtctctcttcctgatttagatatgcaaaagctggtatgttcagtaggaactgtacatgtgttgggaggcataaagactaattagcaaccataatatggtcactaccctaatagactaaatgaaatcttgcaatttcaaattactctttctccatattagatttacccacagctatatttctgtttaagtactagggtgagggttttctgttactttgttttttaatgttgttccttttgaaagaatcagtcttgcagctgagtgaaaaatctgtggaatgtattatttgtcctctttacatgaaactactcatacttaagcaaaagtcagtcttatagcaagactgttagccctcaaacttgactctactgatctgaccatttccctctcatcgccagacaactgacgatttccctggttttagtctgcgtctctgctttaaagttattgtgatatccttctagatcatacacaagtctaacagttaattagttaacagtttttaaactaggtttgtgggtatttttttggtagcacatgtatgctattacatacaaatttttatttctaaaatataagatctgagattgaatattttcattaaaagctacagttttgtgaatctttgtgcttcaacattctttgcaagatgatacggtatttaggcatttgccttatttttgcatctcacaaacataagtgcaatagatcttttcattgaacagcaaagtaggattcatcattccatatgacttgagttacaccagacctattctgcccaatgcctttttgattacagtgtagcttgcccaccgcatttgtcgttttagatactttgctagccggccactttggatttcatcagacagtcctaacaatattgtctgaacggctgaatatgaatagatacagcagaggcactcctgatatatgatttttatccatgcgtcagtttttcccacccagtgtagcatcctaaagataaagccagaagctaagctgccagtgaggctgtgattgggcgtagaagtgggagcattgggacctcacattacacacacgagagatcataaccatgtgaaaaggcaaaaagcatgtgtttgcaacatctgataacttcatggcctttgataaatgtatatatgtatatgtgcatggactgtgtttccagtacacctttcagccaaaacagatccacagtagttgttgagttcaagtacataaagtacataacaagcgaacgtctagtacaattcttacttatgtgtatgggatttttccctttgaggttgctttgttttgtcttacaaaggtgaaaattgtttgtaagtgaagtgagaagttcatatttctttggcttttttgtgtttttaaaagttactccttttagggagctggtctgatgacttgcttagcttggaaatccttgttttcagtgtgtcgagtcaaaatgtgtttatgtgagctgtcactgtggggaaccaattgctttgtcatatagctggttatgaactagtaacatgtttgggaagtcctactgatgttcctttggaagaaaaaatctgctggttttaacaactgtgcttttgctatgtatggtatccaagttagttgaaacgcagacactgagatctgtttgagtttagggtcatttttagaaaggggcagtttaaagcacaatgtctcacatgggacaaagttccaaaatgccaaattcttattttttaaaaagctagttctataaaatactggtattatgggtggggaggaaatagaattgagtcaattggaaagactatccaacttaacatgaaacttgtcaccatgagatagcattagctgcccaggatgctgctatatatatatatatatatatatatgtgtgtgtgtgtgtgtgtgtgtatatatatatatatatatatatatatatatatgtgtgtgtgtatatatatatatatgtgtatatatatatgtatatacatatatgtatatatacgcacatatatatatgtatttaaaaaaatcaaaacaaaaaaaaactcatttatacctgtgtattttttaaagctacaatctgttcaatgtttttaaaaatctgtttatatgacattgttaaaataaagttggtcttttgacgagagggaggatgtcacggtcagttgtaactttgccttcacaaggcaactggggtggggggtgggggtagtgtgcctccttgacatttcgttcaagttatagattcaatggagctatgtcttgttttaagttgctttaatgcattgtattagatcttcaaacagaataaaggttgttttgaaactgaa

SEQ ID NO: 316873 - DNA, 6046 bp, Homo sapiens
agcagctggagcggagttggaggaagcagcggcagcggcgagggcggcaggctagctgtcggagacggcaagcacggatcgggcacggtctggaatgttcaactctatacagaacacagagctccagcaacctggcagaattacgacagcttcttgattgtgatacaccctccgtggacttggaaatgatcgatgtgcacgttttggctgacgctttcaaacgctatctcctggacttaccaaatcctgtcattccagcagccgtttacagtgaaatgatttctttagctccagaagtacaaagctccgaagaatatattcagctattgaagaagcttattaggtcgcctagcatacctcatcagtattggcttacgcttcagtatttgttaaaacatttcttcaagctctctcaaacctccagcaaaaatctgttgaatgcaagagtactctctgaaattttcagccctatgcttttcagattctcagcagccagctctgataatactgaaaacctcataaaagttatagaaattttaatctcaactgaatggaatgaacgacagcctgcaccagcactgcctcctaaaccaccaaaacctactactgtagccaacaacggtatgaataacaatatgtccttacaagatgctgaatggtactggggagatatctcgagggaagaagtgaatgaaaaacttcgagatacagcagacgggacctttttggtacgagatgcgtctactaaaatgcatggtgattatactcttacactaaggaaagggggaaataacaaattaatcaaaatatttcatcgagatgggaaatatggcttctctgacccattaaccttcagttctgtggttgaattaataaaccactaccggaatgaatctctagctcagtataatcccaaattggatgtgaaattactttatccagtatccaaataccaacaggatcaagttgtcaaagaagataatattgaagctgtagggaaaaaattacatgaatataacactcagtttcaagaaaaaagtcgagaatatgatagattatatgaagaatatacccgcacatcccaggaaatccaaatgaaaaggacagctattgaagcatttaatgaaaccataaaaatatttgaagaacagtgccagacccaagagcggtacagcaaagaatacatagaaaagtttaaacgtgaaggcaatgagaaagaaatacaaaggattatgcataattatgataagttgaagtctcgaatcagtgaaattattgacagtagaagaagattggaagaagacttgaagaagcaggcagctgagtatcgagaaattgacaaacgtatgaacagcattaaaccagaccttatccagctgagaaagacgagagaccaatacttgatgtggttgactcaaaaaggtgttcggcaaaagaagttgaacgagtggttgggcaatgaaaacactgaagaccaatattcactggtggaagatgatgaagatttgccccatcatgatgagaagacatggaatgttggaagcagcaaccgaaacaaagctgaaaacctgttgcgagggaagcgagatggcacttttcttgtccgggagagcagtaaacagggctgctatgcctgctctgtagtggtggacggcgaagtaaagcattgtgtcataaacaaaacagcaactggctatggctttgccgagccctataacttgtacagctctctgaaagaactggtgctacattaccaacacacctcccttgtgcagcacaacgactccctcaatgtcacactagcctacccagtatatgcacagcagaggcgatgaagcgcttactctttgatccttctcctgaagttcagccaccctgaggcctctggaaagcaaagggctcctctccagtctgatctgtgaattgagctgcagaaacgaagccatctttctttggatgggactagagctttctttcacaaaaaagaagtaggggaagacatgcagcctaaggctgtatgatgaccacacgttcctaagctggagtgcttatcccttctttttctttttttctttggtttaatttaaagccacaaccacatacaacacaaagagaaaaagaaatgcaaaaatctctgcgtgcagggacaaagaggcctttaaccatggtgcttgttaatgctttctgaagctttaccagctgaaagttgggactctggagagcggaggagagagaggcagaagaaccctggcctgagaaggtttggtccagcctggtttagcctggatgttgctgtgcacggtggacccagacacatcgcactgtggattatttcattttgtaacaaatgaacgatatgtagcagaaaggcacgtccactcacaagggacgctttgggagaatgtcagttcatgtatgttcagaagaaattctgtcatagaaagtgccagaaagtgtttaacttgtcaaaaaacaaaaacccagcaacagaaaaatggagtttggaaaacaggacttaaaatgacattcagtatataaaatatgtacataatattggatgactaactatcaaatagatggatttgtatcaataccaaatagcttctgttttgttttgctgaaggctaaattcacagcgctatgcaattcttaattttcattaagttgttatttcagttttaaatgtaccttcagaataagcttccccaccccagtttttgttgcttgaaaatattgttgtcccggatttttgttaatattcatttttgttatccttttttaaaagtaaatgtacaggatgccagtaaaaaaaaaaaatggcttcagaattaaaactatgaaatattttacagtttttcttgtacagagtacttggctgttagcccaaggttaaaaagttcataacagattttttttggactgttttgttgggcagtgcctgataagcttcaaagctgctttattcaataaaaaaaagaaatgaaaaagatatatgaatatgacaaagtattgctgagtccaacaatgttgttttaagactcttaaaatacggtacctggcaatgtttatttcataaagaattgtgaacttcttgaatctagggagggggaatgtagtgaagggatgtatcaagtggggtggtgggagggggaggcaaggttatatgcactttctcatgatttacagagaagtgaataactgcaaagtgaagttgcttcttctacttcagtcttctctcactttgatttgctagttgttatcaattaatgacaattacaaacctactgtatctctaatacagtgtgactggtcaggtatttcagttcttaggaaggaagtgccaagtttgtttttgggttcctggaacagcgctcacctttgtttagaacactggtttaaagggataatcatctctgtcacattagactatccatcatgaccagcaaatactcattttaggaaaaaaaaaagcatgatctgaaaaatacttttggtggtatgttggttaccctcctagctttccatttggtttagaacataaagcaaatagacacagtcatactgtcactgctctggactgtgtggagctcgctaaagtcatggtcattgcaggaatccaagtggcagtccttctcattcattctaatcattgtatgtgcttcactacgggggggagaaggaaacgttagcatcatgtttcccatttagggcaggagtgagaggtctctcttcctgatttagatatgcaaaagctggtatgttcagtaggaactgtacatgtgttgggaggcataaagactaattagcaaccataatatggtcactaccctaatagactaaatgaaatcttgcaatttcaaattactctttctccatattagatttacccacagctatatttctgtttaagtactagggtgagggttttctgttactttgttttttaatgttgttccttttgaaagaatcagtcttgcagctgagtgaaaaatctgtggaatgtattatttgtcctctttacatgaaactactcatacttaagcaaaagtcagtcttatagcaagactgttagccctcaaacttgactctactgatctgaccatttccctctcatcgccagacaactgacgatttccctggttttagtctgcgtctctgctttaaagttattgtgatatccttctagatcatacacaagtctaacagttaattagttaacagtttttaaactaggtttgtgggtatttttttggtagcacatgtatgctattacatacaaatttttatttctaaaatataagatctgagattgaatattttcattaaaagctacagttttgtgaatctttgtgcttcaacattctttgcaagatgatacggtatttaggcatttgccttatttttgcatctcacaaacataagtgcaatagatcttttcattgaacagcaaagtaggattcatcattccatatgacttgagttacaccagacctattctgcccaatgcctttttgattacagtgtagcttgcccaccgcatttgtcgttttagatactttgctagccggccactttggatttcatcagacagtcctaacaatattgtctgaacggctgaatatgaatagatacagcagaggcactcctgatatatgatttttatccatgcgtcagtttttcccacccagtgtagcatcctaaagataaagccagaagctaagctgccagtgaggctgtgattgggcgtagaagtgggagcattgggacctcacattacacacacgagagatcataaccatgtgaaaaggcaaaaagcatgtgtttgcaacatctgataacttcatggcctttgataaatgtatatatgtatatgtgcatggactgtgtttccagtacacctttcagccaaaacagatccacagtagttgttgagttcaagtacataaagtacataacaagcgaacgtctagtacaattcttacttatgtgtatgggatttttccctttgaggttgctttgttttgtcttacaaaggtgaaaattgtttgtaagtgaagtgagaagttcatatttctttggcttttttgtgtttttaaaagttactccttttagggagctggtctgatgacttgcttagcttggaaatccttgttttcagtgtgtcgagtcaaaatgtgtttatgtgagctgtcactgtggggaaccaattgctttgtcatatagctggttatgaactagtaacatgtttgggaagtcctactgatgttcctttggaagaaaaaatctgctggttttaacaactgtgcttttgctatgtatggtatccaagttagttgaaacgcagacactgagatctgtttgagtttagggtcatttttagaaaggggcagtttaaagcacaatgtctcacatgggacaaagttccaaaatgccaaattcttattttttaaaaagctagttctataaaatactggtattatgggtggggaggaaatagaattgagtcaattggaaagactatccaacttaacatgaaacttgtcaccatgagatagcattagctgcccaggatgctgctatatatatatatatatatatatatgtgtgtgtgtgtgtgtgtgtgtatatatatatatatatatatatatatatatatgtgtgtgtgtatatatatatatatgtgtatatatatatgtatatacatatatgtatatatacgcacatatatatatgtatttaaaaaaatcaaaacaaaaaaaaactcatttatacctgtgtattttttaaagctacaatctgttcaatgtttttaaaaatctgtttatatgacattgttaaaataaagttggtcttttgacgagagggaggatgtcacggtcagttgtaactttgccttcacaaggcaactggggtggggggtgggggtagtgtgcctccttgacatttcgttcaagttatagattcaatggagctatgtcttgttttaagttgctttaatgcattgtattagatcttcaaacagaataaaggttgttttgaaactgaa

SEQ ID NO: 316874 - DNA, 6728 bp, Homo sapiens
cattcgggcggggtgaagctcgtgtgtggagtgccacggtacaatcagacgacagatggacagtgtgacaaaagtgtcagaaaggattgggcctcgctgtgagagtcagcctggattcaaagtgttgacaagttgctgaaaaggaagccagtgagaggactgtggcacgcagaggaagtggagccctgtcttcggtcacaccattgatggaggacagatggacagccgtatggccagtcacctctcctcttaaacctttggagagtggtcctttgtcctctgctggacacataataggaattctaacacattctctgaattcacttttcataaaaacgtaaaatcagactgctctgtacaaccaggctcaactgttgcatggtagcagatttgcaaacatgagtgctgaggggtaccagtacagagcgctgtatgattataaaaaggaaagagaagaagatattgacttgcacttgggtgacatattgactgtgaataaagggtccttagtagctcttggattcagtgatggacaggaagccaggcctgaagaaattggctggttaaatggctataatgaaaccacaggggaaaggggggactttccgggaacttacgtagaatatattggaaggaaaaaaatctcgcctcccacaccaaagccccggccacctcggcctcttcctgttgcaccaggttcttcgaaaactgaagcagatgttgaacaacaagctttgactctcccggatcttgcagagcagtttgcccctcctgacattgccccgcctcttcttatcaagctcgtggaagccattgaaaagaaaggtctggaatgttcaactctatacagaacacagagctccagcaacctggcagaattacgacagcttcttgattgtgatacaccctccgtggacttggaaatgatcgatgtgcacgttttggctgacgctttcaaacgctatctcctggacttaccaaatcctgtcattccagcagccgtttacagtgaaatgatttctttagctccagaagtacaaagctccgaagaatatattcagctattgaagaagcttattaggtcgcctagcatacctcatcagtattggcttacgcttcagtatttgttaaaacatttcttcaagctctctcaaacctccagcaaaaatctgttgaatgcaagagtactctctgaaattttcagccctatgcttttcagattctcagcagccagctctgataatactgaaaacctcataaaagttatagaaattttaatctcaactgaatggaatgaacgacagcctgcaccagcactgcctcctaaaccaccaaaacctactactgtagccaacaacggtatgaataacaatatgtccttacaagatgctgaatggtactggggagatatctcgagggaagaagtgaatgaaaaacttcgagatacagcagacgggacctttttggtacgagatgcgtctactaaaatgcatggtgattatactcttacactaaggaaagggggaaataacaaattaatcaaaatatttcatcgagatgggaaatatggcttctctgacccattaaccttcagttctgtggttgaattaataaaccactaccggaatgaatctctagctcagtataatcccaaattggatgtgaaattactttatccagtatccaaataccaacaggatcaagttgtcaaagaagataatattgaagctgtagggaaaaaattacatgaatataacactcagtttcaagaaaaaagtcgagaatatgatagattatatgaagaatatacccgcacatcccaggaaatccaaatgaaaaggacagctattgaagcatttaatgaaaccataaaaatatttgaagaacagtgccagacccaagagcggtacagcaaagaatacatagaaaagtttaaacgtgaaggcaatgagaaagaaatacaaaggattatgcataattatgataagttgaagtctcgaatcagtgaaattattgacagtagaagaagattggaagaagacttgaagaagcaggcagctgagtatcgagaaattgacaaacgtatgaacagcattaaaccagaccttatccagctgagaaagacgagagaccaatacttgatgtggttgactcaaaaaggtgttcggcaaaagaagttgaacgagtggttgggcaatgaaaacactgaagaccaatattcactggtggaagatgatgaagatttgccccatcatgatgagaagacatggaatgttggaagcagcaaccgaaacaaagctgaacagtttttcttctctcctctctagggtggacggcgaagtaaagcattgtgtcataaacaaaacagcaactggctatggctttgccgagccctataacttgtacagctctctgaaagaactggtgctacattaccaacacacctcccttgtgcagcacaacgactccctcaatgtcacactagcctacccagtatatgcacagcagaggcgatgaagcgcttactctttgatccttctcctgaagttcagccaccctgaggcctctggaaagcaaagggctcctctccagtctgatctgtgaattgagctgcagaaacgaagccatctttctttggatgggactagagctttctttcacaaaaaagaagtaggggaagacatgcagcctaaggctgtatgatgaccacacgttcctaagctggagtgcttatcccttctttttctttttttctttggtttaatttaaagccacaaccacatacaacacaaagagaaaaagaaatgcaaaaatctctgcgtgcagggacaaagaggcctttaaccatggtgcttgttaatgctttctgaagctttaccagctgaaagttgggactctggagagcggaggagagagaggcagaagaaccctggcctgagaaggtttggtccagcctggtttagcctggatgttgctgtgcacggtggacccagacacatcgcactgtggattatttcattttgtaacaaatgaacgatatgtagcagaaaggcacgtccactcacaagggacgctttgggagaatgtcagttcatgtatgttcagaagaaattctgtcatagaaagtgccagaaagtgtttaacttgtcaaaaaacaaaaacccagcaacagaaaaatggagtttggaaaacaggacttaaaatgacattcagtatataaaatatgtacataatattggatgactaactatcaaatagatggatttgtatcaataccaaatagcttctgttttgttttgctgaaggctaaattcacagcgctatgcaattcttaattttcattaagttgttatttcagttttaaatgtaccttcagaataagcttccccaccccagtttttgttgcttgaaaatattgttgtcccggatttttgttaatattcatttttgttatccttttttaaaagtaaatgtacaggatgccagtaaaaaaaaaaaatggcttcagaattaaaactatgaaatattttacagtttttcttgtacagagtacttggctgttagcccaaggttaaaaagttcataacagattttttttggactgttttgttgggcagtgcctgataagcttcaaagctgctttattcaataaaaaaaagaaatgaaaaagatatatgaatatgacaaagtattgctgagtccaacaatgttgttttaagactcttaaaatacggtacctggcaatgtttatttcataaagaattgtgaacttcttgaatctagggagggggaatgtagtgaagggatgtatcaagtggggtggtgggagggggaggcaaggttatatgcactttctcatgatttacagagaagtgaataactgcaaagtgaagttgcttcttctacttcagtcttctctcactttgatttgctagttgttatcaattaatgacaattacaaacctactgtatctctaatacagtgtgactggtcaggtatttcagttcttaggaaggaagtgccaagtttgtttttgggttcctggaacagcgctcacctttgtttagaacactggtttaaagggataatcatctctgtcacattagactatccatcatgaccagcaaatactcattttaggaaaaaaaaaagcatgatctgaaaaatacttttggtggtatgttggttaccctcctagctttccatttggtttagaacataaagcaaatagacacagtcatactgtcactgctctggactgtgtggagctcgctaaagtcatggtcattgcaggaatccaagtggcagtccttctcattcattctaatcattgtatgtgcttcactacgggggggagaaggaaacgttagcatcatgtttcccatttagggcaggagtgagaggtctctcttcctgatttagatatgcaaaagctggtatgttcagtaggaactgtacatgtgttgggaggcataaagactaattagcaaccataatatggtcactaccctaatagactaaatgaaatcttgcaatttcaaattactctttctccatattagatttacccacagctatatttctgtttaagtactagggtgagggttttctgttactttgttttttaatgttgttccttttgaaagaatcagtcttgcagctgagtgaaaaatctgtggaatgtattatttgtcctctttacatgaaactactcatacttaagcaaaagtcagtcttatagcaagactgttagccctcaaacttgactctactgatctgaccatttccctctcatcgccagacaactgacgatttccctggttttagtctgcgtctctgctttaaagttattgtgatatccttctagatcatacacaagtctaacagttaattagttaacagtttttaaactaggtttgtgggtatttttttggtagcacatgtatgctattacatacaaatttttatttctaaaatataagatctgagattgaatattttcattaaaagctacagttttgtgaatctttgtgcttcaacattctttgcaagatgatacggtatttaggcatttgccttatttttgcatctcacaaacataagtgcaatagatcttttcattgaacagcaaagtaggattcatcattccatatgacttgagttacaccagacctattctgcccaatgcctttttgattacagtgtagcttgcccaccgcatttgtcgttttagatactttgctagccggccactttggatttcatcagacagtcctaacaatattgtctgaacggctgaatatgaatagatacagcagaggcactcctgatatatgatttttatccatgcgtcagtttttcccacccagtgtagcatcctaaagataaagccagaagctaagctgccagtgaggctgtgattgggcgtagaagtgggagcattgggacctcacattacacacacgagagatcataaccatgtgaaaaggcaaaaagcatgtgtttgcaacatctgataacttcatggcctttgataaatgtatatatgtatatgtgcatggactgtgtttccagtacacctttcagccaaaacagatccacagtagttgttgagttcaagtacataaagtacataacaagcgaacgtctagtacaattcttacttatgtgtatgggatttttccctttgaggttgctttgttttgtcttacaaaggtgaaaattgtttgtaagtgaagtgagaagttcatatttctttggcttttttgtgtttttaaaagttactccttttagggagctggtctgatgacttgcttagcttggaaatccttgttttcagtgtgtcgagtcaaaatgtgtttatgtgagctgtcactgtggggaaccaattgctttgtcatatagctggttatgaactagtaacatgtttgggaagtcctactgatgttcctttggaagaaaaaatctgctggttttaacaactgtgcttttgctatgtatggtatccaagttagttgaaacgcagacactgagatctgtttgagtttagggtcatttttagaaaggggcagtttaaagcacaatgtctcacatgggacaaagttccaaaatgccaaattcttattttttaaaaagctagttctataaaatactggtattatgggtggggaggaaatagaattgagtcaattggaaagactatccaacttaacatgaaacttgtcaccatgagatagcattagctgcccaggatgctgctatatatatatatatatatatatatgtgtgtgtgtgtgtgtgtgtgtatatatatatatatatatatatatatatatatgtgtgtgtgtatatatatatatatgtgtatatatatatgtatatacatatatgtatatatacgcacatatatatatgtatttaaaaaaatcaaaacaaaaaaaaactcatttatacctgtgtattttttaaagctacaatctgttcaatgtttttaaaaatctgtttatatgacattgttaaaataaagttggtcttttgacgagagggaggatgtcacggtcagttgtaactttgccttcacaaggcaactggggtggggggtgggggtagtgtgcctccttgacatttcgttcaagttatagattcaatggagctatgtcttgttttaagttgctttaatgcattgtattagatcttcaaacagaataaaggttgttttgaaactgaa

SEQ ID NO: 316875 - DNA, 4860 bp, Homo sapiens
acatgcagagatggagagttgtgcagacacctcaaggacagccagaaagaaggaatcctatgaatagtcataatgggagtaatagtaacactgctagtcatggagcactgcagatagttgtcctcatcatgattggaagctaccacttgttgcatgcttactgcatgtcaggcattctatctagcattttgcatgcatgatctcatttcatttctcaaagtaactgtattacatgcattttactattgtcttccctttaaaccattttaaagatgaaaatacagtcagtcagtgaagctgggttacctacccaaggcactcggccaggtgtcagttgtaacctaggaccctttccccaagttgagactgcacaataatgctttttattaaagatgccctgaagagttgtgaattgtcttggacaagctcaaaagacagtttttcttctctcctctctagggtggacggcgaagtaaagcattgtgtcataaacaaaacagcaactggctatggctttgccgagccctataacttgtacagctctctgaaagaactggtgctacattaccaacacacctcccttgtgcagcacaacgactccctcaatgtcacactagcctacccagtatatgcacagcagaggcgatgaagcgcttactctttgatccttctcctgaagttcagccaccctgaggcctctggaaagcaaagggctcctctccagtctgatctgtgaattgagctgcagaaacgaagccatctttctttggatgggactagagctttctttcacaaaaaagaagtaggggaagacatgcagcctaaggctgtatgatgaccacacgttcctaagctggagtgcttatcccttctttttctttttttctttggtttaatttaaagccacaaccacatacaacacaaagagaaaaagaaatgcaaaaatctctgcgtgcagggacaaagaggcctttaaccatggtgcttgttaatgctttctgaagctttaccagctgaaagttgggactctggagagcggaggagagagaggcagaagaaccctggcctgagaaggtttggtccagcctggtttagcctggatgttgctgtgcacggtggacccagacacatcgcactgtggattatttcattttgtaacaaatgaacgatatgtagcagaaaggcacgtccactcacaagggacgctttgggagaatgtcagttcatgtatgttcagaagaaattctgtcatagaaagtgccagaaagtgtttaacttgtcaaaaaacaaaaacccagcaacagaaaaatggagtttggaaaacaggacttaaaatgacattcagtatataaaatatgtacataatattggatgactaactatcaaatagatggatttgtatcaataccaaatagcttctgttttgttttgctgaaggctaaattcacagcgctatgcaattcttaattttcattaagttgttatttcagttttaaatgtaccttcagaataagcttccccaccccagtttttgttgcttgaaaatattgttgtcccggatttttgttaatattcatttttgttatccttttttaaaagtaaatgtacaggatgccagtaaaaaaaaaaaatggcttcagaattaaaactatgaaatattttacagtttttcttgtacagagtacttggctgttagcccaaggttaaaaagttcataacagattttttttggactgttttgttgggcagtgcctgataagcttcaaagctgctttattcaataaaaaaaagaaatgaaaaagatatatgaatatgacaaagtattgctgagtccaacaatgttgttttaagactcttaaaatacggtacctggcaatgtttatttcataaagaattgtgaacttcttgaatctagggagggggaatgtagtgaagggatgtatcaagtggggtggtgggagggggaggcaaggttatatgcactttctcatgatttacagagaagtgaataactgcaaagtgaagttgcttcttctacttcagtcttctctcactttgatttgctagttgttatcaattaatgacaattacaaacctactgtatctctaatacagtgtgactggtcaggtatttcagttcttaggaaggaagtgccaagtttgtttttgggttcctggaacagcgctcacctttgtttagaacactggtttaaagggataatcatctctgtcacattagactatccatcatgaccagcaaatactcattttaggaaaaaaaaaagcatgatctgaaaaatacttttggtggtatgttggttaccctcctagctttccatttggtttagaacataaagcaaatagacacagtcatactgtcactgctctggactgtgtggagctcgctaaagtcatggtcattgcaggaatccaagtggcagtccttctcattcattctaatcattgtatgtgcttcactacgggggggagaaggaaacgttagcatcatgtttcccatttagggcaggagtgagaggtctctcttcctgatttagatatgcaaaagctggtatgttcagtaggaactgtacatgtgttgggaggcataaagactaattagcaaccataatatggtcactaccctaatagactaaatgaaatcttgcaatttcaaattactctttctccatattagatttacccacagctatatttctgtttaagtactagggtgagggttttctgttactttgttttttaatgttgttccttttgaaagaatcagtcttgcagctgagtgaaaaatctgtggaatgtattatttgtcctctttacatgaaactactcatacttaagcaaaagtcagtcttatagcaagactgttagccctcaaacttgactctactgatctgaccatttccctctcatcgccagacaactgacgatttccctggttttagtctgcgtctctgctttaaagttattgtgatatccttctagatcatacacaagtctaacagttaattagttaacagtttttaaactaggtttgtgggtatttttttggtagcacatgtatgctattacatacaaatttttatttctaaaatataagatctgagattgaatattttcattaaaagctacagttttgtgaatctttgtgcttcaacattctttgcaagatgatacggtatttaggcatttgccttatttttgcatctcacaaacataagtgcaatagatcttttcattgaacagcaaagtaggattcatcattccatatgacttgagttacaccagacctattctgcccaatgcctttttgattacagtgtagcttgcccaccgcatttgtcgttttagatactttgctagccggccactttggatttcatcagacagtcctaacaatattgtctgaacggctgaatatgaatagatacagcagaggcactcctgatatatgatttttatccatgcgtcagtttttcccacccagtgtagcatcctaaagataaagccagaagctaagctgccagtgaggctgtgattgggcgtagaagtgggagcattgggacctcacattacacacacgagagatcataaccatgtgaaaaggcaaaaagcatgtgtttgcaacatctgataacttcatggcctttgataaatgtatatatgtatatgtgcatggactgtgtttccagtacacctttcagccaaaacagatccacagtagttgttgagttcaagtacataaagtacataacaagcgaacgtctagtacaattcttacttatgtgtatgggatttttccctttgaggttgctttgttttgtcttacaaaggtgaaaattgtttgtaagtgaagtgagaagttcatatttctttggcttttttgtgtttttaaaagttactccttttagggagctggtctgatgacttgcttagcttggaaatccttgttttcagtgtgtcgagtcaaaatgtgtttatgtgagctgtcactgtggggaaccaattgctttgtcatatagctggttatgaactagtaacatgtttgggaagtcctactgatgttcctttggaagaaaaaatctgctggttttaacaactgtgcttttgctatgtatggtatccaagttagttgaaacgcagacactgagatctgtttgagtttagggtcatttttagaaaggggcagtttaaagcacaatgtctcacatgggacaaagttccaaaatgccaaattcttattttttaaaaagctagttctataaaatactggtattatgggtggggaggaaatagaattgagtcaattggaaagactatccaacttaacatgaaacttgtcaccatgagatagcattagctgcccaggatgctgctatatatatatatatatatatatatgtgtgtgtgtgtgtgtgtgtgtatatatatatatatatatatatatatatatatgtgtgtgtgtatatatatatatatgtgtatatatatatgtatatacatatatgtatatatacgcacatatatatatgtatttaaaaaaatcaaaacaaaaaaaaactcatttatacctgtgtattttttaaagctacaatctgttcaatgtttttaaaaatctgtttatatgacattgttaaaataaagttggtcttttgacgagagggaggatgtcacggtcagttgtaactttgccttcacaaggcaactggggtggggggtgggggtagtgtgcctccttgacatttcgttcaagttatagattcaatggagctatgtcttgttttaagttgctttaatgcattgtattagatcttcaaacagaataaaggttgttttgaaactgaa

SEQ ID NO: 316876 - DNA, 4770 bp, Homo sapiens
cattcgggcggggtgaagctcgtgtgtggagtgccacggtacaatcagacgacagatggacagtgtgacaaaagtgtcagaaaggattgggcctcgctgtgagagtcagcctggattcaaagtgttgacaagttgctgaaaaggaagccagtgagaggactgtggcacgcagaggaagtggagccctgtcttcggtcacaccattgatggaggacagatggacagccgtatggccagtcacctctcctcttaaacctttggagagtggtcctttgtcctctgctggacacataataggaattctaacacattctctgaattcacttttcataaaaacgtaaaatcagactgctctgtacaaccaggctcaactgttgcatggtagcagatttgcaaacatgagtgctgaggggtaccagtacagagcgctgtatgattataaaaaggaaagagaagaagatattgacttgcacttgggtgacatattgactgtgaataaagggtccttagtagctcttggattcagtgatggacaggaagccaggcctgaagaaattggctggttaaatggctataatgaaaccacaggggaaaggggggactttccgggaacttacgtagaatatattggaaggaaaaaaatctcgcctcccacaccaaagccccggccacctcggcctcttcctgttgcaccaggttcttcgaaaactgaagcagatgttgaacaacaagctttgactctcccggatcttgcagagcagtttgcccctcctgacattgccccgcctcttcttatcaagctcgtggaagccattgaaaagaaaggtctggaatgttcaactctatacagaacacagagctccagcaacctggcagaattacgacagcttcttgattgtgatacaccctccgtggacttggaaatgatcgatgtgcacgttttggctgacgctttcaaacgctatctcctggacttaccaaatcctgtcattccagcagccgtttacagtgaaatgatttctttagctccagaagtacaaagctccgaagaatatattcagctattgaagaagcttattaggtcgcctagcatacctcatcagtattggcttacgcttcagtatttgttaaaacatttcttcaagctctctcaaacctccagcaaaaatctgttgaatgcaagagtactctctgaaattttcagccctatgcttttcagattctcagcagccagctctgataatactgaaaacctcataaaagttatagaaattttaatctcaactgaatggaatgaacgacagcctgcaccagcactgcctcctaaaccaccaaaacctactactgtagccaacaacggtatgaataacaatatgtccttacaagatgctgaatggtactggggagatatctcgagggaagaagtgaatgaaaaacttcgagatacagcagacgggacctttttggtacgagatgcgtctactaaaatgcatggtgattatactcttacactaaggaaagggggaaataacaaattaatcaaaatatttcatcgagatgggaaatatggcttctctgacccattaaccttcagttctgtggttgaattaataaaccactaccggaatgaatctctagctcagtataatcccaaattggatgtgaaattactttatccagtatccaaataccaacaggatcaagttgtcaaagaagataatattgaagctgtagggaaaaaattacatgaatataacactcagtttcaagaaaaaagtcgagaatatgatagattatatgaagaatatacccgcacatcccaggaaatccaaatgaaaaggacagctattgaagcatttaatgaaaccataaaaatatttgaagaacagtgccagacccaagagcggtacagcaaagaatacatagaaaagtttaaacgtgaaggcaatgagaaagaaatacaaaggattatgcataattatgataagttgaagtctcgaatcagtgaaattattgacagtagaagaagattggaagaagacttgaagaagcaggcagctgagtatcgagaaattgacaaacgtatgaacagcattaaaccagaccttatccagctgagaaagacgagagaccaatacttgatgtggttgactcaaaaaggtgttcggcaaaagaagttgaacgagtggttgggcaatgaaaacactgaagaccaatattcactggtggaagatgatgaagatttgccccatcatgatgagaagacatggaatgttggaagcagcaaccgaaacaaagctgaaaacctgttgcgagggaagcgagatggcacttttcttgtccgggagagcagtaaacagggctgctatgcctgctctgtagtggtggacggcgaagtaaagcattgtgtcataaacaaaacagcaactggctatggctttgccgagccctataacttgtacagctctctgaaagaactggtgctacattaccaacacacctcccttgtgcagcacaacgactccctcaatgtcacactagcctacccagtatatgcacagcagaggcgatgaagcgcttactctttgatccttctcctgaagttcagccaccctgaggcctctggaaagcaaagggctcctctccagtctgatctgtgaattgagctgcagaaacgaagccatctttctttggatgggactagagctttctttcacaaaaaagaagtaggggaagacatgcagcctaaggctgtatgatgaccacacgttcctaagctggagtgcttatcccttctttttctttttttctttggtttaatttaaagccacaaccacatacaacacaaagagaaaaagaaatgcaaaaatctctgcgtgcagggacaaagaggcctttaaccatggtgcttgttaatgctttctgaagctttaccagctgaaagttgggactctggagagcggaggagagagaggcagaagaaccctggcctgagaaggtttggtccagcctggtttagcctggatgttgctgtgcacggtggacccagacacatcgcactgtggattatttcattttgtaacaaatgaacgatatgtagcagaaaggcacgtccactcacaagggacgctttgggagaatgtcagttcatgtatgttcagaagaaattctgtcatagaaagtgccagaaagtgtttaacttgtcaaaaaacaaaaacccagcaacagaaaaatggagtttggaaaacaggacttaaaatgacattcagtatataaaatatgtacataatattggatgactaactatcaaatagatggatttgtatcaataccaaatagcttctgttttgttttgctgaaggctaaattcacagcgctatgcaattcttaattttcattaagttgttatttcagttttaaatgtaccttcagaataagcttccccaccccagtttttgttgcttgaaaatattgttgtcccggatttttgttaatattcatttttgttatccttttttaaaagtaaatgtacaggatgccagtaaaaaaaaaaaatggcttcagaattaaaactatgaaatattttacagtttttcttgtacagagtacttggctgttagcccaaggttaaaaagttcataacagattttttttggactgttttgttgggcagtgcctgataagcttcaaagctgctttattcaataaaaaaaagaaatgaaaaagatatatgaatatgacaaagtattgctgagtccaacaatgttgttttaagactcttaaaatacggtacctggcaatgtttatttcataaagaattgtgaacttcttgaatctagggagggggaatgtagtgaagggatgtatcaagtggggtggtgggagggggaggcaaggttatatgcactttctcatgatttacagagaagtgaataactgcaaagtgaagttgcttcttctacttcagtcttctctcactttgatttgctagttgttatcaattaatgacaattacaaacctactgtatctctaatacagtgtgactggtcaggtatttcagttcttaggaaggaagtgccaagtttgtttttgggttcctggaacagcgctcacctttgtttagaacactggtttaaagggataatcatctctgtcacattagactatccatcatgaccagcaaaaaaaaaaaaaaaaaaaaaaaaaaaaaaaaaaaaaaaaaaaaaaaaaaaaaaaaaaaaaaaaaaaaaaaaaaaaaaaaaaaaaaaaaaaaaaaaaaaaaaaaaaaaaaaaaaaaaaaaaaaaaaaaaaataataaaaaaaaaaatatataaaaaaaaaaattttatttattctttttatttatattttctttttttaataaatttattttttaatgttcctataattttataccttttttaaatattctctttaaaaggctcttttaaataaaacttgtcacattttttaccaaccttctaggggaaaaactcgggtgtccccaaatatagtgcttatgatacaaattcccctttttgctctttgcgtatatatctaaaggtcctccacctatcttgtttttccacaacgtcatctcttcatttttctagaaatatttctgcgccttattttttctggttctccttaactttcttttaataacgtcctttttttttaaccattgcgaccatacttctaaatctctcttttatatctaatacaaccctcttcttaatcttttttcttcttctctcttttcctttccg

SEQ ID NO: 316877 - DNA, 4157 bp, Homo sapiens
cattcgggcggggtgaagctcgtgtgtggagtgccacggtacaatcagacgacagatggacagtgtgacaaaagtgtcagaaaggattgggcctcgctgtgagagtcagcctggattcaaagtgttgacaagttgctgaaaaggaagccagtgagaggactgtggcacgcagaggaagtggagccctgtcttcggtcacaccattgatggaggacagatggacagccgtatggccagtcacctctcctcttaaacctttggagagtggtcctttgtcctctgctggacacataataggaattctaacacattctctgaattcacttttcataaaaacgtaaaatcagactgctctgtacaaccaggctcaactgttgcatggtagcagatttgcaaacatgagtgctgaggggtaccagtacagagcgctgtatgattataaaaaggaaagagaagaagatattgacttgcacttgggtgacatattgactgtgaataaagggtccttagtagctcttggattcagtgatggacaggaagccaggcctgaagaaattggctggttaaatggctataatgaaaccacaggggaaaggggggactttccgggaacttacgtagaatatattggaaggaaaaaaatctcgcctcccacaccaaagccccggccacctcggcctcttcctgttgcaccaggttcttcgaaaactgaagcagatgttgaacaacaagctttgactctcccggatcttgcagagcagtttgcccctcctgacattgccccgcctcttcttatcaagctcgtggaagccattgaaaagaaaggtctggaatgttcaactctatacagaacacagagctccagcaacctggcagaattacgacagcttcttgattgtgatacaccctccgtggacttggaaatgatcgatgtgcacgttttggctgacgctttcaaacgctatctcctggacttaccaaatcctgtcattccagcagccgtttacagtgaaatgatttctttagctccagaagtacaaagctccgaagaatatattcagctattgaagaagcttattaggtcgcctagcatacctcatcagtattggcttacgcttcagtatttgttaaaacatttcttcaagctctctcaaacctccagcaaaaatctgttgaatgcaagagtactctctgaaattttcagccctatgcttttcagattctcagcagccagctctgataatactgaaaacctcataaaagttatagaaattttaatctcaactgaatggaatgaacgacagcctgcaccagcactgcctcctaaaccaccaaaacctactactgtagccaacaacggtatgaataacaatatgtccttacaagatgctgaatggtactggggagatatctcgagggaagaagtgaatgaaaaacttcgagatacagcagacgggacctttttggtacgagatgcgtctactaaaatgcatggtgattatactcttacactaaggaaagggggaaataacaaattaatcaaaatatttcatcgagatgggaaatatggcttctctgacccattaaccttcagttctgtggttgaattaataaaccactaccggaatgaatctctagctcagtataatcccaaattggatgtgaaattactttatccagtatccaaataccaacaggatcaagttgtcaaagaagataatattgaagctgtagggaaaaaattacatgaatataacactcagtttcaagaaaaaagtcgagaatatgatagattatatgaagaatatacccgcacatcccaggaaatccaaatgaaaaggacagctattgaagcatttaatgaaaccataaaaatatttgaagaacagtgccagacccaagagcggtacagcaaagaatacatagaaaagtttaaacgtgaaggcaatgagaaagaaatacaaaggattatgcataattatgataagttgaagtctcgaatcagtgaaattattgacagtagaagaagattggaagaagacttgaagaagcaggcagctgagtatcgagaaattgacaaacgtatgaacagcattaaaccagaccttatccagctgagaaagacgagagaccaatacttgatgtggttgactcaaaaaggtgttcggcaaaagaagttgaacgagtggttgggcaatgaaaacactgaagaccaatattcactggtggaagatgatgaagatttgccccatcatgatgagaagacatggaatgttggaagcagcaaccgaaacaaagctgaaaacctgttgcgagggaagcgagatggcacttttcttgtccgggagagcagtaaacagggctgctatgcctgctctgtagtggtggacggcgaagtaaagcattgtgtcataaacaaaacagcaactggctatggctttgccgagccctataacttgtacagctctctgaaagaactggtgctacattaccaacacacctcccttgtgcagcacaacgactccctcaatgtcacactagcctacccagtatatgcacagcagaggcgatgaagcgcttactctttgatccttctcctgaagttcagccaccctgaggcctctggaaagcaaagggctcctctccagtctgatctgtgaattgagctgcagaaacgaagccatctttctttggatgggactagagctttctttcacaaaaaagaagtaggggaagacatgcagcctaaggctgtatgatgaccacacgttcctaagctggagtgcttatcccttctttttctttttttctttggtttaatttaaagccacaaccacatacaacacaaagagaaaaagaaatgcaaaaatctctgcgtgcagggacaaagaggcctttaaccatggtgcttgttaatgctttctgaagctttaccagctgaaagttgggactctggagagcggaggagagagaggcagaagaaccctggcctgagaaggtttggtccagcctggtttagcctggatgttgctgtgcacggtggacccagacacatcgcactgtggattatttcattttgtaacaaatgaacgatatgtagcagaaaggcacgtccactcacaagggacgctttgggagaatgtcagttcatgtatgttcagaagaaattctgtcatagaaagtgccagaaagtgtttaacttgtcaaaaaacaaaaacccagcaacagaaaaatggagtttggaaaacaggacttaaaatgacattcagtatataaaatatgtacataatattggatgactaactatcaaatagatggatttgtatcaataccaaatagcttctgttttgttttgctgaaggctaaattcacagcgctatgcaattcttaattttcattaagttgttatttcagttttaaatgtaccttcagaataagcttccccaccccagtttttgttgcttgaaaatattgttgtcccggatttttgttaatattcatttttgttatccttttttaaaagtaaatgtacaggatgccagtaaaaaaaaaaaatggcttcagaattaaaaaaaaaaaaaaaaaaaaaaaaaaaaaaaaaaaaaaaaaaaaaaaaaaaaaaaaaaaaaaaaaaaaaaaaaaaaaaaaaaaaaaaaaaaaaaaaaaaaaaaaaaaaaaaaaaaaaaaaaaaaaaaaaaaataataaaaaaaaaaatatataaaaaaaaaaattttatttattctttttatttatattttctttttttaataaatttattttttaatgttcctataattttataccttttttaaatattctctttaaaaggctcttttaaataaaacttgtcacattttttaccaaccttctaggggaaaaactcgggtgtccccaaatatagtgcttatgatacaaattcccctttttgctctttgcgtatatatctaaaggtcctccacctatcttgtttttccacaacgtcatctcttcatttttctagaaatatttctgcgccttattttttctggttctccttaactttcttttaataacgtcctttttttttaaccattgcgaccatacttctaaatctctcttttatatctaatacaaccctcttcttaatcttttttcttcttctctcttttcctttccg

SEQ ID NO: 316878 - DNA, 1653 bp, Homo sapiens
ccgttcagacaatattgttaggactgtctgatgaaatccaaagtggccggctagcaaagtaggattcatcattccatatgacttgagttacaccagacctattctgcccaatgcctttttgattacagtgtagcttgcccaccgcatttgtcgttttagatactttgctagccggccactttggatttcatcagacagtcctaacaatattgtctgaacggctgaatatgaatagatacagcagaggcactcctgatatatgatttttatccatgcgtcagtttttcccacccagtgtagcatcctaaagataaagccagaagctaagctgccagtgaggctgtgattgggcgtagaagtgggagcattgggacctcacattacacacacgagagatcataaccatgtgaaaaggcaaaaagcatgtgtttgcaacatctgataacttcatggcctttgataaatgtatatatgtatatgtgcatggactgtgtttccagtacacctttcagccaaaacagatccacagtagttgttgagttcaagtacataaagtacataacaagcgaacgtctagtacaattcttacttatgtgtatgggatttttccctttgaggttgctttgttttgtcttacaaaggtgaaaattgtttgtaagtgaagtgagaagttcatatttctttggcttttttgtgtttttaaaagttactccttttagggagctggtctgatgacttgcttagcttggaaatccttgttttcagtgtgtcgagtcaaaatgtgtttatgtgagctgtcactgtggggaaccaattgctttgtcatatagctggttatgaactagtaacatgtttgggaagtcctactgatgttcctttggaagaaaaaatctgctggttttaacaactgtgcttttgctatgtatggtatccaagttagttgaaacgcagacactgagatctgtttgagtttagggtcatttttagaaaggggcagtttaaagcacaatgtctcacatgggacaaagttccaaaatgccaaattcttattttttaaaaagctagttctataaaatactggtattatgggtggggaggaaatagaattgagtcaattggaaagactatccaacttaacatgaaacttgtcaccatgagatagcattagctgcccaggatgctgctatatatatatatatatatatatatgtgtgtgtgtgtgtgtgtgtgtatatatatatatatatatatatatatatatatgtgtgtgtgtatatatatatatatgtgtatatatatatgtatatacatatatgtatatatacgcacatatatatatgtatttaaaaaaatcaaaacaaaaaaaaactcatttatacctgtgtattttttaaagctacaatctgttcaatgtttttaaaaatctgtttatatgacattgttaaaataaagttggtcttttgacgagagggaggatgtcacggtcagttgtaactttgccttcacaaggcaactggggtggggggtgggggtagtgtgcctccttgacatttcgttcaagttatagattcaatggagctatgtcttgttttaagttgctttaatgcattgtattagatcttcaaacagaataaaggttgttttgaaactgaa

SEQ ID NO: 316879 - DNA, 369 bp, Homo sapiens
ctcccacaccaaagccccggccacctcggcctcttcctgttgcaccaggttcttcgaaaactgaagcagatgttgaacaacaaggtcagtattgataagtggttgcttaatgactccctttctttttctttttaaggaaaagtcttaagtttgggttgagtcgttatgttctgggcagaagttaccttggcaactgcacctgaattgatgtgtggtgcataaaagcttggtcaatcattacacaactagaaatttgtgtttgtggggttggaagttgttataaaaatagggacacagtatccgagaacctgtttagtgagtgtcgttgaacactattattatagttgtcattgaattaaacatctacta

SEQ ID NO: 316880 - DNA, 635 bp, Homo sapiens
gtaagatttttaaaccaaggaatgactgggctatctataaacccagatgcactaagtggggagaaaagctcggagctgcagcatatcagcttttgtcaacctgccaacagcagagcgtaccatgctgcaaggagtaataaacaaggaattagaaaactcgctgctggagaacagtcaaattaaacacctttttgaaaggatgagcatgtatatattgcagttctattaaatgtagcttcttagtgaggttggcattatgttaaggctggtatggaagagaactgatgaagcaggagtggtctggtgacatttttctgacttgattggctggggcgtgtgatgtaataggtttcagtgcagccccttataggttttaaaatgaattccaagacaccattacaaagaaagccggactcttttcttataactgagctcagccaaggaaactcttgcacaaatgtacaatactgtttggaatatggaagacctggatttagaatatgccaagacagatataaattgtggcacagacttgatgttttatatagaaatggacccaccaggtaatactgcagtattattgtagagagttagttaatttcgtggctttttaatttttcgaaagctactgtaaa

SEQ ID NO: 316881 - DNA, 402 bp, Homo sapiens
atgaaaccataaaaatatttgaagaacagtgccagacccaagagcggtacagcaaagaatacatagaaaagtttaaacgtgaaggcaatgagaaagaaatacaaaggttggtgtttcccttgttcttgtgctagagataaccaaaatcctctaaaaccatttaaagatgatctcgctttctgtgctttgaatgatcacgtggacacaggaaggggaatatcactctggggactgtggtggggtggggggaggagggagggatagcattgggagatatacctaatgctagatgacgagttagtgggtgcggcgcaccagcatggcacatgtatacatatgtaactaacctgcacaatgtgcacatgtaccctaaaacttaaagtataataaaaataaaaaaat

SEQ ID NO: 316882 - DNA, 6784 bp, Homo sapiens
cattcgggcggggtgaagctcgtgtgtggagtgccacggtacaatcagacgacagatggacagtgtgacaaaagtgtcagaaaggattgggcctcgctgtgagagtcagcctggattcaaagtgttgacaagttgctgaaaaggaagccagtgagaggactgtggcacgcagaggaagtggagccctgtcttcggtcacaccattgatggaggacagatggacagccgtatggccagtcacctctcctcttaaacctttggagagtggtcctttgtcctctgctggacacataataggaattctaacacattctctgaattcacttttcataaaaacgtaaaatcagactgctctgtacaaccaggctcaactgttgcatggtagcagatttgcaaacatgagtgctgaggggtaccagtacagagcgctgtatgattataaaaaggaaagagaagaagatattgacttgcacttgggtgacatattgactgtgaataaagggtccttagtagctcttggattcagtgatggacaggaagccaggcctgaagaaattggctggttaaatggctataatgaaaccacaggggaaaggggggactttccgggaacttacgtagaatatattggaaggaaaaaaatctcgcctcccacaccaaagccccggccacctcggcctcttcctgttgcaccaggttcttcgaaaactgaagcagatgttgaacaacaagctttgactctcccggatcttgcagagcagtttgcccctcctgacattgccccgcctcttcttatcaagctcgtggaagccattgaaaagaaaggtctggaatgttcaactctatacagaacacagagctccagcaacctggcagaattacgacagcttcttgattgtgatacaccctccgtggacttggaaatgatcgatgtgcacgttttggctgacgctttcaaacgctatctcctggacttaccaaatcctgtcattccagcagccgtttacagtgaaatgatttctttagctccagaagtacaaagctccgaagaatatattcagctattgaagaagcttattaggtcgcctagcatacctcatcagtattggcttacgcttcagtatttgttaaaacatttcttcaagctctctcaaacctccagcaaaaatctgttgaatgcaagagtactctctgaaattttcagccctatgcttttcagattctcagcagccagctctgataatactgaaaacctcataaaagttatagaaattttaatctcaactgaatggaatgaacgacagcctgcaccagcactgcctcctaaaccaccaaaacctactactgtagccaacaacggtatgaataacaatatgtccttacaagatgctgaatggtactggggagatatctcgagggaagaagtgaatgaaaaacttcgagatacagcagacgggacctttttggtacgagatgcgtctactaaaatgcatggtgattatactcttacactaaggaaagggggaaataacaaattaatcaaaatatttcatcgagatgggaaatatggcttctctgacccattaaccttcagttctgtggttgaattaataaaccactaccggaatgaatctctagctcagtataatcccaaattggatgtgaaattactttatccagtatccaaataccaacaggatcaagttgtcaaagaagataatattgaagctgtagggaaaaaattacatgaatataacactcagtttcaagaaaaaagtcgagaatatgatagattatatgaagaatatacccgcacatcccaggaaatccaaatgaaaaggacagctattgaagcatttaatgaaaccataaaaatatttgaagaacagtgccagacccaagagcggtacagcaaagaatacatagaaaagtttaaacgtgaaggcaatgagaaagaaatacaaaggattatgcataattatgataagttgaagtctcgaatcagtgaaattattgacagtagaagaagattggaagaagacttgaagaagcaggcagctgagtatcgagaaattgacaaacgtatgaacagcattaaaccagaccttatccagctgagaaagacgagagaccaatacttgatgtggttgactcaaaaaggtgttcggcaaaagaagttgaacgagtggttgggcaatgaaaacactgaagaccaatattcactggtggaagatgatgaagatttgccccatcatgatgagaagacatggaatgttggaagcagcaaccgaaacaaagctgaaaacctgttgcgagggaagcgagatggcacttttcttgtccgggagagcagtaaacagggctgctatgcctgctctgtagtggtggacggcgaagtaaagcattgtgtcataaacaaaacagcaactggctatggctttgccgagccctataacttgtacagctctctgaaagaactggtgctacattaccaacacacctcccttgtgcagcacaacgactccctcaatgtcacactagcctacccagtatatgcacagcagaggcgatgaagcgcttactctttgatccttctcctgaagttcagccaccctgaggcctctggaaagcaaagggctcctctccagtctgatctgtgaattgagctgcagaaacgaagccatctttctttggatgggactagagctttctttcacaaaaaagaagtaggggaagacatgcagcctaaggctgtatgatgaccacacgttcctaagctggagtgcttatcccttctttttctttttttctttggtttaatttaaagccacaaccacatacaacacaaagagaaaaagaaatgcaaaaatctctgcgtgcagggacaaagaggcctttaaccatggtgcttgttaatgctttctgaagctttaccagctgaaagttgggactctggagagcggaggagagagaggcagaagaaccctggcctgagaaggtttggtccagcctggtttagcctggatgttgctgtgcacggtggacccagacacatcgcactgtggattatttcattttgtaacaaatgaacgatatgtagcagaaaggcacgtccactcacaagggacgctttgggagaatgtcagttcatgtatgttcagaagaaattctgtcatagaaagtgccagaaagtgtttaacttgtcaaaaaacaaaaacccagcaacagaaaaatggagtttggaaaacaggacttaaaatgacattcagtatataaaatatgtacataatattggatgactaactatcaaatagatggatttgtatcaataccaaatagcttctgttttgttttgctgaaggctaaattcacagcgctatgcaattcttaattttcattaagttgttatttcagttttaaatgtaccttcagaataagcttccccaccccagtttttgttgcttgaaaatattgttgtcccggatttttgttaatattcatttttgttatccttttttaaaagtaaatgtacaggatgccagtaaaaaaaaaaaatggcttcagaattaaaactatgaaatattttacagtttttcttgtacagagtacttggctgttagcccaaggttaaaaagttcataacagattttttttggactgttttgttgggcagtgcctgataagcttcaaagctgctttattcaataaaaaaaagaaatgaaaaagatatatgaatatgacaaagtattgctgagtccaacaatgttgttttaagactcttaaaatacggtacctggcaatgtttatttcataaagaattgtgaacttcttgaatctagggagggggaatgtagtgaagggatgtatcaagtggggtggtgggagggggaggcaaggttatatgcactttctcatgatttacagagaagtgaataactgcaaagtgaagttgcttcttctacttcagtcttctctcactttgatttgctagttgttatcaattaatgacaattacaaacctactgtatctctaatacagtgtgactggtcaggtatttcagttcttaggaaggaagtgccaagtttgtttttgggttcctggaacagcgctcacctttgtttagaacactggtttaaagggataatcatctctgtcacattagactatccatcatgaccagcaaatactcattttaggaaaaaaaaaagcatgatctgaaaaatacttttggtggtatgttggttaccctcctagctttccatttggtttagaacataaagcaaatagacacagtcatactgtcactgctctggactgtgtggagctcgctaaagtcatggtcattgcaggaatccaagtggcagtccttctcattcattctaatcattgtatgtgcttcactacgggggggagaaggaaacgttagcatcatgtttcccatttagggcaggagtgagaggtctctcttcctgatttagatatgcaaaagctggtatgttcagtaggaactgtacatgtgttgggaggcataaagactaattagcaaccataatatggtcactaccctaatagactaaatgaaatcttgcaatttcaaattactctttctccatattagatttacccacagctatatttctgtttaagtactagggtgagggttttctgttactttgttttttaatgttgttccttttgaaagaatcagtcttgcagctgagtgaaaaatctgtggaatgtattatttgtcctctttacatgaaactactcatacttaagcaaaagtcagtcttatagcaagactgttagccctcaaacttgactctactgatctgaccatttccctctcatcgccagacaactgacgatttccctggttttagtctgcgtctctgctttaaagttattgtgatatccttctagatcatacacaagtctaacagttaattagttaacagtttttaaactaggtttgtgggtatttttttggtagcacatgtatgctattacatacaaatttttatttctaaaatataagatctgagattgaatattttcattaaaagctacagttttgtgaatctttgtgcttcaacattctttgcaagatgatacggtatttaggcatttgccttatttttgcatctcacaaacataagtgcaatagatcttttcattgaacagcaaagtaggattcatcattccatatgacttgagttacaccagacctattctgcccaatgcctttttgattacagtgtagcttgcccaccgcatttgtcgttttagatactttgctagccggccactttggatttcatcagacagtcctaacaatattgtctgaacggctgaatatgaatagatacagcagaggcactcctgatatatgatttttatccatgcgtcagtttttcccacccagtgtagcatcctaaagataaagccagaagctaagctgccagtgaggctgtgattgggcgtagaagtgggagcattgggacctcacattacacacacgagagatcataaccatgtgaaaaggcaaaaagcatgtgtttgcaacatctgataacttcatggcctttgataaatgtatatatgtatatgtgcatggactgtgtttccagtacacctttcagccaaaacagatccacagtagttgttgagttcaagtacataaagtacataacaagcgaacgtctagtacaattcttacttatgtgtatgggatttttccctttgaggttgctttgttttgtcttacaaaggtgaaaattgtttgtaagtgaagtgagaagttcatatttctttggcttttttgtgtttttaaaagttactccttttagggagctggtctgatgacttgcttagcttggaaatccttgttttcagtgtgtcgagtcaaaatgtgtttatgtgagctgtcactgtggggaaccaattgctttgtcatatagctggttatgaactagtaacatgtttgggaagtcctactgatgttcctttggaagaaaaaatctgctggttttaacaactgtgcttttgctatgtatggtatccaagttagttgaaacgcagacactgagatctgtttgagtttagggtcatttttagaaaggggcagtttaaagcacaatgtctcacatgggacaaagttccaaaatgccaaattcttattttttaaaaagctagttctataaaatactggtattatgggtggggaggaaatagaattgagtcaattggaaagactatccaacttaacatgaaacttgtcaccatgagatagcattagctgcccaggatgctgctatatatatatatatatatatatatgtgtgtgtgtgtgtgtgtgtgtatatatatatatatatatatatatatatatatgtgtgtgtgtatatatatatatatgtgtatatatatatgtatatacatatatgtatatatacgcacatatatatatgtatttaaaaaaatcaaaacaaaaaaaaactcatttatacctgtgtattttttaaagctacaatctgttcaatgtttttaaaaatctgtttatatgacattgttaaaataaagttggtcttttgacgagagggaggatgtcacggtcagttgtaactttgccttcacaaggcaactggggtggggggtgggggtagtgtgcctccttgacatttcgttcaagttatagattcaatggagctatgtcttgttttaagttgctttaatgcattgtattagatcttcaaacagaataaaggttgttttgaaactgaa

SEQ ID NO: 316883 - DNA, 6952 bp, Homo sapiens
cattcgggcggggtgaagctcgtgtgtggagtgccacggtacaatcagacgacagatggacagtgtgacaaaagtgtcagaaaggattgggcctcgctgtgagagtcagcctggattcaaagtgttgacaagttgctgaaaaggaagccagtgagaggactgtggcacgcagaggaagtggagccctgtcttcggtcacaccattgatggaggacagatggacagccgtatggccagtcacctctcctcttaaacctttggagagtggtcctttgtcctctgctggacacataataggaattctaacacattctctgaattcacttttcataaaaacgtaaaatcagactgctctgtacaaccaggctcaactgttgcatggtagcagatttgcaaacatgagtgctgaggggtaccagtacagagcgctgtatgattataaaaaggaaagagaagaagatattgacttgcacttgggtgacatattgactgtgaataaagggtccttagtagctcttggattcagtgatggacaggaagccaggcctgaagaaattggctggttaaatggctataatgaaaccacaggggaaaggggggactttccgggaacttacgtagaatatattggaaggaaaaaaatctcgcctcccacaccaaagccccggccacctcggcctcttcctgttgcaccaggttcttcgaaaactgaagcagatgttgaacaacaagctttgactctcccggatcttgcagagcagtttgcccctcctgacattgccccgcctcttcttatcaagctcgtggaagccattgaaaagaaaggtctggaatgttcaactctatacagaacacagagctccagcaacctggcagaattacgacagcttcttgattgtgatacaccctccgtggacttggaaatgatcgatgtgcacgttttggctgacgctttcaaacgctatctcctggacttaccaaatcctgtcattccagcagccgtttacagtgaaatgatttctttagctccagaagtacaaagctccgaagaatatattcagctattgaagaagcttattaggtcgcctagcatacctcatcagtattggcttacgcttcagtatttgttaaaacatttcttcaagctctctcaaacctccagcaaaaatctgttgaatgcaagagtactctctgaaattttcagccctatgcttttcagattctcagcagccagctctgataatactgaaaacctcataaaagttatagaaattttaatctcaactgaatggaatgaacgacagcctgcaccagcactgcctcctaaaccaccaaaacctactactgtagccaacaacggtatgaataacaatatgtccttacaagatgctgaatggtactggggagatatctcgagggaagaagtgaatgaaaaacttcgagatacagcagacgggacctttttggtacgagatgcgtctactaaaatgcatggtgattatactcttacactaaggaaagggggaaataacaaattaatcaaaatatttcatcgagatgggaaatatggcttctctgacccattaaccttcagttctgtggttgaattaataaaccactaccggaatgaatctctagctcagtataatcccaaattggatgtgaaattactttatccagtatccaaataccaacaggatcaagttgtcaaagaagataatattgaagctgtagggaaaaaattacatgaatataacactcagtttcaagaaaaaagtcgagaatatgatagattatatgaagaatatacccgcacatcccaggaaatccaaatgaaaaggacagctattgaagcatttaatgaaaccataaaaatatttgaagaacagtgccagacccaagagcggtacagcaaagaatacatagaaaagtttaaacgtgaaggcaatgagaaagaaatacaaaggattatgcataattatgataagttgaagtctcgaatcagtgaaattattgacagtagaagaagattggaagaagacttgaagaagcaggcagctgagtatcgagaaattgacaaacgtatgaacagcattaaaccagaccttatccagctgagaaagacgagagaccaatacttgatgtggttgactcaaaaaggtgttcggcaaaagaagttgaacgagtggttgggcaatgaaaacactgaagaccaatattcactggtggaagatgatgaagatttgccccatcatgatgagaagacatggaatgttggaagcagcaaccgaaacaaagctgaaaacctgttgcgagggaagcgagatggcacttttcttgtccgggagagcagtaaacagggctgctatgcctgctctgtagtggtggacggcgaagtaaagcattgtgtcataaacaaaacagcaactggctatggctttgccgagccctataacttgtacagctctctgaaagaactggtgctacattaccaacacacctcccttgtgcagcacaacgactccctcaatgtcacactagcctacccagtatatgcacagcagaggcgatgaagcgcttactctttgatccttctcctgaagttcagccaccctgaggcctctggaaagcaaagggctcctctccagtctgatctgtgaattgagctgcagaaacgaagccatctttctttggatgggactagagctttctttcacaaaaaagaagtaggggaagacatgcagcctaaggctgtatgatgaccacacgttcctaagctggagtgcttatcccttctttttctttttttctttggtttaatttaaagccacaaccacatacaacacaaagagaaaaagaaatgcaaaaatctctgcgtgcagggacaaagaggcctttaaccatggtgcttgttaatgctttctgaagctttaccagctgaaagttgggactctggagagcggaggagagagaggcagaagaaccctggcctgagaaggtttggtccagcctggtttagcctggatgttgctgtgcacggtggacccagacacatcgcactgtggattatttcattttgtaacaaatgaacgatatgtagcagaaaggcacgtccactcacaagggacgctttgggagaatgtcagttcatgtatgttcagaagaaattctgtcatagaaagtgccagaaagtgtttaacttgtcaaaaaacaaaaacccagcaacagaaaaatggagtttggaaaacaggacttaaaatgacattcagtatataaaatatgtacataatattggatgactaactatcaaatagatggatttgtatcaataccaaatagcttctgttttgttttgctgaaggctaaattcacagcgctatgcaattcttaattttcattaagttgttatttcagttttaaatgtaccttcagaataagcttccccaccccagtttttgttgcttgaaaatattgttgtcccggatttttgttaatattcatttttgttatccttttttaaaagtaaatgtacaggatgccagtaaaaaaaaaaaatggcttcagaattaaaactatgaaatattttacagtttttcttgtacagagtacttggctgttagcccaaggttaaaaagttcataacagattttttttggactgttttgttgggcagtgcctgataagcttcaaagctgctttattcaataaaaaaaagaaatgaaaaagatatatgaatatgacaaagtattgctgagtccaacaatgttgttttaagactcttaaaatacggtacctggcaatgtttatttcataaagaattgtgaacttcttgaatctagggagggggaatgtagtgaagggatgtatcaagtggggtggtgggagggggaggcaaggttatatgcactttctcatgatttacagagaagtgaataactgcaaagtgaagttgcttcttctacttcagtcttctctcactttgatttgctagttgttatcaattaatgacaattacaaacctactgtatctctaatacagtgtgactggtcaggtatttcagttcttaggaaggaagtgccaagtttgtttttgggttcctggaacagcgctcacctttgtttagaacactggtttaaagggataatcatctctgtcacattagactatccatcatgaccagcaaatactcattttaggaaaaaaaaaagcatgatctgaaaaatacttttggtggtatgttggttaccctcctagctttccatttggtttagaacataaagcaaatagacacagtcatactgtcactgctctggactgtgtggagctcgctaaagtcatggtcattgcaggaatccaagtggcagtccttctcattcattctaatcattgtatgtgcttcactacgggggggagaaggaaacgttagcatcatgtttcccatttagggcaggagtgagaggtctctcttcctgatttagatatgcaaaagctggtatgttcagtaggaactgtacatgtgttgggaggcataaagactaattagcaaccataatatggtcactaccctaatagactaaatgaaatcttgcaatttcaaattactctttctccatattagatttacccacagctatatttctgtttaagtactagggtgagggttttctgttactttgttttttaatgttgttccttttgaaagaatcagtcttgcagctgagtgaaaaatctgtggaatgtattatttgtcctctttacatgaaactactcatacttaagcaaaagtcagtcttatagcaagactgttagccctcaaacttgactctactgatctgaccatttccctctcatcgccagacaactgacgatttccctggttttagtctgcgtctctgctttaaagttattgtgatatccttctagatcatacacaagtctaacagttaattagttaacagtttttaaactaggtttgtgggtatttttttggtagcacatgtatgctattacatacaaatttttatttctaaaatataagatctgagattgaatattttcattaaaagctacagttttgtgaatctttgtgcttcaacattctttgcaagatgatacggtatttaggcatttgccttatttttgcatctcacaaacataagtgcaatagatcttttcattgaacagcaaagtaggattcatcattccatatgacttgagttacaccagacctattctgcccaatgcctttttgattacagtgtagcttgcccaccgcatttgtcgttttagatactttgctagccggccactttggatttcatcagacagtcctaacaatattgtctgaacggctgaatatgaatagatacagcagaggcactcctgatatatgatttttatccatgcgtcagtttttcccacccagtgtagcatcctaaagataaagccagaagctaagctgccagtgaggctgtgattgggcgtagaagtgggagcattgggacctcacattacacacacgagagatcataaccatgtgaaaaggcaaaaagcatgtgtttgcaacatctgataacttcatggcctttgataaatgtatatatgtatatgtgcatggactgtgtttccagtacacctttcagccaaaacagatccacagtagttgttgagttcaagtacataaagtacataacaagcgaacgtctagtacaattcttacttatgtgtatgggatttttccctttgaggttgctttgttttgtcttacaaaggtgaaaattgtttgtaagtgaagtgagaagttcatatttctttggcttttttgtgtttttaaaagttactccttttagggagctggtctgatgacttgcttagcttggaaatccttgttttcagtgtgtcgagtcaaaatgtgtttatgtgagctgtcactgtggggaaccaattgctttgtcatatagctggttatgaactagtaacatgtttgggaagtcctactgatgttcctttggaagaaaaaatctgctggttttaacaactgtgcttttgctatgtatggtatccaagttagttgaaacgcagacactgagatctgtttgagtttagggtcatttttagaaaggggcagtttaaagcacaatgtctcacatgggacaaagttccaaaatgccaaattcttattttttaaaaagctagttctataaaatactggtattatgggtggggaggaaatagaattgagtcaattggaaagactatccaacttaacatgaaacttgtcaccatgagatagcattagctgcccaggatgctgctatatatatatatatatatatatatgtgtgtgtgtgtgtgtgtgtgtatatatatatatatatatatatatatatatatgtgtgtgtgtatatatatatatatgtgtatatatatatgtatatacatatatgtacgcgtgtgcgcatacatgtacgcatgtaacgtgtcatgtgcgcgtgatctttggggtgactcagatcgagagcgcgcgcgtacgcgttcgctcgcgcgtgcgctcgtcatatttcacgagcgcgcgagcgcgagagcgcgcgcgcgactcaactctagagctgtagagaaacattccacttttgcacacttgtgatatctttaggaggtcgcgtacagatatgattttcctaactatttctaccaacttgaatggttaatgtcatatacttacagttttctatctttctgcttagtctggtaaactctctcataacattatcatattatactacatcctatggtttataatagcataacatcttttatatcatctatataaataactcgttaatgatgagatatcccttcctatctcaacaatggttgtcatattatatcaactcgcatttactacagtacaggtgctcatatatctactcattacgttctatatctctactg

SEQ ID NO: 316884 - DNA, 6735 bp, Homo sapiens
cattcgggcggggtgaagctcgtgtgtggagtgccacggtacaatcagacgacagatggacagtgtgacaaaagtgtcagaaaggattgggcctcgctgtgagagtcagcctggattcaaagtgttgacaagttgctgaaaaggaagccagtgagaggactgtggcacgcagaggaagtggagccctgtcttcggtcacaccattgatggaggacagatggacagccgtatggccagtcacctctcctcttaaacctttggagagtggtcctttgtcctctgctggacacataataggaattctaacacattctctgaattcacttttcataaaaacgtaaaatcagactgctctgtacaaccaggctcaactgttgcatggtagcagatttgcaaacatgagtgctgaggggtaccagtacagagcgctgtatgattataaaaaggaaagagaagaagatattgacttgcacttgggtgacatattgactgtgaataaagggtccttagtagctcttggattcagtgatggacaggaagccaggcctgaagaaattggctggttaaatggctataatgaaaccacaggggaaaggggggactttccgggaacttacgtagaatatattggaaggaaaaaaatctcgcctcccacaccaaagccccggccacctcggcctcttcctgttgcaccaggttcttcgaaaactgaagcagatgttgaacaacaagctttgactctcccggatcttgcagagcagtttgcccctcctgacattgccccgcctcttcttatcaagctcgtggaagccattgaaaagaaaggtctggaatgttcaactctatacagaacacagagctccagcaacctggcagaattacgacagcttcttgattgtgatacaccctccgtggacttggaaatgatcgatgtgcacgttttggctgacgctttcaaacgctatctcctggacttaccaaatcctgtcattccagcagccgtttacagtgaaatgatttctttagctccagaagtacaaagctccgaagaatatattcagctattgaagaagcttattaggtcgcctagcatacctcatcagtattggcttacgcttcagtatttgttaaaacatttcttcaagctctctcaaacctccagcaaaaatctgttgaatgcaagagtactctctgaaattttcagccctatgcttttcagattctcagcagccagctctgataatactgaaaacctcataaaagttatagaaattttaatctcaactgaatggaatgaacgacagcctgcaccagcactgcctcctaaaccaccaaaacctactactgtagccaacaacggtatgaataacaatatgtccttacaagatgctgaatggtactggggagatatctcgagggaagaagtgaatgaaaaacttcgagatacagcagacgggacctttttggtacgagatgcgtctactaaaatgcatggtgattatactcttacactaaggtaagccagggaatatagctgaaattaggttctgtggttgaattaataaaccactaccggaatgaatctctagctcagtataatcccaaattggatgtgaaattactttatccagtatccaaataccaacaggatcaagttgtcaaagaagataatattgaagctgtagggaaaaaattacatgaatataacactcagtttcaagaaaaaagtcgagaatatgatagattatatgaagaatatacccgcacatcccaggaaatccaaatgaaaaggacagctattgaagcatttaatgaaaccataaaaatatttgaagaacagtgccagacccaagagcggtacagcaaagaatacatagaaaagtttaaacgtgaaggcaatgagaaagaaatacaaaggattatgcataattatgataagttgaagtctcgaatcagtgaaattattgacagtagaagaagattggaagaagacttgaagaagcaggcagctgagtatcgagaaattgacaaacgtatgaacagcattaaaccagaccttatccagctgagaaagacgagagaccaatacttgatgtggttgactcaaaaaggtgttcggcaaaagaagttgaacgagtggttgggcaatgaaaacactgaagaccaatattcactggtggaagatgatgaagatttgccccatcatgatgagaagacatggaatgttggaagcagcaaccgaaacaaagctgaaaacctgttgcgagggaagcgagatggcacttttcttgtccgggagagcagtaaacagggctgctatgcctgctctgtagtggtggacggcgaagtaaagcattgtgtcataaacaaaacagcaactggctatggctttgccgagccctataacttgtacagctctctgaaagaactggtgctacattaccaacacacctcccttgtgcagcacaacgactccctcaatgtcacactagcctacccagtatatgcacagcagaggcgatgaagcgcttactctttgatccttctcctgaagttcagccaccctgaggcctctggaaagcaaagggctcctctccagtctgatctgtgaattgagctgcagaaacgaagccatctttctttggatgggactagagctttctttcacaaaaaagaagtaggggaagacatgcagcctaaggctgtatgatgaccacacgttcctaagctggagtgcttatcccttctttttctttttttctttggtttaatttaaagccacaaccacatacaacacaaagagaaaaagaaatgcaaaaatctctgcgtgcagggacaaagaggcctttaaccatggtgcttgttaatgctttctgaagctttaccagctgaaagttgggactctggagagcggaggagagagaggcagaagaaccctggcctgagaaggtttggtccagcctggtttagcctggatgttgctgtgcacggtggacccagacacatcgcactgtggattatttcattttgtaacaaatgaacgatatgtagcagaaaggcacgtccactcacaagggacgctttgggagaatgtcagttcatgtatgttcagaagaaattctgtcatagaaagtgccagaaagtgtttaacttgtcaaaaaacaaaaacccagcaacagaaaaatggagtttggaaaacaggacttaaaatgacattcagtatataaaatatgtacataatattggatgactaactatcaaatagatggatttgtatcaataccaaatagcttctgttttgttttgctgaaggctaaattcacagcgctatgcaattcttaattttcattaagttgttatttcagttttaaatgtaccttcagaataagcttccccaccccagtttttgttgcttgaaaatattgttgtcccggatttttgttaatattcatttttgttatccttttttaaaagtaaatgtacaggatgccagtaaaaaaaaaaaatggcttcagaattaaaactatgaaatattttacagtttttcttgtacagagtacttggctgttagcccaaggttaaaaagttcataacagattttttttggactgttttgttgggcagtgcctgataagcttcaaagctgctttattcaataaaaaaaagaaatgaaaaagatatatgaatatgacaaagtattgctgagtccaacaatgttgttttaagactcttaaaatacggtacctggcaatgtttatttcataaagaattgtgaacttcttgaatctagggagggggaatgtagtgaagggatgtatcaagtggggtggtgggagggggaggcaaggttatatgcactttctcatgatttacagagaagtgaataactgcaaagtgaagttgcttcttctacttcagtcttctctcactttgatttgctagttgttatcaattaatgacaattacaaacctactgtatctctaatacagtgtgactggtcaggtatttcagttcttaggaaggaagtgccaagtttgtttttgggttcctggaacagcgctcacctttgtttagaacactggtttaaagggataatcatctctgtcacattagactatccatcatgaccagcaaatactcattttaggaaaaaaaaaagcatgatctgaaaaatacttttggtggtatgttggttaccctcctagctttccatttggtttagaacataaagcaaatagacacagtcatactgtcactgctctggactgtgtggagctcgctaaagtcatggtcattgcaggaatccaagtggcagtccttctcattcattctaatcattgtatgtgcttcactacgggggggagaaggaaacgttagcatcatgtttcccatttagggcaggagtgagaggtctctcttcctgatttagatatgcaaaagctggtatgttcagtaggaactgtacatgtgttgggaggcataaagactaattagcaaccataatatggtcactaccctaatagactaaatgaaatcttgcaatttcaaattactctttctccatattagatttacccacagctatatttctgtttaagtactagggtgagggttttctgttactttgttttttaatgttgttccttttgaaagaatcagtcttgcagctgagtgaaaaatctgtggaatgtattatttgtcctctttacatgaaactactcatacttaagcaaaagtcagtcttatagcaagactgttagccctcaaacttgactctactgatctgaccatttccctctcatcgccagacaactgacgatttccctggttttagtctgcgtctctgctttaaagttattgtgatatccttctagatcatacacaagtctaacagttaattagttaacagtttttaaactaggtttgtgggtatttttttggtagcacatgtatgctattacatacaaatttttatttctaaaatataagatctgagattgaatattttcattaaaagctacagttttgtgaatctttgtgcttcaacattctttgcaagatgatacggtatttaggcatttgccttatttttgcatctcacaaacataagtgcaatagatcttttcattgaacagcaaagtaggattcatcattccatatgacttgagttacaccagacctattctgcccaatgcctttttgattacagtgtagcttgcccaccgcatttgtcgttttagatactttgctagccggccactttggatttcatcagacagtcctaacaatattgtctgaacggctgaatatgaatagatacagcagaggcactcctgatatatgatttttatccatgcgtcagtttttcccacccagtgtagcatcctaaagataaagccagaagctaagctgccagtgaggctgtgattgggcgtagaagtgggagcattgggacctcacattacacacacgagagatcataaccatgtgaaaaggcaaaaagcatgtgtttgcaacatctgataacttcatggcctttgataaatgtatatatgtatatgtgcatggactgtgtttccagtacacctttcagccaaaacagatccacagtagttgttgagttcaagtacataaagtacataacaagcgaacgtctagtacaattcttacttatgtgtatgggatttttccctttgaggttgctttgttttgtcttacaaaggtgaaaattgtttgtaagtgaagtgagaagttcatatttctttggcttttttgtgtttttaaaagttactccttttagggagctggtctgatgacttgcttagcttggaaatccttgttttcagtgtgtcgagtcaaaatgtgtttatgtgagctgtcactgtggggaaccaattgctttgtcatatagctggttatgaactagtaacatgtttgggaagtcctactgatgttcctttggaagaaaaaatctgctggttttaacaactgtgcttttgctatgtatggtatccaagttagttgaaacgcagacactgagatctgtttgagtttagggtcatttttagaaaggggcagtttaaagcacaatgtctcacatgggacaaagttccaaaatgccaaattcttattttttaaaaagctagttctataaaatactggtattatgggtggggaggaaatagaattgagtcaattggaaagactatccaacttaacatgaaacttgtcaccatgagatagcattagctgcccaggatgctgctatatatatatatatatatatatatgtgtgtgtgtgtgtgtgtgtgtatatatatatatatatatatatatatatatatgtgtgtgtgtatatatatatatatgtgtatatatatatgtatatacatatatgtatatatacgcacatatatatatgtatttaaaaaaatcaaaacaaaaaaaaactcatttatacctgtgtattttttaaagctacaatctgttcaatgtttttaaaaatctgtttatatgacattgttaaaataaagttggtcttttgacgagagggaggatgtcacggtcagttgtaactttgccttcacaaggcaactggggtggggggtgggggtagtgtgcctccttgacatttcgttcaagttatagattcaatggagctatgtcttgttttaagttgctttaatgcattgtattagatcttcaaacagaataaaggttgttttgaaactgaa

SEQ ID NO: 316885 - DNA, 5710 bp, Homo sapiens
gacgagccgagccgagccaagcggagctgggccactgtgcacgcccggagggtcctggcggcgcccccgctcctgcgcgcactctcggcgccggacacgagcactgcctgccgggaacaggctgggggaggtgcgggggcttggcccacttggtggaagaacagctttggggattttttttttttcattgtcggatacaggcatttcaaagggaaaccgttgaaatgcataacctgcaaacactgcctcctaaaccaccaaaacctactactgtagccaacaacggtatgaataacaatatgtccttacaagatgctgaatggtactggggagatatctcgagggaagaagtgaatgaaaaacttcgagatacagcagacgggacctttttggtacgagatgcgtctactaaaatgcatggtgattatactcttacactaaggaaagggggaaataacaaattaatcaaaatatttcatcgagatgggaaatatggcttctctgacccattaaccttcagttctgtggttgaattaataaaccactaccggaatgaatctctagctcagtataatcccaaattggatgtgaaattactttatccagtatccaaataccaacaggatcaagttgtcaaagaagataatattgaagctgtagggaaaaaattacatgaatataacactcagtttcaagaaaaaagtcgagaatatgatagattatatgaagaatatacccgcacatcccaggaaatccaaatgaaaaggacagctattgaagcatttaatgaaaccataaaaatatttgaagaacagtgccagacccaagagcggtacagcaaagaatacatagaaaagtttaaacgtgaaggcaatgagaaagaaatacaaaggattatgcataattatgataagttgaagtctcgaatcagtgaaattattgacagtagaagaagattggaagaagacttgaagaagcaggcagctgagtatcgagaaattgacaaacgtatgaacagcattaaaccagaccttatccagctgagaaagacgagagaccaatacttgatgtggttgactcaaaaaggtgttcggcaaaagaagttgaacgagtggttgggcaatgaaaacactgaagaccaatattcactggtggaagatgatgaagatttgccccatcatgatgagaagacatggaatgttggaagcagcaaccgaaacaaagctgaaaacctgttgcgagggaagcgagatggcacttttcttgtccgggagagcagtaaacagggctgctatgcctgctctgtagtggtggacggcgaagtaaagcattgtgtcataaacaaaacagcaactggctatggctttgccgagccctataacttgtacagctctctgaaagaactggtgctacattaccaacacacctcccttgtgcagcacaacgactccctcaatgtcacactagcctacccagtatatgcacagcagaggcgatgaagcgcttactctttgatccttctcctgaagttcagccaccctgaggcctctggaaagcaaagggctcctctccagtctgatctgtgaattgagctgcagaaacgaagccatctttctttggatgggactagagctttctttcacaaaaaagaagtaggggaagacatgcagcctaaggctgtatgatgaccacacgttcctaagctggagtgcttatcccttctttttctttttttctttggtttaatttaaagccacaaccacatacaacacaaagagaaaaagaaatgcaaaaatctctgcgtgcagggacaaagaggcctttaaccatggtgcttgttaatgctttctgaagctttaccagctgaaagttgggactctggagagcggaggagagagaggcagaagaaccctggcctgagaaggtttggtccagcctggtttagcctggatgttgctgtgcacggtggacccagacacatcgcactgtggattatttcattttgtaacaaatgaacgatatgtagcagaaaggcacgtccactcacaagggacgctttgggagaatgtcagttcatgtatgttcagaagaaattctgtcatagaaagtgccagaaagtgtttaacttgtcaaaaaacaaaaacccagcaacagaaaaatggagtttggaaaacaggacttaaaatgacattcagtatataaaatatgtacataatattggatgactaactatcaaatagatggatttgtatcaataccaaatagcttctgttttgttttgctgaaggctaaattcacagcgctatgcaattcttaattttcattaagttgttatttcagttttaaatgtaccttcagaataagcttccccaccccagtttttgttgcttgaaaatattgttgtcccggatttttgttaatattcatttttgttatccttttttaaaagtaaatgtacaggatgccagtaaaaaaaaaaaatggcttcagaattaaaactatgaaatattttacagtttttcttgtacagagtacttggctgttagcccaaggttaaaaagttcataacagattttttttggactgttttgttgggcagtgcctgataagcttcaaagctgctttattcaataaaaaaaagaaatgaaaaagatatatgaatatgacaaagtattgctgagtccaacaatgttgttttaagactcttaaaatacggtacctggcaatgtttatttcataaagaattgtgaacttcttgaatctagggagggggaatgtagtgaagggatgtatcaagtggggtggtgggagggggaggcaaggttatatgcactttctcatgatttacagagaagtgaataactgcaaagtgaagttgcttcttctacttcagtcttctctcactttgatttgctagttgttatcaattaatgacaattacaaacctactgtatctctaatacagtgtgactggtcaggtatttcagttcttaggaaggaagtgccaagtttgtttttgggttcctggaacagcgctcacctttgtttagaacactggtttaaagggataatcatctctgtcacattagactatccatcatgaccagcaaatactcattttaggaaaaaaaaaagcatgatctgaaaaatacttttggtggtatgttggttaccctcctagctttccatttggtttagaacataaagcaaatagacacagtcatactgtcactgctctggactgtgtggagctcgctaaagtcatggtcattgcaggaatccaagtggcagtccttctcattcattctaatcattgtatgtgcttcactacgggggggagaaggaaacgttagcatcatgtttcccatttagggcaggagtgagaggtctctcttcctgatttagatatgcaaaagctggtatgttcagtaggaactgtacatgtgttgggaggcataaagactaattagcaaccataatatggtcactaccctaatagactaaatgaaatcttgcaatttcaaattactctttctccatattagatttacccacagctatatttctgtttaagtactagggtgagggttttctgttactttgttttttaatgttgttccttttgaaagaatcagtcttgcagctgagtgaaaaatctgtggaatgtattatttgtcctctttacatgaaactactcatacttaagcaaaagtcagtcttatagcaagactgttagccctcaaacttgactctactgatctgaccatttccctctcatcgccagacaactgacgatttccctggttttagtctgcgtctctgctttaaagttattgtgatatccttctagatcatacacaagtctaacagttaattagttaacagtttttaaactaggtttgtgggtatttttttggtagcacatgtatgctattacatacaaatttttatttctaaaatataagatctgagattgaatattttcattaaaagctacagttttgtgaatctttgtgcttcaacattctttgcaagatgatacggtatttaggcatttgccttatttttgcatctcacaaacataagtgcaatagatcttttcattgaacagcaaagtaggattcatcattccatatgacttgagttacaccagacctattctgcccaatgcctttttgattacagtgtagcttgcccaccgcatttgtcgttttagatactttgctagccggccactttggatttcatcagacagtcctaacaatattgtctgaacggctgaatatgaatagatacagcagaggcactcctgatatatgatttttatccatgcgtcagtttttcccacccagtgtagcatcctaaagataaagccagaagctaagctgccagtgaggctgtgattgggcgtagaagtgggagcattgggacctcacattacacacacgagagatcataaccatgtgaaaaggcaaaaagcatgtgtttgcaacatctgataacttcatggcctttgataaatgtatatatgtatatgtgcatggactgtgtttccagtacacctttcagccaaaacagatccacagtagttgttgagttcaagtacataaagtacataacaagcgaacgtctagtacaattcttacttatgtgtatgggatttttccctttgaggttgctttgttttgtcttacaaaggtgaaaattgtttgtaagtgaagtgagaagttcatatttctttggcttttttgtgtttttaaaagttactccttttagggagctggtctgatgacttgcttagcttggaaatccttgttttcagtgtgtcgagtcaaaatgtgtttatgtgagctgtcactgtggggaaccaattgctttgtcatatagctggttatgaactagtaacatgtttgggaagtcctactgatgttcctttggaagaaaaaatctgctggttttaacaactgtgcttttgctatgtatggtatccaagttagttgaaacgcagacactgagatctgtttgagtttagggtcatttttagaaaggggcagtttaaagcacaatgtctcacatgggacaaagttccaaaatgccaaattcttattttttaaaaagctagttctataaaatactggtattatgggtggggaggaaatagaattgagtcaattggaaagactatccaacttaacatgaaacttgtcaccatgagatagcattagctgcccaggatgctgctatatatatatatatatatatatatgtgtgtgtgtgtgtgtgtgtgtatatatatatatatatatatatatatatatatgtgtgtgtgtatatatatatatatgtgtatatatatatgtatatacatatatgtatatatacgcacatatatatatgtatttaaaaaaatcaaaacaaaaaaaaactcatttatacctgtgtattttttaaagctacaatctgttcaatgtttttaaaaatctgtttatatgacattgttaaaataaagttggtcttttgacgagagggaggatgtcacggtcagttgtaactttgccttcacaaggcaactggggtggggggtgggggtagtgtgcctccttgacatttcgttcaagttatagattcaatggagctatgtcttgttttaagttgctttaatgcattgtattagatcttcaaacagaataaaggttgttttgaaactgaa

SEQ ID NO: 316886 - DNA, 6743 bp, Homo sapiens
cattcgggcggggtgaagctcgtgtgtggagtgccacggtacaatcagacgacagatggacagtgtgacaaaagtgtcagaaaggattgggcctcgctgtgagagtcagcctggattcaaagtgttgacaagttgctgaaaaggaagccagtgagaggactgtggcacgcagaggaagtggagccctgtcttcggtcacaccattgatggaggacagatggacagccgtatggccagtcacctctcctcttaaacctttggagagtggtcctttgtcctctgctggacacataataggaattctaacacattctctgaattcacttttcataaaaacgtaaaatcagactgctctgtacaaccaggctcaactgttgcatggtagcagatttgcaaacatgagtgctgaggggtaccagtacagagcgctgtatgattataaaaaggaaagagaagaagatattgacttgcacttgggtgacatattgactgtgaataaagggtccttagtagctcttggattcagtgatggacaggaagccaggcctgaagaaattggctggttaaatggctataatgaaaccacaggggaaaggggggactttccgggaacttacgtagaatatattggaaggaaaaaaatctcgcctcccacaccaaagccccggccacctcggcctcttcctgttgcaccaggttcttcgaaaactgaagcagatgttgaacaacaagctttgactctcccggatcttgcagagcagtttgcccctcctgacattgccccgcctcttcttatcaagctcgtggaagccattgaaaagaaaggtctggaatgttcaactctatacagaacacagagctccagcaacctggcagaattacgacagcttcttgattgtgatacaccctccgtggacttggaaatgatcgatgtgcacgttttggctgacgctttcaaacgctatctcctggacttaccaaatcctgtcattccagcagccgtttacagtgaaatgatttctttagctccagaagtacaaagctccgaagaatatattcagctattgaagaagcttattaggtcgcctagcatacctcatcagtattggcttacgcttcagtatttgttaaaacatttcttcaagctctctcaaacctccagcaaaaatctgttgaatgcaagagtactctctgaaattttcagccctatgcttttcagattctcagcagccagctctgataatactgaaaacctcataaaagttatagaaattttaatctcaactgaatggaatgaacgacagcctgcaccagcactgcctcctaaaccaccaaaacctactactgtagccaacaacggtatgaataacaatatgtccttacaagatgctgaatggtactggggagatatctcgagggaagaagtgaatgaaaaacttcgagatacagcagacgggacctttttggtacgagatgcgtctactaaaatgcatggtgattatactcttacactaaggaaagggggaaataacaaattaatcaaaatatttcatcgagatgggaaatatggcttctctgacccattaaccttcagttctgtggttgaattaataaaccactaccggaatgaatctctagctcagtataatcccaaattggatgtgaaattactttatccagtatccaaataccaacaggatcaagttgtcaaagaagataatattgaagctgtagggaaaaaattacatgaatataacactcagtttcaagaaaaaagtcgagaatatgatagattatatgaagaatatacccgcacatcccaggaaatccaaatgaaaaggacagctattgaagcatttaatgaaaccataaaaatatttgaagaacagtgccagacccaagagcggtacagcaaagaatacatagaaaagtttaaacgtgaaggcaatgagaaagaaatacaaaggattatgcataattatgataagttgaagtctcgaatcagtgaaattattgacagtagaagaagattggaagaagacttgaagaagcaggcagctgagtatcgagaaattgacaaacgtatgaacagcattaaaccagaccttatccagctgagaaagacgagagaccaatacttgatgtggttgactcaaaaaggtgttcggcaaaagaagttgaacgagtggttgggcaatgaaaacactgaagaatgatgagaagacatggaatgttggaagcagcaaccgaaacaaagctgaaaacctgttgcgagggaagcgagatggcacttttcttgtccgggagagcagtaaacagggctgctatgcctgctctgtagtggtggacggcgaagtaaagcattgtgtcataaacaaaacagcaactggctatggctttgccgagccctataacttgtacagctctctgaaagaactggtgctacattaccaacacacctcccttgtgcagcacaacgactccctcaatgtcacactagcctacccagtatatgcacagcagaggcgatgaagcgcttactctttgatccttctcctgaagttcagccaccctgaggcctctggaaagcaaagggctcctctccagtctgatctgtgaattgagctgcagaaacgaagccatctttctttggatgggactagagctttctttcacaaaaaagaagtaggggaagacatgcagcctaaggctgtatgatgaccacacgttcctaagctggagtgcttatcccttctttttctttttttctttggtttaatttaaagccacaaccacatacaacacaaagagaaaaagaaatgcaaaaatctctgcgtgcagggacaaagaggcctttaaccatggtgcttgttaatgctttctgaagctttaccagctgaaagttgggactctggagagcggaggagagagaggcagaagaaccctggcctgagaaggtttggtccagcctggtttagcctggatgttgctgtgcacggtggacccagacacatcgcactgtggattatttcattttgtaacaaatgaacgatatgtagcagaaaggcacgtccactcacaagggacgctttgggagaatgtcagttcatgtatgttcagaagaaattctgtcatagaaagtgccagaaagtgtttaacttgtcaaaaaacaaaaacccagcaacagaaaaatggagtttggaaaacaggacttaaaatgacattcagtatataaaatatgtacataatattggatgactaactatcaaatagatggatttgtatcaataccaaatagcttctgttttgttttgctgaaggctaaattcacagcgctatgcaattcttaattttcattaagttgttatttcagttttaaatgtaccttcagaataagcttccccaccccagtttttgttgcttgaaaatattgttgtcccggatttttgttaatattcatttttgttatccttttttaaaagtaaatgtacaggatgccagtaaaaaaaaaaaatggcttcagaattaaaactatgaaatattttacagtttttcttgtacagagtacttggctgttagcccaaggttaaaaagttcataacagattttttttggactgttttgttgggcagtgcctgataagcttcaaagctgctttattcaataaaaaaaagaaatgaaaaagatatatgaatatgacaaagtattgctgagtccaacaatgttgttttaagactcttaaaatacggtacctggcaatgtttatttcataaagaattgtgaacttcttgaatctagggagggggaatgtagtgaagggatgtatcaagtggggtggtgggagggggaggcaaggttatatgcactttctcatgatttacagagaagtgaataactgcaaagtgaagttgcttcttctacttcagtcttctctcactttgatttgctagttgttatcaattaatgacaattacaaacctactgtatctctaatacagtgtgactggtcaggtatttcagttcttaggaaggaagtgccaagtttgtttttgggttcctggaacagcgctcacctttgtttagaacactggtttaaagggataatcatctctgtcacattagactatccatcatgaccagcaaatactcattttaggaaaaaaaaaagcatgatctgaaaaatacttttggtggtatgttggttaccctcctagctttccatttggtttagaacataaagcaaatagacacagtcatactgtcactgctctggactgtgtggagctcgctaaagtcatggtcattgcaggaatccaagtggcagtccttctcattcattctaatcattgtatgtgcttcactacgggggggagaaggaaacgttagcatcatgtttcccatttagggcaggagtgagaggtctctcttcctgatttagatatgcaaaagctggtatgttcagtaggaactgtacatgtgttgggaggcataaagactaattagcaaccataatatggtcactaccctaatagactaaatgaaatcttgcaatttcaaattactctttctccatattagatttacccacagctatatttctgtttaagtactagggtgagggttttctgttactttgttttttaatgttgttccttttgaaagaatcagtcttgcagctgagtgaaaaatctgtggaatgtattatttgtcctctttacatgaaactactcatacttaagcaaaagtcagtcttatagcaagactgttagccctcaaacttgactctactgatctgaccatttccctctcatcgccagacaactgacgatttccctggttttagtctgcgtctctgctttaaagttattgtgatatccttctagatcatacacaagtctaacagttaattagttaacagtttttaaactaggtttgtgggtatttttttggtagcacatgtatgctattacatacaaatttttatttctaaaatataagatctgagattgaatattttcattaaaagctacagttttgtgaatctttgtgcttcaacattctttgcaagatgatacggtatttaggcatttgccttatttttgcatctcacaaacataagtgcaatagatcttttcattgaacagcaaagtaggattcatcattccatatgacttgagttacaccagacctattctgcccaatgcctttttgattacagtgtagcttgcccaccgcatttgtcgttttagatactttgctagccggccactttggatttcatcagacagtcctaacaatattgtctgaacggctgaatatgaatagatacagcagaggcactcctgatatatgatttttatccatgcgtcagtttttcccacccagtgtagcatcctaaagataaagccagaagctaagctgccagtgaggctgtgattgggcgtagaagtgggagcattgggacctcacattacacacacgagagatcataaccatgtgaaaaggcaaaaagcatgtgtttgcaacatctgataacttcatggcctttgataaatgtatatatgtatatgtgcatggactgtgtttccagtacacctttcagccaaaacagatccacagtagttgttgagttcaagtacataaagtacataacaagcgaacgtctagtacaattcttacttatgtgtatgggatttttccctttgaggttgctttgttttgtcttacaaaggtgaaaattgtttgtaagtgaagtgagaagttcatatttctttggcttttttgtgtttttaaaagttactccttttagggagctggtctgatgacttgcttagcttggaaatccttgttttcagtgtgtcgagtcaaaatgtgtttatgtgagctgtcactgtggggaaccaattgctttgtcatatagctggttatgaactagtaacatgtttgggaagtcctactgatgttcctttggaagaaaaaatctgctggttttaacaactgtgcttttgctatgtatggtatccaagttagttgaaacgcagacactgagatctgtttgagtttagggtcatttttagaaaggggcagtttaaagcacaatgtctcacatgggacaaagttccaaaatgccaaattcttattttttaaaaagctagttctataaaatactggtattatgggtggggaggaaatagaattgagtcaattggaaagactatccaacttaacatgaaacttgtcaccatgagatagcattagctgcccaggatgctgctatatatatatatatatatatatatgtgtgtgtgtgtgtgtgtgtgtatatatatatatatatatatatatatatatatgtgtgtgtgtatatatatatatatgtgtatatatatatgtatatacatatatgtatatatacgcacatatatatatgtatttaaaaaaatcaaaacaaaaaaaaactcatttatacctgtgtattttttaaagctacaatctgttcaatgtttttaaaaatctgtttatatgacattgttaaaataaagttggtcttttgacgagagggaggatgtcacggtcagttgtaactttgccttcacaaggcaactggggtggggggtgggggtagtgtgcctccttgacatttcgttcaagttatagattcaatggagctatgtcttgttttaagttgctttaatgcattgtattagatcttcaaacagaataaaggttgttttgaaactgaa

SEQ ID NO: 316887 - DNA, 2451 bp, Homo sapiens
  misc_feature (2397)..(2397): n is a, c, g, or t
cattcgggcggggtgaagctcgtgtgtggagtgccacggtacaatcagacgacagatggacagtgtgacaaaagtgtcagaaaggattgggcctcgctgtgagagtcagcctggattcaaagtgttgacaagttgctgaaaaggaagccagtgagaggactgtggcacgcagaggaagtggagccctgtcttcggtcacaccattgatggaggacagatggacagccgtatggccagtcacctctcctcttaaacctttggagagtggtcctttgtcctctgctggacacataataggaattctaacacattctctgaattcacttttcataaaaacgtaaaatcagactgctctgtacaaccaggctcaactgttgcatggtagcagatttgcaaacatgagtgctgaggggtaccagtacagagcgctgtatgattataaaaaggaaagagaagaagatattgacttgcacttgggtgacatattgactgtgaataaagggtccttagtagctcttggattcagtgatggacaggaagccaggcctgaagaaattggctggttaaatggctataatgaaaccacaggggaaaggggggactttccgggaacttacgtagaatatattggaaggaaaaaaatctcgcctcccacaccaaagccccggccacctcggcctcttcctgttgcaccaggttcttcgaaaactgaagcagatgttgaacaacaagctttgactctcccggatcttgcagagcagtttgcccctcctgacattgccccgcctcttcttatcaagctcgtggaagccattgaaaagaaaggtctggaatgttcaactctatacagaacacagagctccagcaacctggcagaattacgacagcttcttgattgtgatacaccctccgtggacttggaaatgatcgatgtgcacgttttggctgacgctttcaaacgctatctcctggacttaccaaatcctgtcattccagcagccgtttacagtgaaatgatttctttagctccagaagtacaaagctccgaagaatatattcagctattgaagaagcttattaggtcgcctagcatacctcatcagtattggcttacgcttcagtatttgttaaaacatttcttcaagctctctcaaacctccagcaaaaatctgttgaatgcaagagtactctctgaaattttcagccctatgcttttcagattctcagcagccagctctgataatactgaaaacctcataaaagttatagaaattttaatctcaactgaatggaatgaacgacagcctgcaccagcactgcctcctaaaccaccaaaacctactactgtagccaacaacggtatgaataacaatatgtccttacaagatgctgaatggtactggggagatatctcgagggaagaagtgaatgaaaaacttcgagatacagcagacgggacctttttggtacgagatgcgtctactaaaatgcatggtgattatactcttacactaaggaaagggggaaataacaaattaatcaaaatatttcatcgagatgggaaatatggcttctctgacccattaaccttcagttctgtggttgaattaataaaccactaccggaatgaatctctagctcagtataatcccaaattggatgtgaaattactttatccagtatccaaataccaacaggatcaagttgtcaaagaagataatattgaagctgtagggaaaaaattacatgaatataacactcagtttcaagaaaaaagtcgagaatatgatagattatatgaagaatatacccgcacatcccaggaaatccaaatgaaaaggacagctattgaagcatttaatgaaaccataaaaatatttgaagaacagtgccagacccaagagcggtacagcaaagaatacatagaaaagtttaaacgtgaaggcaatgagaaagaaatacaaaggattatgcataattatgataagttgaagtctcgaatcagtgaaattattgacagtagaagaagattggaagaagacttgaagaagcaggcagctgagtatcgagaaattgacaaacgtatgaacagcattaaaccagaccttatccagctgagaaagacgagagaccaatacttgatgtggttgactcaaaaaggtgttcggcaaaagaagttgaacgagtggttgggcaatgaaaacactgaagaccaatattcactggtggaagatgatgaagatttgccccatcatgatgagaagacatggaatgttggaagcagcaaccgaaacaaagctgaaaacctgttgcgagggaagcgagatggcacttttcttgtccgggagagcagtaaacagggctgctatgcctgctctgtagtggtggacggcgaantaaagcattgtgtcataaacgaactggtgctacattacccaccccttccttggg

SEQ ID NO: 316888 - DNA, 2222 bp, Homo sapiens
cgcgcgcgggcgcgcgggccgggcctgcccctccgaggcgccgtagcgcgggagggaggcggcggcgctgtggtccgtgggtccgccggtccgtgggtctgcccggccgcccggccccgccctgccccccggggcggctcggctccatggcccgcggcggcggcggcggcggcggcggcgggaggcgacccgggggccgcggtggccgctgaccgggcggcgggaggcggcggggccgggccatgggggacggaaccgtccgcagccgccggagccgggagccctgcccaagtcggagcggcgtcccctgctgagccccgagcgccgggccagcagccggatgcccgggcccactgggcgggccagtggccgcctgcgggatgagcagactgctgggggggacgctggagcgcgtctgcaaggctgtgctccttctctgcctgctgcacttcctcgtggccgtcatcctctactttgacgtctacgcccagcacctggccttcttcagccgcttcagtgcccgaggccctgcccatgccctccacccagctgctagcagcagcagcagcagcagcaactgctcccggcccaacgccaccgcctctagctccgggctccctgaggtccccagtgccctgcccggtcccacggctcccacgctgccaccctgtcctgactcgccacctggtcttgtgggcagactgctgatcgagttcacctcacccatgcccctggagcgggtgcagagggagaacccaggcgtgctcatgggcggccgatacacaccgcccgactgcaccccagcccagacggtggcggtcatcatcccctttagacaccgggaacaccacctgcgctactggctccactatctacaccccatcttgaggcggcagcggctgcgctacggcgtctatgtcatcaaccagcatggtgaggacaccttcaaccgggccaagctgcttaacgtgggcttcctagaggcgctgaaggaggatgccgcctatgactgcttcatcttcagcgatgtggacctggtccccatggatgaccgcaacctataccgctgcggcgaccaaccccgccactttgccattgccatggacaagtttggcttccggcttccctatgctggctactttggaggtgtgtcaggcctgagtaaggctcagtttctgagaatcaatggcttccccaatgagtactggggctggggtggcgaggatgatgacatcttcaaccggatctccctgactgggatgaagatctcacgcccagacatccgaatcggccgctaccgcatgatcaagcacgaccgcgacaagcataacgaacctaaccctcagaggtttaccaagattcaaaacacgaagctgaccatgaagcgggacggcattgggtcagtgcggtaccaggtcttggaggtgtctcggcaaccactcttcaccaatatcacagtggacattgggcggcctccgtcgtggccccctcggggctgacactaatggacagaggctctcggtgccgaagattgcctgccagaggactgaccacagcctggctggcagctgctctgtggaggacctccaggactgagactgggctctgttttccaagggtcttcactaggccccctagctacacctggaagtttcagaacccactttggggggcctcctgcctgggcaggctcttcaagtgtggccctctttggagtcaaccctccttcccgaccccctccccctagcccagccccagtcactgtcagggtcgggccagcccctgcactgcctcgcagagtggcctgggctaggtcactccacctctctgtgcctcagtttcccccccttgagtcccctagggcctggaagggtgggaggtatgtctagggggcagtgtctcttccagggggaattctcagctcttgggaacccccttgctcccaggggaggggaaacctttttcattcaacattgtagggggcaagctttggtgcgccccctgctgaggagcagccccaggaggggaccagaggggatgctgtgtcgctgcctgggatcttggggttggcctttgcatgggaggcaggtggggcttggatcagtaagtctggttcccgcctccctgtctgagagaggaggcaggagccccagggccggcttgtgtttgtacattgcacagaaacttgtgtgggtgctttagtaaaaaacgtgaatggagca

SEQ ID NO: 316889 - DNA, 1919 bp, Homo sapiens
ccagaacccctgcgccggagggagggccagcagccggatgcccgggcccactgggcgggccagtggccgcctgcgggatgagcagactgctgggggggacgctggagcgcgtctgcaaggctgtgctccttctctgcctgctgcacttcctcgtggccgtcatcctctactttgacgtctacgcccagcacctggccttcttcagccgcttcagtgcccgaggccctgcccatgccctccacccagctgctagcagcagcagcagcagcagcaactgctcccggcccaacgccaccgcctctagctccgggctccctgaggtccccagtgccctgcccggtcccacggctcccacgctgccaccctgtcctgactcgccacctggtcttgtgggcagactgctgatcgagttcacctcacccatgcccctggagcgggtgcagagggagaacccaggcgtgctcatgggcggccgatacacaccgcccgactgcaccccagcccagacggtggcggtcatcatcccctttagacaccgggaacaccacctgcgctactggctccactatctacaccccatcttgaggcggcagcggctgcgctacggcgtctatgtcatcaaccagcatggtgaggacaccttcaaccgggccaagctgcttaacgtgggcttcctagaggcgctgaaggaggatgccgcctatgactgcttcatcttcagcgatgtggacctggtccccatggatgaccgcaacctataccgctgcggcgaccaaccccgccactttgccattgccatggacaagtttggcttccggcttccctatgctggctactttggaggtgtgtcaggcctgagtaaggctcagtttctgagaatcaatggcttccccaatgagtactggggctggggtggcgaggatgatgacatcttcaaccggatctccctgactgggatgaagatctcacgcccagacatccgaatcggccgctaccgcatgatcaagcacgaccgcgacaagcataacgaacctaaccctcagaggtttaccaagattcaaaacacgaagctgaccatgaagcgggacggcattgggtcagtgcggtaccaggtcttggaggtgtctcggcaaccactcttcaccaatatcacagtggacattgggcggcctccgtcgtggccccctcggggctgacactaatggacagaggctctcggtgccgaagattgcctgccagaggactgaccacagcctggctggcagctgctctgtggaggacctccaggactgagactgggctctgttttccaagggtcttcactaggccccctagctacacctggaagtttcagaacccactttggggggcctcctgcctgggcaggctcttcaagtgtggccctctttggagtcaaccctccttcccgaccccctccccctagcccagccccagtcactgtcagggtcgggccagcccctgcactgcctcgcagagtggcctgggctaggtcactccacctctctgtgcctcagtttcccccccttgagtcccctagggcctggaagggtgggaggtatgtctagggggcagtgtctcttccagggggaattctcagctcttgggaacccccttgctcccaggggaggggaaacctttttcattcaacattgtagggggcaagctttggtgcgccccctgctgaggagcagccccaggaggggaccagaggggatgctgtgtcgctgcctgggatcttggggttggcctttgcatgggaggcaggtggggcttggatcagtaagtctggttcccgcctccctgtctgagagaggaggcaggagccccagggccggcttgtgtttgtacattgcacagaaacttgtgtgggtgctttagtaaaaaacgtgaatggagca

SEQ ID NO: 316890 - DNA, 1689 bp, Homo sapiens
cgcgcgcgggcgcgcgggccgggcctgcccctccgaggcgccgtagcgcgggagggaggcggcggcgctgtggtccgtgggtccgccggtccgtgggttgccctgcccggtcccacggctcccacgctgccaccctgtcctgactcgccacctggtcttgtgggcagactgctgatcgagttcacctcacccatgcccctggagcgggtgcagagggagaacccaggcgtgctcatgggcggccgatacacaccgcccgactgcaccccagcccagacggtggcggtcatcatcccctttagacaccgggaacaccacctgcgctactggctccactatctacaccccatcttgaggcggcagcggctgcgctacggcgtctatgtcatcaaccagcatggtgaggacaccttcaaccgggccaagctgcttaacgtgggcttcctagaggcgctgaaggaggatgccgcctatgactgcttcatcttcagcgatgtggacctggtccccatggatgaccgcaacctataccgctgcggcgaccaaccccgccactttgccattgccatggacaagtttggcttccggcttccctatgctggctactttggaggtgtgtcaggcctgagtaaggctcagtttctgagaatcaatggcttccccaatgagtactggggctggggtggcgaggatgatgacatcttcaaccggatctccctgactgggatgaagatctcacgcccagacatccgaatcggccgctaccgcatgatcaagcacgaccgcgacaagcataacgaacctaaccctcagaggtttaccaagattcaaaacacgaagctgaccatgaagcgggacggcattgggtcagtgcggtaccaggtcttggaggtgtctcggcaaccactcttcaccaatatcacagtggacattgggcggcctccgtcgtggccccctcggggctgacactaatggacagaggctctcggtgccgaagattgcctgccagaggactgaccacagcctggctggcagctgctctgtggaggacctccaggactgagactgggctctgttttccaagggtcttcactaggccccctagctacacctggaagtttcagaacccactttggggggcctcctgcctgggcaggctcttcaagtgtggccctctttggagtcaaccctccttcccgaccccctccccctagcccagccccagtcactgtcagggtcgggccagcccctgcactgcctcgcagagtggcctgggctaggtcactccacctctctgtgcctcagtttcccccccttgagtcccctagggcctggaagggtgggaggtatgtctagggggcagtgtctcttccagggggaattctcagctcttgggaacccccttgctcccaggggaggggaaacctttttcattcaacattgtagggggcaagctttggtgcgccccctgctgaggagcagccccaggaggggaccagaggggatgctgtgtcgctgcctgggatcttggggttggcctttgcatgggaggcaggtggggcttggatcagtaagtctggttcccgcctccctgtctgagagaggaggcaggagccccagggccggcttgtgtttgtacattgcacagaaacttgtgtgggtgctttagtaaaaaacgtgaatggagca

SEQ ID NO: 316891 - DNA, 1958 bp, Homo sapiens
cgcgcgcgggcgcgcgggccgggcctgcccctccgaggcgccgtagcgcgggagggaggcggcggcgctgtggtccgtgggtccgccggtccgtgggtctgcccggccgcccggccccgccctgccccccggggcggctcggctccatggcccgcggcggcggcggcggcggcggcggcgggaggcgacccgggggccgcggtggccgctgaccgggcggcgggaggcggcggggccgggccatgggggacggaaccgtccgcagccgccggagccgggagccctgcccaagtcggagcggcgtcccctgctgagccccgagcgccgggccagcagccggatgcccgggcccactgggcgggccagtggccgcctgcgggatgagcagactgctgggggggacgctggagcgcgtctgcaaggctgtgctccttctctgcctgctgcacttcctcgtggccgtcatcctctactttgacgtctacgcccagcacctggccttcttcagccgcttcagtgcccgaggccctgcccatgccctccacccagctgctagcagcagcagcagcagcagcaactgctcccggcccaacgccaccgcctctagctccgggctccctgaggtccccagtgccctgcccggtcccacggctcccacgctgccaccctgtcctgactcgccacctggtcttgtgggcagactgctgatcgagttcacctcacccatgcccctggagcgggtgcagagggagaacccaggcgtgctcatgggcggccgatacacaccgcccgactgcaccccagcccagacggtggcggtcatcatcccctttagacaccgggaacaccacctgcgctactggctccactatctacaccccatcttgaggcggcagcggctgcgctacggcgtctatgtcatcaaccagcatggtgaggacaccttcaaccgggccaagctgcttaacgtgggcttcctagaggcgctgaaggaggatgccgcctatgactgcttcatcttcagcgatgtggacctggtccccatggatgaccgcaacctataccgctgcggcgaccaaccccgccactttgccattgccatggacaagtttggcttccggcttccctatgctggctactttggaggtgtgtcaggcctgagtaaggctcagtttctgagaatcaatggcttccccaatgagtactggggctggggtggcgaggatgatgacatcttcaaccggatctccctgactgggatgaagatctcacgcccagacatccgaatcggccgctaccgcatgatcaagcacgaccgcgacaagcataacgaacctaaccctcagaggtttaccaagattcaaaacacgaagctgaccatgaagcgggacggcattgggtcagtgcggtaccaggtcttggaggtgtctcggcaaccactcttcaccaatatcacagtggacattgggcggcctccgtcgtggccccctcggggctgacactaatggacagaggctctcggtgccgaagattgcctgccagaggactgaccacagcctggctggcagctgctctgtggaggacctccaggactgagactgggctctgttttccaagggtcttcactaggccccctagctacacctggaagtttcagaacccactttggggggcctcctgcctgggcaggctcttcaagtgtggccctctttggagtcaaccctccttcccgaccccctccccctagcccagccccagaggggaccagaggggatgctgtgtcgctgcctgggatcttggggttggcctttgcatgggaggcaggtggggcttggatcagtaagtctggttcccgcctccctgtctgagagaggaggcaggagccccagggccggcttgtgtttgtacattgcacagaaacttgtgtgggtgctttagtaaaaaacgtgaatggagca

SEQ ID NO: 316892 - DNA, 2102 bp, Homo sapiens
cgcgcgcgggcgcgcgggccgggcctgcccctccgaggcgccgtagcgcgggagggaggcggcggcgctgtggtccgtgggtccgccggtccgtgggtctgcccggccgcccggccccgccctgccccccggggcggctcggctccatggcccgcggcggcggcggcggcggcggcggcgggaggcgacccgggggccgcggtggccgctgaccgggcggcgggaggcggcggggccgggccatgggggacggaaccgtccgcagccgccggagccgggagccctgcccaagtcggagcggcgtcccctgctgagccccgagcgccgggccagcagccggatgcccgggcccactgggcgggccagtggccgcctgcgggatgagcagactgctgggggggacgctggagcgcgtctgcaaggctgtgctccttctctgcctgctgcacttcctcgtggccgtcatcctctactttgacgtctacgcccagcacctggccttcttcagccgcttcagtgcccgaggccctgcccatgccctccacccagctgctagcagcagcagcagcagcagcaactgctcccggcccaacgccaccgcctctagctccgggctccctgaggtccccagtgccctgcccggtcccacggctcccacgctgccaccctgtcctgactcgccacctggtcttgtgggcagactgctgatcgagttcacctcacccatgcccctggagcgggtgcagagggagaacccaggcgtgctcatgggcggccgatacacaccgcccgactgcaccccagcccagacggtggcggtcatcatcccctttagacaccgggaacaccacctgcgctactggctccactatctacaccccatcttgaggcggcagcggctgcgctacggcgtctatgtcatcaaccagcatggtgaggacaccttcaaccgggccaagctgcttaacgtgggcttcctagaggcgctgaaggaggatgccgcctatgactgcttcatcttcagcgatgtggacctggtccccatggatgaccgcaacctataccgctgcggcgaccaaccccgccactttgccattgccatggacaagtttggcttccggcttccctatgctggctactttggaggtgtgtcaggcctgagtaaggctcagtttctgagaatcaatggcttccccaatgagtactggggctggggtggcgaggatgatgacatcttcaaccggatctccctgactgggatgaagatctcacgcccagacatccgaatcggccgctaccgcatgatcaagcacgaccgcgacaagcataacgaacctaaccctcagaggtgaccccagcaccctcaccccttactccccagaggcaacttcccaatatccccaactcttgaccccaagtggcccaatccctgatcccccagtgggggacctccaagcatccttgactccaaaaaggtgactcccagtgccactgattccctgatgtgatccaaggcccctcaggactgctggcacccctgatcgttgtcccccaacccccagcccagcctcagcccaatatctctgacctctggcctgattcctagaggtgaccagaatttaatgtcagggcctaaatagtcattgagtagattgcattcctattggtgccctcgaagacctcacttgtgcacctgtgggacccctgccggggcagataggacacgagctaatgggtgctgggcacagctcctgtggacctgacaaaggggacctgagcagtatgggaagggggtgtggaaagacagtgcccacccctctgaaattgaaggaggtggatgtatctcttaggaggtagccacatttggtatcaggctggctgggagaagggcctaaagggtgtgtgaaatgtaaacaagggcttcctgacactgctctgacttgtgctaaactttctgggggtgggagacccagagtagtcacacccaatccgtgctttcccttacgaagttcattccaggcagggagatagtcatggaaaaaggcagttatagcacaaggtcatcaaggcaaggtgttgtcttggcagaagagggactggtg

SEQ ID NO: 316893 - DNA, 1103 bp, Homo sapiens
cgcgcgcgggcgcgcgggccgggcctgcccctccgaggcgccgtagcgcgggagggaggcggcggcgctgtggtccgtgggtccgccggtccgtgggtctgcccggccgcccggccccgccctgccccccggggcggctcggctccatggcccgcggcggcggcggcggcggcggcggcgggaggcgacccgggggccgcggtggccgctgaccgggcggcgggaggcggcggggccgggccatgggggacggaaccgtccgcagccgccggagccgggagccctgcccaagtcggagcggcgtcccctgctgagccccgagcgccgggccagcagccggatgcccgggcccactgggcgggccagtggccgcctgcgggatgagcagactgctgggggggacgctggagcgcgtctgcaaggctgtgctccttctctgcctgctgcacttcctcgtggccgtcatcctctactttgacgtctacgcccagcacctggccttcttcagccgcttcagtgcccgaggccctgcccatgccctccacccagctgctagcagcagcagcagcagcagcaactgctcccggcccaacgccaccgcctctagctccgggctccctgaggtccccagtgccctgcccggtcccacggctcccacgctgccaccctgtcctgactcgccacctggtcttgtgggcagactgctgatcgagttcacctcacccatgcccctggagcgggtggcctggaagggtgggaggtatgtctagggggcagtgtctcttccagggggaattctcagctcttgggaacccccttgctcccaggggaggggaaacctttttcattcaacattgtagggggcaagctttggtgcgccccctgctgaggagcagccccaggaggggaccagaggggatgctgtgtcgctgcctgggatcttggggttggcctttgcatgggaggcaggtggggcttggatcagtaagtctggttcccgcctccctgtctgagagaggaggcaggagccccagggccggcttgtgtttgtacattgcacagaaacttgtgtgggtgctttagtaaaaaacgtgaatggagca

SEQ ID NO: 316894 - DNA, 2327 bp, Homo sapiens
cgcgcgcgggcgcgcgggccgggcctgcccctccgaggcgccgtagcgcgggagggaggcggcggcgctgtggtccgtgggtccgccggtccgtgggtctgcccggccgcccggccccgccctgccccccggggcggctcggctccatggcccgcggcggcggcggcggcggcggcggcgggaggcgacccgggggccgcggtggccgctgaccgggcggcgggaggcggcggggccgggccatgggggacggaaccgtccgcagccgccggagccgggagccctgcccaagtcggagcggcgtcccctgctgagccccgagcgccgggtgagaggagggcgcgcgcggcccccacccagggccccgagattccagacccagccccgcgaggggcaccccgagcgcggccccgagatcccaacccaggagccggccagcagccggatgcccgggcccactgggcgggccagtggccgcctgcgggatgagcagactgctgggggggacgctggagcgcgtctgcaaggctgtgctccttctctgcctgctgcacttcctcgtggccgtcatcctctactttgacgtctacgcccagcacctggccttcttcagccgcttcagtgcccgaggccctgcccatgccctccacccagctgctagcagcagcagcagcagcagcaactgctcccggcccaacgccaccgcctctagctccgggctccctgaggtccccagtgccctgcccggtcccacggctcccacgctgccaccctgtcctgactcgccacctggtcttgtgggcagactgctgatcgagttcacctcacccatgcccctggagcgggtgcagagggagaacccaggcgtgctcatgggcggccgatacacaccgcccgactgcaccccagcccagacggtggcggtcatcatcccctttagacaccgggaacaccacctgcgctactggctccactatctacaccccatcttgaggcggcagcggctgcgctacggcgtctatgtcatcaaccagcatggtgaggacaccttcaaccgggccaagctgcttaacgtgggcttcctagaggcgctgaaggaggatgccgcctatgactgcttcatcttcagcgatgtggacctggtccccatggatgaccgcaacctataccgctgcggcgaccaaccccgccactttgccattgccatggacaagtttggcttccggcttccctatgctggctactttggaggtgtgtcaggcctgagtaaggctcagtttctgagaatcaatggcttccccaatgagtactggggctggggtggcgaggatgatgacatcttcaaccggatctccctgactgggatgaagatctcacgcccagacatccgaatcggccgctaccgcatgatcaagcacgaccgcgacaagcataacgaacctaaccctcagaggtttaccaagattcaaaacacgaagctgaccatgaagcgggacggcattgggtcagtgcggtaccaggtcttggaggtgtctcggcaaccactcttcaccaatatcacagtggacattgggcggcctccgtcgtggccccctcggggctgacactaatggacagaggctctcggtgccgaagattgcctgccagaggactgaccacagcctggctggcagctgctctgtggaggacctccaggactgagactgggctctgttttccaagggtcttcactaggccccctagctacacctggaagtttcagaacccactttggggggcctcctgcctgggcaggctcttcaagtgtggccctctttggagtcaaccctccttcccgaccccctccccctagcccagccccagtcactgtcagggtcgggccagcccctgcactgcctcgcagagtggcctgggctaggtcactccacctctctgtgcctcagtttcccccccttgagtcccctagggcctggaagggtgggaggtatgtctagggggcagtgtctcttccagggggaattctcagctcttgggaacccccttgctcccaggggaggggaaacctttttcattcaacattgtagggggcaagctttggtgcgccccctgctgaggagcagccccaggaggggaccagaggggatgctgtgtcgctgcctgggatcttggggttggcctttgcatgggaggcaggtggggcttggatcagtaagtctggttcccgcctccctgtctgagagaggaggcaggagccccagggccggcttgtgtttgtacattgcacagaaacttgtgtgggtgctttagtaaaaaacgtgaatggagca

SEQ ID NO: 316895 - DNA, 2173 bp, Homo sapiens
cgcgcgcgggcgcgcgggccgggcctgcccctccgaggcgccgtagcgcgggagggaggcggcggcgctgtggtccgtgggtccgccggtccgtgggtctgcccggccgcccggccccgccctgccccccggggcggctcggctccatggcccgcggcggcggcggcggcggcggcggcgggaggcgacccgggggccgcggtggccgctgaccgggcggcgggaggcggcggggccgggccatgggggacggaaccgtccgcagccgccggagccgggagccctgcccaagtcggagcggcgtcccctgctgagccccgagcgccgggccagcagccggatgcccgggcccactgggcgggccagtggccgcctgcgggatgagcagactgctgggggggacgctggagcgcgtctgcaaggctgtgctccttctctgcctgctgcacttcctcgtggccgtcatcctctactttgacgtctacgcccagcacctggccttcttcagccgcttcagtgcccgaggccctgcccatgccctccacccagctgctagcagcagcagcagcagcagcaactgctcccggcccaacgccaccgcctctagctccgggctccctgaggtccccagtgccctgcccggtcccacggctcccacgctgccaccctgtcctgactcgccacctggtcttggcagagggagaacccaggcgtgctcatgggcggccgatacacaccgcccgactgcaccccagcccagacggtggcggtcatcatcccctttagacaccgggaacaccacctgcgctactggctccactatctacaccccatcttgaggcggcagcggctgcgctacggcgtctatgtcatcaaccagcatggtgaggacaccttcaaccgggccaagctgcttaacgtgggcttcctagaggcgctgaaggaggatgccgcctatgactgcttcatcttcagcgatgtggacctggtccccatggatgaccgcaacctataccgctgcggcgaccaaccccgccactttgccattgccatggacaagtttggcttccggcttccctatgctggctactttggaggtgtgtcaggcctgagtaaggctcagtttctgagaatcaatggcttccccaatgagtactggggctggggtggcgaggatgatgacatcttcaaccggatctccctgactgggatgaagatctcacgcccagacatccgaatcggccgctaccgcatgatcaagcacgaccgcgacaagcataacgaacctaaccctcagaggtttaccaagattcaaaacacgaagctgaccatgaagcgggacggcattgggtcagtgcggtaccaggtcttggaggtgtctcggcaaccactcttcaccaatatcacagtggacattgggcggcctccgtcgtggccccctcggggctgacactaatggacagaggctctcggtgccgaagattgcctgccagaggactgaccacagcctggctggcagctgctctgtggaggacctccaggactgagactgggctctgttttccaagggtcttcactaggccccctagctacacctggaagtttcagaacccactttggggggcctcctgcctgggcaggctcttcaagtgtggccctctttggagtcaaccctccttcccgaccccctccccctagcccagccccagtcactgtcagggtcgggccagcccctgcactgcctcgcagagtggcctgggctaggtcactccacctctctgtgcctcagtttcccccccttgagtcccctagggcctggaagggtgggaggtatgtctagggggcagtgtctcttccagggggaattctcagctcttgggaacccccttgctcccaggggaggggaaacctttttcattcaacattgtagggggcaagctttggtgcgccccctgctgaggagcagccccaggaggggaccagaggggatgctgtgtcgctgcctgggatcttggggttggcctttgcatgggaggcaggtggggcttggatcagtaagtctggttcccgcctccctgtctgagagaggaggcaggagccccagggccggcttgtgtttgtacattgcacagaaacttgtgtgggtgctttagtaaaaaacgtgaatggagca

SEQ ID NO: 316896 - DNA, 1800 bp, Homo sapiens
cgcgcgcgggcgcgcgggccgggcctgcccctccgaggcgccgtagcgcgggagggaggcggcggcgctgtggtccgtgggtccgccggtccgtgggtctgcccggccgcccggccccgccctgccccccggggcggctcggctccatggcccgcggcggcggcggcggcggcggcggcgggaggcgacccgggggccgcggtggccgctgaccgggcggcgggaggcggcggggccgggccatgggggacggaaccgtccgcagccgccggagccgggagccctgcccaagtcggagcggcgtcccctgctgagccccgagcgccgggccagcagccggatgcccgggcccactgggcgggccagtggccgcctgcgggatgagcagactgctgggggggacgctggagcgcgtctgcaaggctgtgctccttctctgcctgctgcacttcctcgtggccgtcatcctctactttgacgtctacgcccagcacctggccttcttcagccgcttcagtgcccgaggccctgcccatgccctccacccagctgctagcagcagcagcagcagcagcaactgctcccggcccaacgccaccgcctctagctccgggctccctgaggtccccagtgccctgcccggtcccacggctcccacgctgccaccctgtcctgactcgccacctggtcttgtgggcagactgctgatcgagttcacctcacccatgcccctggagcgggtgcagagggagaacccaggcgtgctcatgggcggccgatacacaccgcccgactgcaccccagcccagacggtggcggtcatcatcccctttagacaccgggaacaccacctgcgctactggctccactatctacaccccatcttgaggcggcagcggctgcgctacggcgtctatgtcatcaaccagcatggtgaggacaccttcaaccgggccaagctgcttaacgtgggcttcctagaggcgctgaaggaggatgccgcctatgactgcttcatcttcagcgatgtggacctggtccccatggatgaccgcaacctataccgctgcggcgaccaaccccgccactttgccattgccatggacaagtttggcttccggcttccctatgctggctactttggaggtgtgtcaggcctgagtaaggctcagtttctgagaatcaatggcttccccaatgagtactggggctggggtggcgaggatgatgacatcttcaaccggatctccctgactgggatgaagatctcacgcccagacatccgaatcggccgctaccgcatgatcaagcacgaccgcgacaagcataacgaacctaaccctcagaggtttaccaagattcaaaacacgaagctgaccatgaagcgggacggcattgggtcagtgcggtaccaggtcttggaggtgtctcggcaaccactcttcaccaatatcacagtggacattgggcggcctccgtcgtggccccctcggggctgacactaatggacagaggctctcggtgccgaagattgcctgccagaggactgaccacagcctggctggcagctgctctgtggaggacctccaggactgagactgggctctgttttccaagggtcttcactaggccccctagctacacctggaagtttcaggggaggcaggtggggcttggatcagtaagtctggttcccgcctccctgtctgagagaggaggcaggagccccagggccggcttgtgtttgtacattgcacagaaacttgtgtgggtgctttagtaaaaaacgtgaatggagca

SEQ ID NO: 316897 - DNA, 1350 bp, Homo sapiens
cgcgcgcgggcgcgcgggccgggcctgcccctccgaggcgccgtagcgcgggagggaggcggcggcgctgtggtccgtgggtccgccggtccgtgggtctgcccggccgcccggccccgccctgccccccggggcggctcggctccatggcccgcggcggcggcggcggcggcggcggcgggaggcgacccgggggccgcggtggccgctgaccgggcggcgggaggcggcggggccgggccatgggggacggaaccgtccgcagccgccggagccgggagccctgcccaagtcggagcggcgtcccctgctgagccccgagcgccgggccagcagccggatgcccgggcccactgggcgggccagtggccgcctgcgggatgagcagactgctgggggggacgctggagcgcgtctgcaaggctgtgctccttctctgcctgctgcacttcctcgtggccgtcatcctctactttgacgtctacgcccagcacctggccttcttcagccgcttcagtgcccgaggccctgcccatgccctccacccagctgctagcagcagcagcagcagcagcaactgctcccggcccaacgccaccgcctctagctccgggctccctgaggtccccagtgccctgcccggtcccacggctcccacgctgccaccctgtcctgactcgccacctggtcttgtgggcagactgctgatcgagttcacctcacccatgcccctggagcgggtgcagagggagaacccaggcgtgctcatgggcggccgatacacaccgcccgactgcaccccagcccagacggtggcggtcatcatcccctttagacaccgggaacaccacctgcgctactggctccactatctacaccccatcttgaggcggcagcggctgcgctacggcgtctatgtcatcaaccagcatggtgaggacaccttcaaccgggccaagctgcttaacgtgggcttcctagaggcgctgaaggaggatgccgcctatgactgcttcatcttcagcgatgtggacctggtccccatggatgaccgcaacctataccgctgcggcgaccaaccccgccactttgccattgccatggacaagtttggcttccggtcctatgctggtacttgcaggtgggccagctgagaagccagttcgagatcaggtcccacgagactgggctggggggcaggagtagacactcacggacccggaaggagaacttcaggccgaactgaaggcgaccataaaacacggaataacacccgaggacagtaaaagagacaaagggtgtcgggcatttgtcgcccccacaaaggcgccccccaaaaggaacaacaac

SEQ ID NO: 316898 - DNA, 744 bp, Homo sapiens
cgcgcgcgggcgcgcgggccgggcctgcccctccgaggcgccgtagcgcgggagggaggcggcggcgctgtggtccgtgggtccgccggtccgtgggtctgcccggccgcccggccccgccctgccccccggggcggctcggctccatggcccgcggcggcggcggcggcggcggcggcgggaggcgacccgggggccgcggtggccgctgaccgggcggcgggaggcggcggggccgggccatgggggacggaaccgtccgcagccgccggagccgggagccctgcccaagtcggagcggcgtcccctgctgagccccgagcgccgggccagcagccggatgcccgggcccactgggcgggccagtggccgcctgcgggatgagcagactgctgggggggacgctggagcgcgtctgcaaggctgtgctccttctctgcctgctgcacttcctcgtggccgtcatcctctactttgacgtctacgcccagcacctggccttcttcagccgcttcagtgcccgaggccctgcccatgccctccacccagctgctagcagcagcagcagcagcagcaactgctcccggcccaacgccaccgcgggaggcaggtggggcttggatcagtaagtctggttcccgcctccctgtctgagagaggaggcaggagccccagggccggcttgtgtttgtacattgcacagaaacttgtgtgggtgctttagtaaaaaacgtgaatggagca

SEQ ID NO: 316899 - DNA, 3448 bp, Homo sapiens
gcacggagattgttgccagggctctggtgagttcagaatgaccgaagaagcatgccgaacacggagtcagaaacgagcgcttgaacgggacccaacagaggacgatgtggagagcaagaaaataaaaatggagagaggattgttggcttcagatttaaacactgacggagacatgagggtgacacctgagccgggagcaggtccaacccaaggattgctgagggcaacagaggccacggccatggccatgggcagaggcgaagggctggtgggcgatgggcccgtggacatgcgcacctcacacagtgacatgaagtccgagaggagacccccctcacctgacgtgattgtgctctccgacaacgagcagccctcgagcccgagagtgaatgggctgaccacggtggccttgaaggagactagcaccgaggccctcatgaaaagcagtcctgaagaacgagaaaggatgatcaagcagctgaaggaagaattgaggttagaagaagcaaaactcgtgttgttgaaaaagttgcggcagagtcaaatacaaaaggaagccaccgcccagaagcccacaggttctgttgggagcaccgtgaccacccctcccccgcttgttcggggcactcagaacattcctgctggcaagccatcactccagacctcttcagctcggatgcccggcagtgtcatacccccgcccctggtccgaggtgggcagcaggcgtcctcgaagctggggccacaggcgagctcacaggtcgtcatgcccccactcgtcaggggggctcagcaaatccacagcattaggcaacattccagcacagggccaccgcccctcctcctggccccccgggcgtcggtgcccagtgtgcagattcagggacagaggatcatccagcagggcctcatccgcgtcgccaatgttcccaacaccagcctgctcgtcaacatcccacagcccaccccagcatcactgaaggggacaacagccacctccgctcaggccaactccacccccactagtgtggcctctgtggtcacctctgccgagtctccagcaagccgacaggcggccgccaagctggcgctgcgcaaacagctggagaagacgctactcgagatccccccacccaagcccccagccccagagatgaacttcctgcccagcgccgccaacaacgagttcatctacctggtcggcctggaggaggtggtgcagaacctactggagacacaagcaggcaggatgtcggccgccactgtgctgtcccgggagccctacatgtgtgcacagtgcaagacggacttcacgtgccgctggcgggaggagaagagcggcgccatcatgtgtgagaactgcatgacaaccaaccagaagaaggcgctcaaggtggagcacaccagccggctgaaggccgcctttgtgaaggcgctgcagcaggaacaggagattgagcagcggctcctgcagcagggcacggcccctgcacaggccaaggccgagcccaccgctgccccacaccccgtgctgaagcaggtcataaaaccccggcgtaagttggcgttccgctcaggagaggcccgcgactggagtaacggggctgtgctacaggcctccagccagctgtcccggggttcggccacgacgccccgaggtgtcctgcacacgttcagtccgtcacccaaactgcagaactcagcctcggccacagccctggtcagcaggaccggcagacattctgagagaaccgtgagcgccggcaagggcagcgccacctccaactggaagaagacgcccctcagcacaggcgggacccttgcgtttgtcagcccaagcctggcggtgcacaagagctcctcggccgtggaccgccagcgagagtacctcctggacatgatcccaccccgctccatcccccagtcagccacgtggaaatagtgcgagccaggccccgtggaagacgggctccctcctcccccacctggcccctggtctagaaggacccactgcaccaccctccgctggctcgggaagacaccgtgcccgccccaagagcaagcaccggccatgctgcagaggcaagacctcaattcttggctgcaaagtttcatcagggctagggggctggtgccgcctcataggcagacgaggatcatcgctgggggacctttcccgtgggctttcttcctttctctctttgcctttagtttgcccgacaccagcagaaaagtggaccttgggggctggttctgctcctggcccccttgttcagcccctgccggcacacgggcggctcaccctggacactgtgatgcgcatgggcaaggccagcgcccggggcttctgaaccgagcggggtgtttcatttttttgcttttccctgtcttaggctcccagtctttgactgccttcccatggcgatctataagttgaaagattttttttttttttaatcacctcatgatgatggagttaaaagtaaaccgtgcagaccctggggtccctgttgtacgctgcatcatcccgctggccctgtgccctggagggtgggcggctcatggtgccacagcccctggcagggacggccggcccgcccccgtgactgactgacagatgcagggatggccgaggcagccctcgctccagctgaacgcctccattgctgcttgttctggagacccccgcccccgcaccttccagacttagcagaagaacaaactgaagaacagacccagccagagaagcagggattccagaagctgcccattaagggagaaggagaggatccggtcggcagcagccctgagcagaaagctggaggggggactgtcgcggggtttttctgttgtggtttattttattaaattttttccttttttctattcatttcgatggacgcaatcttaagccaccctggccttgctcctgggaggtgagcgtgcacaggtgtgtgcaggtcaggaggtgccgtccaggtgtgcggcgagccgctgcgcacagatgtcaggatttccgtttgggtctagtttagaacctgtccttaaacctaggggttgctgtcaggatttgctttcagactttttttttttttgtaattccctttagagtctacaaaaatgtttttaaaaggatcaggtctgcttttagtttcatttttgtttctttcccgtcccactctttaaaaactggttccgtgaggaaaggcagaagccgttccgtgtctcttgcaggctgggccggcttcatgccagtgcgagggcgtcccgtgcccacgtacatacgtatgtctccatgagttctgggctccactggttccaattgagctccagccctggttttcctacccatgcagttagggactttaatttaattttttttttgtagggccaccgccttcaaacacaactgctacaacattctaataaaggctcatttaacccccag

SEQ ID NO: 316900 - DNA, 1065 bp, Homo sapiens
tctctgggtgtggggtttggacgcaccaggagaggtacttaataatgccttcacctggagcattattaagtacctctctgggtgtggggtttggacgcaccaggatagctattgattaatgttaagggtgttctacccacagcaaagcacaccctcttaaaccaggcactgcctgggtcctggtcccgagagccctaccaggatcaggttcctgcaagccgtcagaatgtgggagcccccagcccaactgattgtaactgtcccctgttacctgtgacatgaacctccaacagcacctggaaacggttccctctgtcagctgctctgtagacagggctggggagatctcagagttcacacctcgcctgttgtaggggaggttgggggtagggtttggaatggccaagtgcccttggaacctcccacagctatggccgtcctgacctcatcccaggaactctacggtgaccaggaaccacccctctgacgaggtctgtagcggcccttctcagagtggaacagcccacagtgctagttgtgcctggtcttacctgtactccacggacctcggtgaagcaaaagcttcagggcagagggaatgaggcaacccagtggcagccccgctgggccccgtggctcctgctctcctattggacgtagaggcaggggagagacttctctatacaaatattctcatcacagaagggatgatccttgctgctctgccgtagggtttttgatgctgagctatgctgcacatgacgttaacctaaagaacttggactgagcttttaaaaaaggacagcaaacaattttataatccttaaagtgtaatagacggttacactagtgcagggtattggggaggctctttgggtgtggaggctgtcacttgtatttattgtgactctaaatctttgatagtaaaacaaatgtaaaaagaaatgtttgccaccagatgggaatagaagttccaataagcaggctggaatgggtggctatacgttgtatcacgaggaagttttagactctgaaggataataaatggatgatgtgtcaactgga

SEQ ID NO: 316901 - DNA, 5975 bp, Homo sapiens
ttgagtggctctgcggcccgctcccatctaccattggcaggatgcctgtcagtcattccgtcccgcctcctcggacccgccccggccggcggcgcgatcccgagaaccagccggcccgcgcactcactggtcgtcatgcgctgtctgtcatgaagctggccacaccttccatggggtgcgggtcctgggagtcctggctggacctcattggcttgtggcgccttcactcggagagacgcgcctcaacccggaagtgtgcgaggcgaaatctgcctagcaaccggggaagccgggctgtgaagcgggcaatttcagtgtgagactgagccgcgagactgagctgcggctccgagcgctgcgcggcggctcctcccgcccagggtcagcgccccggcgcgcgcacgcgcacccccgccgcccgagcgcgccccgcgccgcccgcgcagtcggtcggtcggtcgtctgtcctgtcgccgctgccgccgccgccacagcggccgccgcgggcgccacctgagggagtcgcctccgcgggacgccacaagacctgaccggactgcgccgcccgaggccgtcggccgccgtcagcgagggcgccgagcaacttcgttcagaatgaccgaagaagcatgccgaacacggagtcagaaacgagcgcttgaacgggacccaacagaggacgatgtggagagcaagaaaataaaaatggagagaggattgttggcttcagatttaaacactgacggagacatgagggtgacacctgagccgggagcaggtccaacccaaggattgctgagggcaacagaggccacggccatggccatgggcagaggcgaagggctggtgggcgatgggcccgtggacatgcgcacctcacacagtgacatgaagtccgagaggagacccccctcacctgacgtgattgtgctctccgacaacgagcagccctcgagcccgagagtgaatgggctgaccacggtggccttgaaggagactagcaccgaggccctcatgaaaagcagtcctgaagaacgagaaaggatgatcaagcagctgaaggaagaattgaggttagaagaagcaaaactcgtgttgttgaaaaagttgcggcagagtcaaatacaaaaggaagccaccgcccagaagcccacaggttctgttgggagcaccgtgaccacccctcccccgcttgttcggggcactcagaacattcctgctggcaagccatcactccagacctcttcagctcggatgcccggcagtgtcatacccccgcccctggtccgaggtgggcagcaggcgtcctcgaagctggggccacaggcgagctcacaggtcgtcatgcccccactcgtcaggggggctcagcaaatccacagcattaggcaacattccagcacagggccaccgcccctcctcctggccccccgggcgtcggtgcccagtgtgcagattcagggacagaggatcatccagcagggcctcatccgcgtcgccaatgttcccaacaccagcctgctcgtcaacatcccacagcccaccccagcatcactgaaggggacaacagccacctccgctcaggccaactccacccccactagtgtggcctctgtggtcacctctgccgagtctccagcaagccgacaggcggccgccaagctggcgctgcgcaaacagctggagaagacgctactcgagatccccccacccaagcccccagccccagagatgaacttcctgcccagcgccgccaacaacgagttcatctacctggtcggcctggaggaggtggtgcagaacctactggagacacaagcaggcaggatgtcggccgccactgtgctgtcccgggagccctacatgtgtgcacagtgcaagacggacttcacgtgccgctggcgggaggagaagagcggcgccatcatgtgtgagaactgcatgacaaccaaccagaagaaggcgctcaaggtggagcacaccagccggctgaaggccgcctttgtgaaggcgctgcagcaggaacaggagattgagcagcggctcctgcagcagggcacggcccctgcacaggccaaggccgagcccaccgctgccccacaccccgtgctgaagcaggtcataaaaccccggcgtaagttggcgttccgctcaggagaggcccgcgactggagtaacggggctgtgctacaggcctccagccagctgtcccggggttcggccacgacgccccgaggtgtcctgcacacgttcagtccgtcacccaaactgcagaactcagcctcggccacagccctggtcagcaggaccggcagacattctgagagaaccgtgagcgccggcaagggcagcgccacctccaactggaagaagacgcccctcagcacaggcgggacccttgcgtttgtcagcccaagcctggcggtgcacaagagctcctcggccgtggaccgccagcgagagtacctcctggacatgatcccaccccgctccatcccccagtcagccacgtggaaatagtgcgagccaggccccgtggaagacgggctccctcctcccccacctggcccctggtctagaaggacccactgcaccaccctccgctggctcgggaagacaccgtgcccgccccaagagcaagcaccggccatgctgcagaggcaagacctcaattcttggctgcaaagtttcatcagggctagggggctggtgccgcctcataggcagacgaggatcatcgctgggggacctttcccgtgggctttcttcctttctctctttgcctttagtttgcccgacaccagcagaaaagtggaccttgggggctggttctgctcctggcccccttgttcagcccctgccggcacacgggcggctcaccctggacactgtgatgcgcatgggcaaggccagcgcccggggcttctgaaccgagcggggtgtttcatttttttgcttttccctgtcttaggctcccagtctttgactgccttcccatggcgatctataagttgaaagattttttttttttttaatcacctcatgatgatggagttaaaagtaaaccgtgcagaccctggggtccctgttgtacgctgcatcatcccgctggccctgtgccctggagggtgggcggctcatggtgccacagcccctggcagggacggccggcccgcccccgtgactgactgacagatgcagggatggccgaggcagccctcgctccagctgaacgcctccattgctgcttgttctggagacccccgcccccgcaccttccagacttagcagaagaacaaactgaagaacagacccagccagagaagcagggattccagaagctgcccattaagggagaaggagaggatccggtcggcagcagccctgagcagaaagctggaggggggactgtcgcggggtttttctgttgtggtttattttattaaattttttccttttttctattcatttcgatggacgcaatcttaagccaccctggccttgctcctgggaggtgagcgtgcacaggtgtgtgcaggtcaggaggtgccgtccaggtgtgcggcgagccgctgcgcacagatgtcaggatttccgtttgggtctagtttagaacctgtccttaaacctaggggttgctgtcaggatttgctttcagactttttttttttttgtaattccctttagagtctacaaaaatgtttttaaaaggatcaggtctgcttttagtttcatttttgtttctttcccgtcccactctttaaaaactggttccgtgaggaaaggcagaagccgttccgtgtctcttgcaggctgggccggcttcatgccagtgcgagggcgtcccgtgcccacgtacatacgtatgtctccatgagttctgggctccactggttccaattgagctccagccctggttttcctacccatgcagttagggactttaatttaattttttttttgtagggccaccgccttcaaacacaactgctacaacattctaataaaggctcatttaacccccaggctcctgtcgtgtgaatatcctcagtctgtaggaaactttttttgacacagcatagaagacctagttttggaaaacattatctaattttttgttgtgcaaatccccaaatttctcactaatttttgtttttttgtgcataacttggatgggctgaaggaggtgaggacagattggggaagggtggctttcattccaagatccagggatttggggaaaaggaaggaatttgatgttttttggggtgggaggggagggtgtgttttttacaccaaaaaaaaaaaaaaatcaagagtatgcaagcatttctattcctcgcatttttctgtgtgcctggcaaataaatacctgtctcctacgaccctgagctgttagccctctctgttccatgacaggggccagatcttccagctcctcccagaaggagcacccaggctggcttcttcccactgaaagccctccccagcgaaccaacctcagttctatgcagtggctggggatcaggcatccagaccgaagtcacctctgcctgctccagcttgggtcagctgggtctgaccagggggccagatccgagccgcacctgccggcccccagccccagctccagctcctgacctctcccagcctggcctggctgttcctccagggctgatggctgtcaacccatccttgtgagttcatatggactgctgcccctcgaaagggagagggtcggccccatgtccccagggagcattccatcagggacaacgtacatactgtgatgtaaacttttttttttccccccagggggcaaaagtgtgagatgccttaatctttccttcatttctgctgtctcgaacactctagcccattatttcctttcagttccttgcagcataacctctacgataagccccaagcgggttgttgtattatgacgtttatgatgttccaggtgaaggcattattaagtacctctctgggtgtggggtttggacgcaccaggatagctattgattaatgttaagggtgttctacccacagcaaagcacaccctcttaaaccaggcactgcctgggtcctggtcccgagagccctaccaggatcaggttcctgcaagccgtcagaatgtgggagcccccagcccaactgattgtaactgtcccctgttacctgtgacatgaacctccaacagcacctggaaacggttccctctgtcagctgctctgtagacagggctggggagatctcagagttcacacctcgcctgttgtaggggaggttgggggtagggtttggaatggccaagtgcccttggaacctcccacagctatggccgtcctgacctcatcccaggaactctacggtgaccaggaaccacccctctgacgaggtctgtagcggcccttctcagagtggaacagcccacagtgctagttgtgcctggtcttacctgtactccacggacctcggtgaagcaaaagcttcagggcagagggaatgaggcaacccagtggcagccccgctgggccccgtggctcctgctctcctattggacgtagaggcaggggagagacttctctatacaaatattctcatcacagaagggatgatccttgctgctctgccgtagggtttttgatgctgagctatgctgcacatgacgttaacctaaagaacttggactgagcttttaaaaaaggacagcaaacaattttataatccttaaagtgtaatagacggttacactagtgcagggtattggggaggctctttgggtgtggaggctgtcacttgtatttattgtgactctaaatctttgatagtaaaacaaatgtaaaaagaaatgtttgccaccagatgggaatagaagttccaataagcaggctggaatgggtggctatacgttgtatcacgaggaagttttagactctgaaggataataaatggatgatgtgtcaactgga

SEQ ID NO: 316902 - DNA, 5490 bp, Homo sapiens
acctctgcccacgcatccagtatgtgcagcacacctgctctgtgactgacactcttgcagaagtggggccacttcagggacatggacaaggtgttgtacctgctgtcacagagcctgttatctgttcagaatgaccgaagaagcatgccgaacacggagtcagaaacgagcgcttgaacgggacccaacagaggacgatgtggagagcaagaaaataaaaatggagagaggattgttggcttcagatttaaacactgacggagacatgagggtgacacctgagccgggagcaggtccaacccaaggattgctgagggcaacagaggccacggccatggccatgggcagaggcgaagggctggtgggcgatgggcccgtggacatgcgcacctcacacagtgacatgaagtccgagaggagacccccctcacctgacgtgattgtgctctccgacaacgagcagccctcgagcccgagagtgaatgggctgaccacggtggccttgaaggagactagcaccgaggccctcatgaaaagcagtcctgaagaacgagaaaggatgatcaagcagctgaaggaagaattgaggttagaagaagcaaaactcgtgttgttgaaaaagttgcggcagagtcaaatacaaaaggaagccaccgcccagaagcccacaggttctgttgggagcaccgtgaccacccctcccccgcttgttcggggcactcagaacattcctgctggcaagccatcactccagacctcttcagctcggatgcccggcagtgtcatacccccgcccctggtccgaggtgggcagcaggcgtcctcgaagctggggccacaggcgagctcacaggtcgtcatgcccccactcgtcaggggggctcagcaaatccacagcattaggcaacattccagcacagggccaccgcccctcctcctggccccccgggcgtcggtgcccagtgtgcagattcagggacagaggatcatccagcagggcctcatccgcgtcgccaatgttcccaacaccagcctgctcgtcaacatcccacagcccaccccagcatcactgaaggggacaacagccacctccgctcaggccaactccacccccactagtgtggcctctgtggtcacctctgccgagtctccagcaagccgacaggcggccgccaagctggcgctgcgcaaacagctggagaagacgctactcgagatccccccacccaagcccccagccccagagatgaacttcctgcccagcgccgccaacaacgagttcatctacctggtcggcctggaggaggtggtgcagaacctactggagacacaagcaggcaggatgtcggccgccactgtgctgtcccgggagccctacatgtgtgcacagtgcaagacggacttcacgtgccgctggcgggaggagaagagcggcgccatcatgtgtgagaactgcatgacaaccaaccagaagaaggcgctcaaggtggagcacaccagccggctgaaggccgcctttgtgaaggcgctgcagcaggaacaggagattgagcagcggctcctgcagcagggcacggcccctgcacaggccaaggccgagcccaccgctgccccacaccccgtgctgaagcaggtcataaaaccccggcgtaagttggcgttccgctcaggagaggcccgcgactggagtaacggggctgtgctacaggcctccagccagctgtcccggggttcggccacgacgccccgaggtgtcctgcacacgttcagtccgtcacccaaactgcagaactcagcctcggccacagccctggtcagcaggaccggcagacattctgagagaaccgtgagcgccggcaagggcagcgccacctccaactggaagaagacgcccctcagcacaggcgggacccttgcgtttgtcagcccaagcctggcggtgcacaagagctcctcggccgtggaccgccagcgagagtacctcctggacatgatcccaccccgctccatcccccagtcagccacgtggaaatagtgcgagccaggccccgtggaagacgggctccctcctcccccacctggcccctggtctagaaggacccactgcaccaccctccgctggctcgggaagacaccgtgcccgccccaagagcaagcaccggccatgctgcagaggcaagacctcaattcttggctgcaaagtttcatcagggctagggggctggtgccgcctcataggcagacgaggatcatcgctgggggacctttcccgtgggctttcttcctttctctctttgcctttagtttgcccgacaccagcagaaaagtggaccttgggggctggttctgctcctggcccccttgttcagcccctgccggcacacgggcggctcaccctggacactgtgatgcgcatgggcaaggccagcgcccggggcttctgaaccgagcggggtgtttcatttttttgcttttccctgtcttaggctcccagtctttgactgccttcccatggcgatctataagttgaaagattttttttttttttaatcacctcatgatgatggagttaaaagtaaaccgtgcagaccctggggtccctgttgtacgctgcatcatcccgctggccctgtgccctggagggtgggcggctcatggtgccacagcccctggcagggacggccggcccgcccccgtgactgactgacagatgcagggatggccgaggcagccctcgctccagctgaacgcctccattgctgcttgttctggagacccccgcccccgcaccttccagacttagcagaagaacaaactgaagaacagacccagccagagaagcagggattccagaagctgcccattaagggagaaggagaggatccggtcggcagcagccctgagcagaaagctggaggggggactgtcgcggggtttttctgttgtggtttattttattaaattttttccttttttctattcatttcgatggacgcaatcttaagccaccctggccttgctcctgggaggtgagcgtgcacaggtgtgtgcaggtcaggaggtgccgtccaggtgtgcggcgagccgctgcgcacagatgtcaggatttccgtttgggtctagtttagaacctgtccttaaacctaggggttgctgtcaggatttgctttcagactttttttttttttgtaattccctttagagtctacaaaaatgtttttaaaaggatcaggtctgcttttagtttcatttttgtttctttcccgtcccactctttaaaaactggttccgtgaggaaaggcagaagccgttccgtgtctcttgcaggctgggccggcttcatgccagtgcgagggcgtcccgtgcccacgtacatacgtatgtctccatgagttctgggctccactggttccaattgagctccagccctggttttcctacccatgcagttagggactttaatttaattttttttttgtagggccaccgccttcaaacacaactgctacaacattctaataaaggctcatttaacccccaggctcctgtcgtgtgaatatcctcagtctgtaggaaactttttttgacacagcatagaagacctagttttggaaaacattatctaattttttgttgtgcaaatccccaaatttctcactaatttttgtttttttgtgcataacttggatgggctgaaggaggtgaggacagattggggaagggtggctttcattccaagatccagggatttggggaaaaggaaggaatttgatgttttttggggtgggaggggagggtgtgttttttacaccaaaaaaaaaaaaaaatcaagagtatgcaagcatttctattcctcgcatttttctgtgtgcctggcaaataaatacctgtctcctacgaccctgagctgttagccctctctgttccatgacaggggccagatcttccagctcctcccagaaggagcacccaggctggcttcttcccactgaaagccctccccagcgaaccaacctcagttctatgcagtggctggggatcaggcatccagaccgaagtcacctctgcctgctccagcttgggtcagctgggtctgaccagggggccagatccgagccgcacctgccggcccccagccccagctccagctcctgacctctcccagcctggcctggctgttcctccagggctgatggctgtcaacccatccttgtgagttcatatggactgctgcccctcgaaagggagagggtcggccccatgtccccagggagcattccatcagggacaacgtacatactgtgatgtaaacttttttttttccccccagggggcaaaagtgtgagatgccttaatctttccttcatttctgctgtctcgaacactctagcccattatttcctttcagttccttgcagcataacctctacgataagccccaagcgggttgttgtattatgacgtttatgatgttccaggtgaaggcattattaagtacctctctgggtgtggggtttggacgcaccaggatagctattgattaatgttaagggtgttctacccacagcaaagcacaccctcttaaaccaggcactgcctgggtcctggtcccgagagccctaccaggatcaggttcctgcaagccgtcagaatgtgggagcccccagcccaactgattgtaactgtcccctgttacctgtgacatgaacctccaacagcacctggaaacggttccctctgtcagctgctctgtagacagggctggggagatctcagagttcacacctcgcctgttgtaggggaggttgggggtagggtttggaatggccaagtgcccttggaacctcccacagctatggccgtcctgacctcatcccaggaactctacggtgaccaggaaccacccctctgacgaggtctgtagcggcccttctcagagtggaacagcccacagtgctagttgtgcctggtcttacctgtactccacggacctcggtgaagcaaaagcttcagggcagagggaatgaggcaacccagtggcagccccgctgggccccgtggctcctgctctcctattggacgtagaggcaggggagagacttctctatacaaatattctcatcacagaagggatgatccttgctgctctgccgtagggtttttgatgctgagctatgctgcacatgacgttaacctaaagaacttggactgagcttttaaaaaaggacagcaaacaattttataatccttaaagtgtaatagacggttacactagtgcagggtattggggaggctctttgggtgtggaggctgtcacttgtatttattgtgactctaaatctttgatagtaaaacaaatgtaaaaagaaatgtttgccaccagatgggaatagaagttccaataagcaggctggaatgggtggctatacgttgtatcacgaggaagttttagactctgaaggataataaatggatgatgtgtcaactgga

SEQ ID NO: 316903 - DNA, 5150 bp, Homo sapiens
gctgaatctagaggataaaacaacggtagtgtggcccatggcttgcccacggcagacagtgacatgaagtccgagaggagacccccctcacctgacgtgattgtgctctccgacaacgagcagccctcgagcccgagagtgaatgggctgaccacggtggccttgaaggagactagcaccgaggccctcatgaaaagcagtcctgaagaacgagaaaggatgatcaagcagctgaaggaagaattgaggttagaagaagcaaaactcgtgttgttgaaaaagttgcggcagagtcaaatacaaaaggaagccaccgcccagaagcccacaggttctgttgggagcaccgtgaccacccctcccccgcttgttcggggcactcagaacattcctgctggcaagccatcactccagacctcttcagctcggatgcccggcagtgtcatacccccgcccctggtccgaggtgggcagcaggcgtcctcgaagctggggccacaggcgagctcacaggtcgtcatgcccccactcgtcaggggggctcagcaaatccacagcattaggcaacattccagcacagggccaccgcccctcctcctggccccccgggcgtcggtgcccagtgtgcagattcagggacagaggatcatccagcagggcctcatccgcgtcgccaatgttcccaacaccagcctgctcgtcaacatcccacagcccaccccagcatcactgaaggggacaacagccacctccgctcaggccaactccacccccactagtgtggcctctgtggtcacctctgccgagtctccagcaagccgacaggcggccgccaagctggcgctgcgcaaacagctggagaagacgctactcgagatccccccacccaagcccccagccccagagatgaacttcctgcccagcgccgccaacaacgagttcatctacctggtcggcctggaggaggtggtgcagaacctactggagacacaagcaggcaggatgtcggccgccactgtgctgtcccgggagccctacatgtgtgcacagtgcaagacggacttcacgtgccgctggcgggaggagaagagcggcgccatcatgtgtgagaactgcatgacaaccaaccagaagaaggcgctcaaggtggagcacaccagccggctgaaggccgcctttgtgaaggcgctgcagcaggaacaggagattgagcagcggctcctgcagcagggcacggcccctgcacaggccaaggccgagcccaccgctgccccacaccccgtgctgaagcaggtcataaaaccccggcgtaagttggcgttccgctcaggagaggcccgcgactggagtaacggggctgtgctacaggcctccagccagctgtcccggggttcggccacgacgccccgaggtgtcctgcacacgttcagtccgtcacccaaactgcagaactcagcctcggccacagccctggtcagcaggaccggcagacattctgagagaaccgtgagcgccggcaagggcagcgccacctccaactggaagaagacgcccctcagcacaggcgggacccttgcgtttgtcagcccaagcctggcggtgcacaagagctcctcggccgtggaccgccagcgagagtacctcctggacatgatcccaccccgctccatcccccagtcagccacgtggaaatagtgcgagccaggccccgtggaagacgggctccctcctcccccacctggcccctggtctagaaggacccactgcaccaccctccgctggctcgggaagacaccgtgcccgccccaagagcaagcaccggccatgctgcagaggcaagacctcaattcttggctgcaaagtttcatcagggctagggggctggtgccgcctcataggcagacgaggatcatcgctgggggacctttcccgtgggctttcttcctttctctctttgcctttagtttgcccgacaccagcagaaaagtggaccttgggggctggttctgctcctggcccccttgttcagcccctgccggcacacgggcggctcaccctggacactgtgatgcgcatgggcaaggccagcgcccggggcttctgaaccgagcggggtgtttcatttttttgcttttccctgtcttaggctcccagtctttgactgccttcccatggcgatctataagttgaaagattttttttttttttaatcacctcatgatgatggagttaaaagtaaaccgtgcagaccctggggtccctgttgtacgctgcatcatcccgctggccctgtgccctggagggtgggcggctcatggtgccacagcccctggcagggacggccggcccgcccccgtgactgactgacagatgcagggatggccgaggcagccctcgctccagctgaacgcctccattgctgcttgttctggagacccccgcccccgcaccttccagacttagcagaagaacaaactgaagaacagacccagccagagaagcagggattccagaagctgcccattaagggagaaggagaggatccggtcggcagcagccctgagcagaaagctggaggggggactgtcgcggggtttttctgttgtggtttattttattaaattttttccttttttctattcatttcgatggacgcaatcttaagccaccctggccttgctcctgggaggtgagcgtgcacaggtgtgtgcaggtcaggaggtgccgtccaggtgtgcggcgagccgctgcgcacagatgtcaggatttccgtttgggtctagtttagaacctgtccttaaacctaggggttgctgtcaggatttgctttcagactttttttttttttgtaattccctttagagtctacaaaaatgtttttaaaaggatcaggtctgcttttagtttcatttttgtttctttcccgtcccactctttaaaaactggttccgtgaggaaaggcagaagccgttccgtgtctcttgcaggctgggccggcttcatgccagtgcgagggcgtcccgtgcccacgtacatacgtatgtctccatgagttctgggctccactggttccaattgagctccagccctggttttcctacccatgcagttagggactttaatttaattttttttttgtagggccaccgccttcaaacacaactgctacaacattctaataaaggctcatttaacccccaggctcctgtcgtgtgaatatcctcagtctgtaggaaactttttttgacacagcatagaagacctagttttggaaaacattatctaattttttgttgtgcaaatccccaaatttctcactaatttttgtttttttgtgcataacttggatgggctgaaggaggtgaggacagattggggaagggtggctttcattccaagatccagggatttggggaaaaggaaggaatttgatgttttttggggtgggaggggagggtgtgttttttacaccaaaaaaaaaaaaaaatcaagagtatgcaagcatttctattcctcgcatttttctgtgtgcctggcaaataaatacctgtctcctacgaccctgagctgttagccctctctgttccatgacaggggccagatcttccagctcctcccagaaggagcacccaggctggcttcttcccactgaaagccctccccagcgaaccaacctcagttctatgcagtggctggggatcaggcatccagaccgaagtcacctctgcctgctccagcttgggtcagctgggtctgaccagggggccagatccgagccgcacctgccggcccccagccccagctccagctcctgacctctcccagcctggcctggctgttcctccagggctgatggctgtcaacccatccttgtgagttcatatggactgctgcccctcgaaagggagagggtcggccccatgtccccagggagcattccatcagggacaacgtacatactgtgatgtaaacttttttttttccccccagggggcaaaagtgtgagatgccttaatctttccttcatttctgctgtctcgaacactctagcccattatttcctttcagttccttgcagcataacctctacgataagccccaagcgggttgttgtattatgacgtttatgatgttccaggtgaaggcattattaagtacctctctgggtgtggggtttggacgcaccaggatagctattgattaatgttaagggtgttctacccacagcaaagcacaccctcttaaaccaggcactgcctgggtcctggtcccgagagccctaccaggatcaggttcctgcaagccgtcagaatgtgggagcccccagcccaactgattgtaactgtcccctgttacctgtgacatgaacctccaacagcacctggaaacggttccctctgtcagctgctctgtagacagggctggggagatctcagagttcacacctcgcctgttgtaggggaggttgggggtagggtttggaatggccaagtgcccttggaacctcccacagctatggccgtcctgacctcatcccaggaactctacggtgaccaggaaccacccctctgacgaggtctgtagcggcccttctcagagtggaacagcccacagtgctagttgtgcctggtcttacctgtactccacggacctcggtgaagcaaaagcttcagggcagagggaatgaggcaacccagtggcagccccgctgggccccgtggctcctgctctcctattggacgtagaggcaggggagagacttctctatacaaatattctcatcacagaagggatgatccttgctgctctgccgtagggtttttgatgctgagctatgctgcacatgacgttaacctaaagaacttggactgagcttttaaaaaaggacagcaaacaattttataatccttaaagtgtaatagacggttacactagtgcagggtattggggaggctctttgggtgtggaggctgtcacttgtatttattgtgactctaaatctttgatagtaaaacaaatgtaaaaagaaatgtttgccaccagatgggaatagaagttccaataagcaggctggaatgggtggctatacgttgtatcacgaggaagttttagactctgaaggataataaatggatgatgtgtcaactgga

SEQ ID NO: 316904 - DNA, 4799 bp, Homo sapiens
gaatttctgtccttagggttcagtctaccaggatggacagacacaacaggggagcggcaggtgggggcaaggctgtaggtgggcttgggctggccccgtgaatgtctgaccaccgctgtcaccgccatagcagcagggcagcttctccggaacttgtataaatgaagcgtgtcctccttgccccagacctgctgccctggcttctgagagcctgttatcatggctgggttcacttttgttaaggacgccatcgtcaagggtactggttagtgcagttgacaggacctcgggcttcggggcgctggggagccttcctctgggcaggcgcacggagcgccctgactgagtttttgtctcccaaagcccaccccagcatcactgaaggggacaacagccacctccgctcaggccaactccacccccactagtgtggcctctgtggtcacctctgccgagtctccagcaagccgacaggcggccgccaagctggcgctgcgcaaacagctggagaagacgctactcgagatccccccacccaagcccccagccccagagatgaacttcctgcccagcgccgccaacaacgagttcatctacctggtcggcctggaggaggtggtgcagaacctactggagacacaagcaggcaggatgtcggccgccactgtgctgtcccgggagccctacatgtgtgcacagtgcaagacggacttcacgtgccgctggcgggaggagaagagcggcgccatcatgtgtgagaactgcatgacaaccaaccagaagaaggcgctcaaggtggagcacaccagccggctgaaggccgcctttgtgaaggcgctgcagcaggaacaggagattgagcagcggctcctgcagcagggcacggcccctgcacaggccaaggccgagcccaccgctgccccacaccccgtgctgaagcaggtcataaaaccccggcgtaagttggcgttccgctcaggagaggcccgcgactggagtaacggggctgtgctacaggcctccagccagctgtcccggggttcggccacgacgccccgaggtgtcctgcacacgttcagtccgtcacccaaactgcagaactcagcctcggccacagccctggtcagcaggaccggcagacattctgagagaaccgtgagcgccggcaagggcagcgccacctccaactggaagaagacgcccctcagcacaggcgggacccttgcgtttgtcagcccaagcctggcggtgcacaagagctcctcggccgtggaccgccagcgagagtacctcctggacatgatcccaccccgctccatcccccagtcagccacgtggaaatagtgcgagccaggccccgtggaagacgggctccctcctcccccacctggcccctggtctagaaggacccactgcaccaccctccgctggctcgggaagacaccgtgcccgccccaagagcaagcaccggccatgctgcagaggcaagacctcaattcttggctgcaaagtttcatcagggctagggggctggtgccgcctcataggcagacgaggatcatcgctgggggacctttcccgtgggctttcttcctttctctctttgcctttagtttgcccgacaccagcagaaaagtggaccttgggggctggttctgctcctggcccccttgttcagcccctgccggcacacgggcggctcaccctggacactgtgatgcgcatgggcaaggccagcgcccggggcttctgaaccgagcggggtgtttcatttttttgcttttccctgtcttaggctcccagtctttgactgccttcccatggcgatctataagttgaaagattttttttttttttaatcacctcatgatgatggagttaaaagtaaaccgtgcagaccctggggtccctgttgtacgctgcatcatcccgctggccctgtgccctggagggtgggcggctcatggtgccacagcccctggcagggacggccggcccgcccccgtgactgactgacagatgcagggatggccgaggcagccctcgctccagctgaacgcctccattgctgcttgttctggagacccccgcccccgcaccttccagacttagcagaagaacaaactgaagaacagacccagccagagaagcagggattccagaagctgcccattaagggagaaggagaggatccggtcggcagcagccctgagcagaaagctggaggggggactgtcgcggggtttttctgttgtggtttattttattaaattttttccttttttctattcatttcgatggacgcaatcttaagccaccctggccttgctcctgggaggtgagcgtgcacaggtgtgtgcaggtcaggaggtgccgtccaggtgtgcggcgagccgctgcgcacagatgtcaggatttccgtttgggtctagtttagaacctgtccttaaacctaggggttgctgtcaggatttgctttcagactttttttttttttgtaattccctttagagtctacaaaaatgtttttaaaaggatcaggtctgcttttagtttcatttttgtttctttcccgtcccactctttaaaaactggttccgtgaggaaaggcagaagccgttccgtgtctcttgcaggctgggccggcttcatgccagtgcgagggcgtcccgtgcccacgtacatacgtatgtctccatgagttctgggctccactggttccaattgagctccagccctggttttcctacccatgcagttagggactttaatttaattttttttttgtagggccaccgccttcaaacacaactgctacaacattctaataaaggctcatttaacccccaggctcctgtcgtgtgaatatcctcagtctgtaggaaactttttttgacacagcatagaagacctagttttggaaaacattatctaattttttgttgtgcaaatccccaaatttctcactaatttttgtttttttgtgcataacttggatgggctgaaggaggtgaggacagattggggaagggtggctttcattccaagatccagggatttggggaaaaggaaggaatttgatgttttttggggtgggaggggagggtgtgttttttacaccaaaaaaaaaaaaaaatcaagagtatgcaagcatttctattcctcgcatttttctgtgtgcctggcaaataaatacctgtctcctacgaccctgagctgttagccctctctgttccatgacaggggccagatcttccagctcctcccagaaggagcacccaggctggcttcttcccactgaaagccctccccagcgaaccaacctcagttctatgcagtggctggggatcaggcatccagaccgaagtcacctctgcctgctccagcttgggtcagctgggtctgaccagggggccagatccgagccgcacctgccggcccccagccccagctccagctcctgacctctcccagcctggcctggctgttcctccagggctgatggctgtcaacccatccttgtgagttcatatggactgctgcccctcgaaagggagagggtcggccccatgtccccagggagcattccatcagggacaacgtacatactgtgatgtaaacttttttttttccccccagggggcaaaagtgtgagatgccttaatctttccttcatttctgctgtctcgaacactctagcccattatttcctttcagttccttgcagcataacctctacgataagccccaagcgggttgttgtattatgacgtttatgatgttccaggtgaaggcattattaagtacctctctgggtgtggggtttggacgcaccaggatagctattgattaatgttaagggtgttctacccacagcaaagcacaccctcttaaaccaggcactgcctgggtcctggtcccgagagccctaccaggatcaggttcctgcaagccgtcagaatgtgggagcccccagcccaactgattgtaactgtcccctgttacctgtgacatgaacctccaacagcacctggaaacggttccctctgtcagctgctctgtagacagggctggggagatctcagagttcacacctcgcctgttgtaggggaggttgggggtagggtttggaatggccaagtgcccttggaacctcccacagctatggccgtcctgacctcatcccaggaactctacggtgaccaggaaccacccctctgacgaggtctgtagcggcccttctcagagtggaacagcccacagtgctagttgtgcctggtcttacctgtactccacggacctcggtgaagcaaaagcttcagggcagagggaatgaggcaacccagtggcagccccgctgggccccgtggctcctgctctcctattggacgtagaggcaggggagagacttctctatacaaatattctcatcacagaagggatgatccttgctgctctgccgtagggtttttgatgctgagctatgctgcacatgacgttaacctaaagaacttggactgagcttttaaaaaaggacagcaaacaattttataatccttaaagtgtaatagacggttacactagtgcagggtattggggaggctctttgggtgtggaggctgtcacttgtatttattgtgactctaaatctttgatagtaaaacaaatgtaaaaagaaatgtttgccaccagatgggaatagaagttccaataagcaggctggaatgggtggctatacgttgtatcacgaggaagttttagactctgaaggataataaatggatgatgtgtcaactgga

SEQ ID NO: 316905 - DNA, 6224 bp, Homo sapiens
  misc_feature (6168)..(6168): n is a, c, g, or t
ttgagtggctctgcggcccgctcccatctaccattggcaggatgcctgtcagtcattccgtcccgcctcctcggacccgccccggccggcggcgcgatcccgagaaccagccggcccgcgcactcactggtcgtcatgcgctgtctgtcatgaagctggccacaccttccatggggtgcgggtcctgggagtcctggctggacctcattggcttgtggcgccttcactcggagagacgcgcctcaacccggaagtgtgcgaggcgaaatctgcctagcaaccggggaagccgggctgtgaagcgggcaatttcagtgtgagactgagccgcgagactgagctgcggctccgagcgctgcgcggcggctcctcccgcccagggtcagcgccccggcgcgcgcacgcgcacccccgccgcccgagcgcgccccgcgccgcccgcgcagtcggtcggtcggtcgtctgtcctgtcgccgctgccgccgccgccacagcggccgccgcgggcgccacctgagggagtcgcctccgcgggacgccacaagacctgaccggactgcgccgcccgaggccgtcggccgccgtcagcgagggcgccgagcaacttcgttcagaatgaccgaagaagcatgccgaacacggagtcagaaacgagcgcttgaacgggacccaacagaggacgatgtggagagcaagaaaataaaaatggagagaggattgttggcttcagatttaaacactgacggagacatgagggtgacacctgagccgggagcaggtccaacccaaggattgctgagggcaacagaggccacggccatggccatgggcagaggcgaagggctggtgggcgatgggcccgtggacatgcgcacctcacacagtgacatgaagtccgagaggagacccccctcacctgacgtgattgtgctctccgacaacgagcagccctcgagcccgagagtgaatgggctgaccacggtggccttgaaggagactagcaccgaggccctcatgaaaagcagtcctgaagaacgagaaaggatgatcaagcagctgaaggaagaattgaggttagaagaagcaaaactcgtgttgttgaaaaagttgcggcagagtcaaatacaaaaggaagccaccgcccagaagcccacaggttctgttgggagcaccgtgaccacccctcccccgcttgttcggggcactcagaacattcctgctggcaagccatcactccagacctcttcagctcggatgcccggcagtgtcatacccccgcccctggtccgaggtgggcagcaggcgtcctcgaagctggggccacaggcgagctcacaggtcgtcatgcccccactcgtcaggggggctcagcaaatccacagcattaggcaacattccagcacagggccaccgcccctcctcctggccccccgggcgtcggtgcccagtgtgcagattcagggacagaggatcatccagcagggcctcatccgcgtcgccaatgttcccaacaccagcctgctcgtcaacatcccacagcccaccccagcatcactgaaggggacaacagccacctccgctcaggccaactccacccccactagtgtggcctctgtggtcacctctgccgagtctccagcaagccgacaggcggccgccaagctggcgctgcgcaaacagctggagaagacgctactcgagatccccccacccaagcccccagccccagagatgaacttcctgcccagcgccgccaacaacgagttcatctacctggtcggcctggaggaggtggtgcagaacctactggagacacaagcaggcaggatgtcggccgccactgtgctgtcccgggagccctacatgtgtgcacagtgcaagacggacttcacgtgccgctggcgggaggagaagagcggcgccatcatgtgtgagaactgcatgacaaccaaccagaagaaggcgctcaaggtggagcacaccagccggctgaaggccgcctttgtgaaggcgctgcagcaggaacaggagattgagcagcggctcctgcagcagggcacggcccctgcacaggccaaggccgagcccaccgctgccccacaccccgtgctgaagcaggtcataaaaccccggcgtaagttggcgttccgctcaggagaggcccgcgactggagtaacggggctgtgctacaggcctccagccagctgtcccggggttcggccacgacgccccgaggtgtcctgcacacgttcagtccgtcacccaaactgcagaactcagcctcggccacagccctggtcagcaggaccggcagacattctgagagaaccgtgagcgccggcaagggcagcgccacctccaactggaagaagacgcccctcagcacaggcgggacccttgcgtttgtcagcccaagcctggcggtgcacaagagctcctcggccgtggaccgccagcgagagtacctcctggacatgatcccaccccgctccatcccccagtcagccacgtggaaatagtgcgagccaggccccgtggaagacgggctccctcctcccccacctggcccctggtctagaaggacccactgcaccaccctccgctggctcgggaagacaccgtgcccgccccaagagcaagcaccggccatgctgcagaggcaagacctcaattcttggctgcaaagtttcatcagggctagggggctggtgccgcctcataggcagacgaggatcatcgctgggggacctttcccgtgggctttcttcctttctctctttgcctttagtttgcccgacaccagcagaaaagtggaccttgggggctggttctgctcctggcccccttgttcagcccctgccggcacacgggcggctcaccctggacactgtgatgcgcatgggcaaggccagcgcccggggcttctgaaccgagcggggtgtttcatttttttgcttttccctgtcttaggctcccagtctttgactgccttcccatggcgatctataagttgaaagattttttttttttttaatcacctcatgatgatggagttaaaagtaaaccgtgcagaccctggggtccctgttgtacgctgcatcatcccgctggccctgtgccctggagggtgggcggctcatggtgccacagcccctggcagggacggccggcccgcccccgtgactgactgacagatgcagggatggccgaggcagccctcgctccagctgaacgcctccattgctgcttgttctggagacccccgcccccgcaccttccagacttagcagaagaacaaactgaagaacagacccagccagagaagcagggattccagaagctgcccattaagggagaaggagaggatccggtcggcagcagccctgagcagaaagctggaggggggactgtcgcggggtttttctgttgtggtttattttattaaattttttccttttttctattcatttcgatggacgcaatcttaagccaccctggccttgctcctgggaggtgagcgtgcacaggtgtgtgcaggtcaggaggtgccgtccaggtgtgcggcgagccgctgcgcacagatgtcaggatttccgtttgggtctagtttagaacctgtccttaaacctaggggttgctgtcaggatttgctttcagactttttttttttttgtaattccctttagagtctacaaaaatgtttttaaaaggatcaggtctgcttttagtttcatttttgtttctttcccgtcccactctttaaaaactggttccgtgaggaaaggcagaagccgttccgtgtctcttgcaggctgggccggcttcatgccagtgcgagggcgtcccgtgcccacgtacatacgtatgtctccatgagttctgggctccactggttccaattgagctccagccctggttttcctacccatgcagttagggactttaatttaattttttttttgtagggccaccgccttcaaacacaactgctacaacattctaataaaggctcatttaacccccaggctcctgtcgtgtgaatatcctcagtctgtaggaaactttttttgacacagcatagaagacctagttttggaaaacattatctaattttttgttgtgcaaatccccaaatttctcactaatttttgtttttttgtgcataacttggatgggctgaaggaggtgaggacagattggggaagggtggctttcattccaagatccagggatttggggaaaaggaaggaatttgatgttttttggggtgggaggggagggtgtgttttttacaccaaaaaaaaaaaaaaatcaagagtatgcaagcatttctattcctcgcatttttctgtgtgcctggcaaataaatacctgtctcctacgaccctgagctgttagccctctctgttccatgacaggggccagatcttccagctcctcccagaaggagcacccaggctggcttcttcccactgaaagccctccccagcgaaccaacctcagttctatgcagtggctggggatcaggcatccagaccgaagtcacctctgcctgctccagcttgggtcagctgggtctgaccagggggccagatccgagccgcacctgccggcccccagccccagctccagctcctgacctctcccagcctggcctggctgttcctccagggctgatggctgtcaacccatccttgtgagttcatatggactgctgcccctcgaaagggagagggtcggccccatgtccccagggagcattccatcagggacaacgtacatactgtgatgtaaacttttttttttccccccagggggcaaaagtgtgagatgccttaatctttccttcatttctgctgtctcgaacactctagcccattatttcctttcagttccttgcagcataacctctacgataagccccaagcgggttgttgtattatgacgtttatgatgttccaggtgaaggcattattaagtacctctctgggtgtggggtttggacgcaccaggatagctattgattaatgttaagggtgttctacccacagcaaagcacaccctcttaaaccaggcactgcctgggtcctggtcccgagagccctaccaggatcaggttcctgcaagccgtcagaatgtgggagcccccagcccaactgattgtaactgtcccctgttacctgtgacatgaacctccaacagcacctggaaacggttccctctgtcagctgctctgtagacagggctggggagatctcagagttcacacctcgcctgttgtaggggaggttgggggtagggtttggaatggccaagtgcccttggaacctcccacagctatggccgtcctgacctcatcccaggaactctacggtgaccaggaaccacccctctgacgaggtctgtagcggcccttctcagagtggaacagcccacagtgctagttgtgcctggtcttacctgtactccacggacctcggtgaagcaaaagcttcagggcagagggaatgaggcaacccagtggcagccccgctgggccccgtggctcctgctctcctattggacgtagaggcaggggagagacttctctatacaaatattctcatcacagaagggatgatccttgctgctctgccgtagggtttttgatgctgagctatgctgcacatgacgttaacctaaagaacttggactgagcttttaaaaaaggacagcaaacaattttataatccttaaagtgtaatagacggttacactagtgcagggtattggggaggctctttgggtgtggaggctgtcacttgtatttattgtgactctaaatctttgatagtaaaacaaatgtaaaaagaaatgtttgccaccagatgggaatagaagttccaataagcaggctggaatgggtggctatacgttgtatcacgaggaagttttagactctgaaggataataaatggatgatgtgtcaactggaccacgaggagggcggtcggtgcttccctcctcgggctgtgggcacatggggccccgcaggttccttggaggagccctgagctgggaggcagcaaaggctgacctatcaaagcctcccggaggccaccgtgctgggtaccaggactcacctctgacaagcaggagaaggtaagggcccggtcagctccaaaggnaccctccacgcgcgtgcacacagcttccctggtaataaagagctggcatctttctt

SEQ ID NO: 316906 - DNA, 5049 bp, Homo sapiens
ttgagtggctctgcggcccgctcccatctaccattggcaggatgcctgtcagtcattccgtcccgcctcctcggacccgccccggccggcggcgcgatcccgagaaccagccggcccgcgcactcactggtcgtcatgcgctgtctgtcatgaagctggccacaccttccatggggtgcgggtcctgggagtcctggctggacctcattggcttgtggcgccttcactcggagagacgcgcctcaacccggaagtgtgcgaggcgaaatctgcctagcaaccggggaagccgggctgtgaagcgggcaatttcagtgtgagactgagccgcgagactgagctgcggctccgagcgctgcgcggcggctcctcccgcccagggtcagcgccccggcgcgcgcacgcgcacccccgccgcccgagcgcgccccgcgccgcccgcgcagtcggtcggtcggtcgtctgtcctgtcgccgctgccgccgccgccacagcggccgccgcgggcgccacctgagggagtcgcctccgcgggacgccacaagacctgaccggactgcgccgcccgaggccgtcggccgccgtcagcgagggcgccgagcaacttcgttcagaatgaccgaagaagcatgccgaacacggagtcagaaacgagcgcttgaacgggacccaacagaggacgatgtggagagcaagaaaataaaaatggagagaggattgttggcttcagatttaaacactgacggagacatgagggtgacacctgagccgggagcaggtccaacccaaggattgctgagggcaacagaggccacggccatggccatgggcagaggcgaagggctggtgggcgatgggcccgtggacatgcgcacctcacacagtgacatgaagtccgagaggagacccccctcacctgacgtgattgtgctctccgacaacgagcagccctcgagcccgagagtgaatgggctgaccacggtggccttgaaggagactagcaccgaggccctcatgaaaagcagtcctgaagaacgagaaaggatgatcaagcagctgaaggaagaattgaggttagaagaagcaaaactcgtgttgttgaaaaagttgcggcagagtcaaatacaaaaggaagccaccgcccagaagcccacaggttctgttgggagcaccgtgaccacccctcccccgcttgttcggggcactcagaacattcctgctggcaagccatcactccagacctcttcagctcggatgcccggcagtgtcatacccccgcccctggtccgaggtgggcagcaggcgtcctcgaagctggggccacaggcgagctcacaggtcgtcatgcccccactcgtcaggggggctcagcaaatccacagcattaggcaacattccagcacagggccaccgcccctcctcctggccccccgggcgtcggtgcccagtgtgcagattcagggacagaggatcatccagcagggcctcatccgcgtcgccaatgttcccaacaccagcctgctcgtcaacatcccacagcccaccccagcatcactgaaggggacaacagccacctccgctcaggccaactccacccccactagtgtggcctctgtggtcacctctgccgagtctccagcaagccgacaggcggccgccaagctggcgctgcgcaaacagctggagaagacgctactcgagatccccccacccaacaccggccatgctgcagaggcaagacctcaattcttggctgcaaagtttcatcagggctagggggctggtgccgcctcataggcagacgaggatcatcgctgggggacctttcccgtgggctttcttcctttctctctttgcctttagtttgcccgacaccagcagaaaagtggaccttgggggctggttctgctcctggcccccttgttcagcccctgccggcacacgggcggctcaccctggacactgtgatgcgcatgggcaaggccagcgcccggggcttctgaaccgagcggggtgtttcatttttttgcttttccctgtcttaggctcccagtctttgactgccttcccatggcgatctataagttgaaagattttttttttttttaatcacctcatgatgatggagttaaaagtaaaccgtgcagaccctggggtccctgttgtacgctgcatcatcccgctggccctgtgccctggagggtgggcggctcatggtgccacagcccctggcagggacggccggcccgcccccgtgactgactgacagatgcagggatggccgaggcagccctcgctccagctgaacgcctccattgctgcttgttctggagacccccgcccccgcaccttccagacttagcagaagaacaaactgaagaacagacccagccagagaagcagggattccagaagctgcccattaagggagaaggagaggatccggtcggcagcagccctgagcagaaagctggaggggggactgtcgcggggtttttctgttgtggtttattttattaaattttttccttttttctattcatttcgatggacgcaatcttaagccaccctggccttgctcctgggaggtgagcgtgcacaggtgtgtgcaggtcaggaggtgccgtccaggtgtgcggcgagccgctgcgcacagatgtcaggatttccgtttgggtctagtttagaacctgtccttaaacctaggggttgctgtcaggatttgctttcagactttttttttttttgtaattccctttagagtctacaaaaatgtttttaaaaggatcaggtctgcttttagtttcatttttgtttctttcccgtcccactctttaaaaactggttccgtgaggaaaggcagaagccgttccgtgtctcttgcaggctgggccggcttcatgccagtgcgagggcgtcccgtgcccacgtacatacgtatgtctccatgagttctgggctccactggttccaattgagctccagccctggttttcctacccatgcagttagggactttaatttaattttttttttgtagggccaccgccttcaaacacaactgctacaacattctaataaaggctcatttaacccccaggctcctgtcgtgtgaatatcctcagtctgtaggaaactttttttgacacagcatagaagacctagttttggaaaacattatctaattttttgttgtgcaaatccccaaatttctcactaatttttgtttttttgtgcataacttggatgggctgaaggaggtgaggacagattggggaagggtggctttcattccaagatccagggatttggggaaaaggaaggaatttgatgttttttggggtgggaggggagggtgtgttttttacaccaaaaaaaaaaaaaaatcaagagtatgcaagcatttctattcctcgcatttttctgtgtgcctggcaaataaatacctgtctcctacgaccctgagctgttagccctctctgttccatgacaggggccagatcttccagctcctcccagaaggagcacccaggctggcttcttcccactgaaagccctccccagcgaaccaacctcagttctatgcagtggctggggatcaggcatccagaccgaagtcacctctgcctgctccagcttgggtcagctgggtctgaccagggggccagatccgagccgcacctgccggcccccagccccagctccagctcctgacctctcccagcctggcctggctgttcctccagggctgatggctgtcaacccatccttgtgagttcatatggactgctgcccctcgaaagggagagggtcggccccatgtccccagggagcattccatcagggacaacgtacatactgtgatgtaaacttttttttttccccccagggggcaaaagtgtgagatgccttaatctttccttcatttctgctgtctcgaacactctagcccattatttcctttcagttccttgcagcataacctctacgataagccccaagcgggttgttgtattatgacgtttatgatgttccaggtgaaggcattattaagtacctctctgggtgtggggtttggacgcaccaggatagctattgattaatgttaagggtgttctacccacagcaaagcacaccctcttaaaccaggcactgcctgggtcctggtcccgagagccctaccaggatcaggttcctgcaagccgtcagaatgtgggagcccccagcccaactgattgtaactgtcccctgttacctgtgacatgaacctccaacagcacctggaaacggttccctctgtcagctgctctgtagacagggctggggagatctcagagttcacacctcgcctgttgtaggggaggttgggggtagggtttggaatggccaagtgcccttggaacctcccacagctatggccgtcctgacctcatcccaggaactctacggtgaccaggaaccacccctctgacgaggtctgtagcggcccttctcagagtggaacagcccacagtgctagttgtgcctggtcttacctgtactccacggacctcggtgaagcaaaagcttcagggcagagggaatgaggcaacccagtggcagccccgctgggccccgtggctcctgctctcctattggacgtagaggcaggggagagacttctctatacaaatattctcatcacagaagggatgatccttgctgctctgccgtagggtttttgatgctgagctatgctgcacatgacgttaacctaaagaacttggactgagcttttaaaaaaggacagcaaacaattttataatccttaaagtgtaatagacggttacactagtgcagggtattggggaggctctttgggtgtggaggctgtcacttgtatttattgtgactctaaatctttgatagtaaaacaaatgtaaaaagaaatgtttgccaccagatgggaatagaagttccaataagcaggctggaatgggtggctatacgttgtatcacgaggaagttttagactctgaaggataataaatggatgatgtgtcaactgga

SEQ ID NO: 316907 - DNA, 4212 bp, Homo sapiens
ttgagtggctctgcggcccgctcccatctaccattggcaggatgcctgtcagtcattccgtcccgcctcctcggacccgccccggccggcggcgcgatcccgagaaccagccggcccgcgcactcactggtcgtcatgcgctgtctgtcatgaagctggccacaccttccatggggtgcgggtcctgggagtcctggctggacctcattggcttgtggcgccttcactcggagagacgcgcctcaacccggaagtgtgcgaggcgaaatctgcctagcaaccggggaagccgggctgtgaagcgggcaatttcagtgtgagactgagccgcgagactgagctgcggctccgagcgctgcgcggcggctcctcccgcccagggtcagcgccccggcgcgcgcacgcgcacccccgccgcccgagcgcgccccgcgccgcccgcgcagtcggtcggtcggtcgtctgtcctgtcgccgctgccgccgccgccacagcggccgccgcgggcgccacctgagggagtcgcctccgcgggacgccacaagacctgaccggactgcgccgcccgaggccgtcggccgccgtcagcgagggcgccgagcaacttcgttcagaatgaccgaagaagcatgccgaacacggagtcagaaacgagcgcttgaacgggacccaacagaggacgatgtggagagcaagaaaataaaaatggagagaggattgttggcttcagatttaaacactgacggagacatgagggtgacacctgagccgggagcaggtccaacccaaggattgctgagggcaacagaggccacggccatggccatgggcagaggcgaagggctggtgggcgatgggcccgtggacatgcgcacctcacacagtgacatgaagtccgagaggagacccccctcacctgacgtgattgtgctctccgacaacgagcagccctcgagcccgagagtgaatgggctgaccacggtggccttgaaggagactagcaccgaggccctcatgaaaagcagtcctgaagaacgagaaaggatgatcaagcagctgaaggaagaattgaggttagaagaagcaaaactcgtgttgttgaaaaagttgcggcagagtcaaatacaaaaggaagccaccgcccagaagcccacaggttctgttgggagcaccgtgaccacccctcccccgcttgttcggggcactcagaacattcctgctggcaagccatcactccagacctcttcagctcggatgcccggcagtgtcatacccccgcccctggtccgaggtgggcagcaggcgtcctcgaagctggggccacaggcgagctcacaggtcgtcatgcccccactcgtcaggggggctcagcaaatccacagcattaggcaacattccagcacagggccaccgcccctcctcctggccccccgggcgtcggtgcccagtgtgcagattcagggacagaggatcatccagcagggcctcatccgcgtcgccaatgttcccaacaccagcctgctcgtcaacatcccacagcccaccccagcatcactgaaggggacaacagccacctccgctcaggccaactccacccccactagtgtggcctctgtggtcacctctgccgagtctccagcaagccgacaggcggccgccaagctggcgctgcgcaaacagctggagaagacgctactcgagatccccccacccaagcccccagccccagagatgaacttcctgcccagcgccgccaacaacgagttcatctacctggtcggcctggaggaggtggtgcagaacctactggagacacaagatgtcaggatttccgtttgggtctagtttagaacctgtccttaaacctaggggttgctgtcaggatttgctttcagactttttttttttttgtaattccctttagagtctacaaaaatgtttttaaaaggatcaggtctgcttttagtttcatttttgtttctttcccgtcccactctttaaaaactggttccgtgaggaaaggcagaagccgttccgtgtctcttgcaggctgggccggcttcatgccagtgcgagggcgtcccgtgcccacgtacatacgtatgtctccatgagttctgggctccactggttccaattgagctccagccctggttttcctacccatgcagttagggactttaatttaattttttttttgtagggccaccgccttcaaacacaactgctacaacattctaataaaggctcatttaacccccaggctcctgtcgtgtgaatatcctcagtctgtaggaaactttttttgacacagcatagaagacctagttttggaaaacattatctaattttttgttgtgcaaatccccaaatttctcactaatttttgtttttttgtgcataacttggatgggctgaaggaggtgaggacagattggggaagggtggctttcattccaagatccagggatttggggaaaaggaaggaatttgatgttttttggggtgggaggggagggtgtgttttttacaccaaaaaaaaaaaaaaatcaagagtatgcaagcatttctattcctcgcatttttctgtgtgcctggcaaataaatacctgtctcctacgaccctgagctgttagccctctctgttccatgacaggggccagatcttccagctcctcccagaaggagcacccaggctggcttcttcccactgaaagccctccccagcgaaccaacctcagttctatgcagtggctggggatcaggcatccagaccgaagtcacctctgcctgctccagcttgggtcagctgggtctgaccagggggccagatccgagccgcacctgccggcccccagccccagctccagctcctgacctctcccagcctggcctggctgttcctccagggctgatggctgtcaacccatccttgtgagttcatatggactgctgcccctcgaaagggagagggtcggccccatgtccccagggagcattccatcagggacaacgtacatactgtgatgtaaacttttttttttccccccagggggcaaaagtgtgagatgccttaatctttccttcatttctgctgtctcgaacactctagcccattatttcctttcagttccttgcagcataacctctacgataagccccaagcgggttgttgtattatgacgtttatgatgttccaggtgaaggcattattaagtacctctctgggtgtggggtttggacgcaccaggatagctattgattaatgttaagggtgttctacccacagcaaagcacaccctcttaaaccaggcactgcctgggtcctggtcccgagagccctaccaggatcaggttcctgcaagccgtcagaatgtgggagcccccagcccaactgattgtaactgtcccctgttacctgtgacatgaacctccaacagcacctggaaacggttccctctgtcagctgctctgtagacagggctggggagatctcagagttcacacctcgcctgttgtaggggaggttgggggtagggtttggaatggccaagtgcccttggaacctcccacagctatggccgtcctgacctcatcccaggaactctacggtgaccaggaaccacccctctgacgaggtctgtagcggcccttctcagagtggaacagcccacagtgctagttgtgcctggtcttacctgtactccacggacctcggtgaagcaaaagcttcagggcagagggaatgaggcaacccagtggcagccccgctgggccccgtggctcctgctctcctattggacgtagaggcaggggagagacttctctatacaaatattctcatcacagaagggatgatccttgctgctctgccgtagggtttttgatgctgagctatgctgcacatgacgttaacctaaagaacttggactgagcttttaaaaaaggacagcaaacaattttataatccttaaagtgtaatagacggttacactagtgcagggtattggggaggctctttgggtgtggaggctgtcacttgtatttattgtgactctaaatctttgatagtaaaacaaatgtaaaaagaaatgtttgccaccagatgggaatagaagttccaataagcaggctggaatgggtggctatacgttgtatcacgaggaagttttagactctgaaggataataaatggatgatgtgtcaactgga

SEQ ID NO: 316908 - DNA, 4135 bp, Homo sapiens
  misc_feature (3903)..(3905): n is a, c, g, or t
  misc_feature (3924)..(3924): n is a, c, g, or t
  misc_feature (3930)..(3930): n is a, c, g, or t
  misc_feature (3935)..(3935): n is a, c, g, or t
  misc_feature (3947)..(3947): n is a, c, g, or t
  misc_feature (3958)..(3958): n is a, c, g, or t
  misc_feature (3963)..(3963): n is a, c, g, or t
  misc_feature (3966)..(3966): n is a, c, g, or t
  misc_feature (3968)..(3968): n is a, c, g, or t
  misc_feature (3975)..(3975): n is a, c, g, or t
  misc_feature (3992)..(3992): n is a, c, g, or t
  misc_feature (4016)..(4016): n is a, c, g, or t
  misc_feature (4020)..(4020): n is a, c, g, or t
  misc_feature (4022)..(4023): n is a, c, g, or t
  misc_feature (4035)..(4035): n is a, c, g, or t
  misc_feature (4041)..(4041): n is a, c, g, or t
  misc_feature (4046)..(4046): n is a, c, g, or t
  misc_feature (4064)..(4064): n is a, c, g, or t
  misc_feature (4068)..(4068): n is a, c, g, or t
  misc_feature (4070)..(4071): n is a, c, g, or t
  misc_feature (4079)..(4079): n is a, c, g, or t
  misc_feature (4086)..(4086): n is a, c, g, or t
  misc_feature (4090)..(4090): n is a, c, g, or t
  misc_feature (4103)..(4103): n is a, c, g, or t
  misc_feature (4108)..(4108): n is a, c, g, or t
  misc_feature (4110)..(4110): n is a, c, g, or t
  misc_feature (4122)..(4123): n is a, c, g, or t
  misc_feature (4132)..(4132): n is a, c, g, or t
ttgagtggctctgcggcccgctcccatctaccattggcaggatgcctgtcagtcattccgtcccgcctcctcggacccgccccggccggcggcgcgatcccgagaaccagccggcccgcgcactcactggtcgtcatgcgctgtctgtcatgaagctggccacaccttccatggggtgcgggtcctgggagtcctggctggacctcattggcttgtggcgccttcactcggagagacgcgcctcaacccggaagtgtgcgaggcgaaatctgcctagcaaccggggaagccgggctgtgaagcgggcaatttcagtgtgagactgagccgcgagactgagctgcggctccgagcgctgcgcggcggctcctcccgcccagggtcagcgccccggcgcgcgcacgcgcacccccgccgcccgagcgcgccccgcgccgcccgcgcagtcggtcggtcggtcgtctgtcctgtcgccgctgccgccgccgccacagcggccgccgcgggcgccacctgagggagtcgcctccgcgggacgccacaagacctgaccggactgcgccgcccgaggccgtcggccgccgtcagcgagggcgccgagcaacttcgttcagaatgaccgaagaagcatgccgaacacggagtcagaaacgagcgcttgaacgggacccaacagaggacgatgtggagagcaagaaaataaaaatggagagaggattgttggcttcagatttaaacactgacggagacatgagggtgacacctgagccgggagcaggtccaacccaaggattgctgagggcaacagaggccacggccatggccatgggcagaggcgaagggctggtgggcgatgggcccgtggacatgcgcacctcacacagtgacatgaagtccgagaggagacccccctcacctgacgtgattgtgctctccgacaacgagcagccctcgagcccgagagtgaatgggctgaccacggtggccttgaaggagactagcaccgaggccctcatgaaaagcagtcctgaagaacgagaaaggatgatcaagcagctgaaggaagaattgaggttagaagaagcaaaactcgtgttgttgaaaaagttgcggcagagtcaaatacaaaaggaagccaccgcccagaagcccacaggttctgttgggagcaccgtgaccacccctcccccgcttgttcggggcactcagaacattcctgctggcaagccatcactccagacctcttcagctcggatgcccggcagtgtcatacccccgcccctggtccgaggtgggcagcaggcgtcctcgaagctggggccacaggcgagctcacaggtcgtcatgcccccactcgtcaggggggctcagcaaatccacagcattaggcaacattccagcacagggccaccgcccctcctcctggccccccgggcgtcggtgcccagtgtgcagattcagggacagaggatcatccagcagggcctcatccgcgtcgccaatgttcccaacaccagcctgctcgtcaacatcccacagcccaccccagcatcactgaaggggacaacagccacctccgctcaggccaactccacccccactagtgtggcctctgtggtcacctctgccgagtctccagcaagccgacaggcggccgccaagctggcgctgcgcaaacagctggagaagacgctactcgagatccccccacccaagcccccagccccagagatgaacttcctgcccagcgccgccaacaacgagttcatctacctggtcggcctggaggaggtggtgcagaacctactggagacacaagcaggcaggatgtcggccgccactgtgctgtcccgggagccctacatgtgtgcacagtgcaagacggacttcacgtgccgctggcgggaggagaagagcggcgccatcatgtgtgagaactgcatgacaaccaaccagaagaaggcgctcaaggtggagcacaccagccggctgaaggccgcctttgtgaaggcgctgcagcaggaacaggagattgagcagcggctcctgcagcagggcacggcccctgcacaggccaaggccgagcccaccgctgccccacaccccgtgctgaagcaggtcataaaaccccggcgtaagttggcgttccgctcaggagaggcccgcgactggagtaacggggctgtgctacaggcctccagccagctgtcccggggttcggccacgacgccccgaggtgtcctgcacacgttcagtccgtcacccaaactgcagaactcagcctcggccacagccctggtcagcaggaccggcagacattctgagagaaccgtgagcgccggcaagggcagcgccacctccaactggaagaagacgcccctcagcacaggcgggacccttgcgtttgtcagcccaagcctggcggtgcacaagagctcctcggccgtggaccgccagcgagagtacctcctggacatgatcccaccccgctccatcccccagtcagccacgtggaaatagtgcgagccaggccccgtggaagacgggctccctcctcccccacctggcccctggtctagaaggacccactgcaccaccctccgctggctcgggaagacaccgtgcccgccccaagagcaagcaccggccatgctgcagaggcaagacctcaattcttggctgcaaagtttcatcagggctagggggctggtgccgcctcataggcagacgaggatcatcgctgggggacctttcccgtgggctttcttcctttctctctttgcctttagtttgcccgacaccagcagaaaagtggaccttgggggctggttctgctcctggcccccttgttcagcccctgccggcacacgggcggctcaccctggacactgtgatgcgcatgggcaaggccagcgcccggggcttctgaaccgagcggggtgtttcatttttttgcttttccctgtcttaggctcccagtctttgactgccttcccatggcgatctataagttgaaagattttttttttttttaatcacctcatgatgatggagttaaaagtaaaccgtgcagaccctggggtccctgttgtacgctgcatcatcccgctggccctgtgccctggagggtgggcggctcatggtgccacagcccctggcagggacggccggcccgcccccgtgactgactgacagatgcagggatggccgaggcagccctcgctccagctgaacgcctccattgctgcttgttctggagacccccgcccccgcaccttccagacttagcagaagaacaaactgaagaacagacccagccagagaagcagggattccagaagctgcccattaagggagaaggagaggatccggtcggcagcagccctgagcagaaagctggaggggggactgtcgcggggtttttctgttgtggtttattttattaaattttttccttttttctattcatttcgatggacgcaatcttaagccaccctggccttgctcctgggaggtgagcgtgcacaggtgtgtgcaggtcaggaggtgccgtccaggtgtgcggcgagccgctgcgcacagatgtcaggatttccgtttgggtctagtttagaacctgtccttaaacctaggggttgctgtcaggatttgctaacaagaatagtcaagttcatttcccagagtcttaagactaagttctgcctcctcattgcaggtgtgccgagagttttttttgaacaacaaaaattactaaggaacctcactacctttggcggtagaattagaaaacagattcagcagtcacctactccccttcagtaattcgagacaattatttttctcctgacacaacatcaggtcccatgaaaaatgacacttgctggcctggcgcggtggctcacnnntgtaatcccagcactttgngaggcngaggngggtggatcacnaggtcaggagntcganacnancctggcnaacatggtgaaaccccntctctactaaaaatacaaaaattngccngnngtggtggtgggngcctanagtcngggaggctgaggcagganaatngnntgaacccnggaggcngagnttgcagtgagccnagatngngccactgcactnnagcctgggnaag

SEQ ID NO: 316909 - DNA, 2134 bp, Homo sapiens
aggggacgggcctgtcctgtggggctcaccctcggtcaccctgggccggccagcggaccgcactgactttgctttcaacccccgtttgtgtaggtcataaaaccccggcgtaagttggcgttccgctcaggagaggcccgcgactggagtaacggggctgtgctacaggtcagaaccgcactgggcgccgggagcctcgcgcccccaccgcagcccgtgaccacgtcagtcgccgactgtcacgctgcctcttctgtctgtctctccctgtttctgtttcactctctccccaaatttctcactaatttttgtttttttgtgcataacttggatgggctgaaggaggtgaggacagattggggaagggtggctttcattccaagatccagggatttggggaaaaggaaggaatttgatgttttttggggtgggaggggagggtgtgttttttacaccaaaaaaaaaaaaaaatcaagagtatgcaagcatttctattcctcgcatttttctgtgtgcctggcaaataaatacctgtctcctacgaccctgagctgttagccctctctgttccatgacaggggccagatcttccagctcctcccagaaggagcacccaggctggcttcttcccactgaaagccctccccagcgaaccaacctcagttctatgcagtggctggggatcaggcatccagaccgaagtcacctctgcctgctccagcttgggtcagctgggtctgaccagggggccagatccgagccgcacctgccggcccccagccccagctccagctcctgacctctcccagcctggcctggctgttcctccagggctgatggctgtcaacccatccttgtgagttcatatggactgctgcccctcgaaagggagagggtcggccccatgtccccagggagcattccatcagggacaacgtacatactgtgatgtaaacttttttttttccccccagggggcaaaagtgtgagatgccttaatctttccttcatttctgctgtctcgaacactctagcccattatttcctttcagttccttgcagcataacctctacgataagccccaagcgggttgttgtattatgacgtttatgatgttccaggtgaaggcattattaagtacctctctgggtgtggggtttggacgcaccaggatagctattgattaatgttaagggtgttctacccacagcaaagcacaccctcttaaaccaggcactgcctgggtcctggtcccgagagccctaccaggatcaggttcctgcaagccgtcagaatgtgggagcccccagcccaactgattgtaactgtcccctgttacctgtgacatgaacctccaacagcacctggaaacggttccctctgtcagctgctctgtagacagggctggggagatctcagagttcacacctcgcctgttgtaggggaggttgggggtagggtttggaatggccaagtgcccttggaacctcccacagctatggccgtcctgacctcatcccaggaactctacggtgaccaggaaccacccctctgacgaggtctgtagcggcccttctcagagtggaacagcccacagtgctagttgtgcctggtcttacctgtactccacggacctcggtgaagcaaaagcttcagggcagagggaatgaggcaacccagtggcagccccgctgggccccgtggctcctgctctcctattggacgtagaggcaggggagagacttctctatacaaatattctcatcacagaagggatgatccttgctgctctgccgtagggtttttgatgctgagctatgctgcacatgacgttaacctaaagaacttggactgagcttttaaaaaaggacagcaaacaattttataatccttaaagtgtaatagacggttacactagtgcagggtattggggaggctctttgggtgtggaggctgtcacttgtatttattgtgactctaaatctttgatagtaaaacaaatgtaaaaagaaatgtttgccaccagatgggaatagaagttccaataagcaggctggaatgggtggctatacgttgtatcacgaggaagttttagactctgaaggataataaatggatgatgtgtcaactgga

SEQ ID NO: 316910 - DNA, 523 bp, Homo sapiens
ggggtttcaccacgttggccagggtggtttcaaacttctgacctcatgatctgcgtacttcggcctcacaaagtgctgggattacaggcatctgccactgtgcccatccataattttctttaacttctgtgctacttaaaaaaagcaagataaaaaaactagtatgtactttcataaaagcagcaaaactgcttgctttaaaaaaagtgtgggggggtccggtccatgtaaatctgggtcttggtatcgttggcagacctcttcagctcggatgcccggcagtgtcatacccccgcccctggtccgaggtgggcagcaggcgtcctcgaagctggggccacaggcgagctcacaggtcgtcatgcccccactcgtcaggggggctcaggtaagcagggctgtgcacatgggggagacctggcagcctcagcagtcgtctacggtgaaagtaggctctttcccagtccttgggggcaaggtgcaatgtgccttccggtcccggtccattgttgactgggttgat

SEQ ID NO: 316911 - DNA, 6064 bp, Homo sapiens
ttgagtggctctgcggcccgctcccatctaccattggcaggatgcctgtcagtcattccgtcccgcctcctcggacccgccccggccggcggcgcgatcccgagaaccagccggcccgcgcactcactggtcgtcatgcgctgtctgtcatgaagctggccacaccttccatggggtgcgggtcctgggagtcctggctggacctcattggcttgtggcgccttcactcggagagacgcgcctcaacccggaagtgtgcgaggcgaaatctgcctagcaaccggggaagccgggctgtgaagcgggcaatttcagtgtgagactgagccgcgagactgagctgcggctccgagcgctgcgcggcggctcctcccgcccagggtcagcgccccggcgcgcgcacgcgcacccccgccgcccgagcgcgccccgcgccgcccgcgcagtcggtcggtcggtcgtctgtcctgtcgccgctgccgccgccgccacagcggccgccgcgggcgccacctgagggagtcgcctccgcgggacgccacaagacctgaccggactgcgccgcccgaggccgtcggccgccgtcagcgagggcgccgagcaacttcggttggtcagcacattgtctcaagtagccttttgatgtcactgtggccatggccaactggtaggaccagcaccccataccccgaagccagttcagaatgaccgaagaagcatgccgaacacggagtcagaaacgagcgcttgaacgggacccaacagaggacgatgtggagagcaagaaaataaaaatggagagaggattgttggcttcagatttaaacactgacggagacatgagggtgacacctgagccgggagcaggtccaacccaaggattgctgagggcaacagaggccacggccatggccatgggcagaggcgaagggctggtgggcgatgggcccgtggacatgcgcacctcacacagtgacatgaagtccgagaggagacccccctcacctgacgtgattgtgctctccgacaacgagcagccctcgagcccgagagtgaatgggctgaccacggtggccttgaaggagactagcaccgaggccctcatgaaaagcagtcctgaagaacgagaaaggatgatcaagcagctgaaggaagaattgaggttagaagaagcaaaactcgtgttgttgaaaaagttgcggcagagtcaaatacaaaaggaagccaccgcccagaagcccacaggttctgttgggagcaccgtgaccacccctcccccgcttgttcggggcactcagaacattcctgctggcaagccatcactccagacctcttcagctcggatgcccggcagtgtcatacccccgcccctggtccgaggtgggcagcaggcgtcctcgaagctggggccacaggcgagctcacaggtcgtcatgcccccactcgtcaggggggctcagcaaatccacagcattaggcaacattccagcacagggccaccgcccctcctcctggccccccgggcgtcggtgcccagtgtgcagattcagggacagaggatcatccagcagggcctcatccgcgtcgccaatgttcccaacaccagcctgctcgtcaacatcccacagcccaccccagcatcactgaaggggacaacagccacctccgctcaggccaactccacccccactagtgtggcctctgtggtcacctctgccgagtctccagcaagccgacaggcggccgccaagctggcgctgcgcaaacagctggagaagacgctactcgagatccccccacccaagcccccagccccagagatgaacttcctgcccagcgccgccaacaacgagttcatctacctggtcggcctggaggaggtggtgcagaacctactggagacacaagcaggcaggatgtcggccgccactgtgctgtcccgggagccctacatgtgtgcacagtgcaagacggacttcacgtgccgctggcgggaggagaagagcggcgccatcatgtgtgagaactgcatgacaaccaaccagaagaaggcgctcaaggtggagcacaccagccggctgaaggccgcctttgtgaaggcgctgcagcaggaacaggagattgagcagcggctcctgcagcagggcacggcccctgcacaggccaaggccgagcccaccgctgccccacaccccgtgctgaagcaggtcataaaaccccggcgtaagttggcgttccgctcaggagaggcccgcgactggagtaacggggctgtgctacaggcctccagccagctgtcccggggttcggccacgacgccccgaggtgtcctgcacacgttcagtccgtcacccaaactgcagaactcagcctcggccacagccctggtcagcaggaccggcagacattctgagagaaccgtgagcgccggcaagggcagcgccacctccaactggaagaagacgcccctcagcacaggcgggacccttgcgtttgtcagcccaagcctggcggtgcacaagagctcctcggccgtggaccgccagcgagagtacctcctggacatgatcccaccccgctccatcccccagtcagccacgtggaaatagtgcgagccaggccccgtggaagacgggctccctcctcccccacctggcccctggtctagaaggacccactgcaccaccctccgctggctcgggaagacaccgtgcccgccccaagagcaagcaccggccatgctgcagaggcaagacctcaattcttggctgcaaagtttcatcagggctagggggctggtgccgcctcataggcagacgaggatcatcgctgggggacctttcccgtgggctttcttcctttctctctttgcctttagtttgcccgacaccagcagaaaagtggaccttgggggctggttctgctcctggcccccttgttcagcccctgccggcacacgggcggctcaccctggacactgtgatgcgcatgggcaaggccagcgcccggggcttctgaaccgagcggggtgtttcatttttttgcttttccctgtcttaggctcccagtctttgactgccttcccatggcgatctataagttgaaagattttttttttttttaatcacctcatgatgatggagttaaaagtaaaccgtgcagaccctggggtccctgttgtacgctgcatcatcccgctggccctgtgccctggagggtgggcggctcatggtgccacagcccctggcagggacggccggcccgcccccgtgactgactgacagatgcagggatggccgaggcagccctcgctccagctgaacgcctccattgctgcttgttctggagacccccgcccccgcaccttccagacttagcagaagaacaaactgaagaacagacccagccagagaagcagggattccagaagctgcccattaagggagaaggagaggatccggtcggcagcagccctgagcagaaagctggaggggggactgtcgcggggtttttctgttgtggtttattttattaaattttttccttttttctattcatttcgatggacgcaatcttaagccaccctggccttgctcctgggaggtgagcgtgcacaggtgtgtgcaggtcaggaggtgccgtccaggtgtgcggcgagccgctgcgcacagatgtcaggatttccgtttgggtctagtttagaacctgtccttaaacctaggggttgctgtcaggatttgctttcagactttttttttttttgtaattccctttagagtctacaaaaatgtttttaaaaggatcaggtctgcttttagtttcatttttgtttctttcccgtcccactctttaaaaactggttccgtgaggaaaggcagaagccgttccgtgtctcttgcaggctgggccggcttcatgccagtgcgagggcgtcccgtgcccacgtacatacgtatgtctccatgagttctgggctccactggttccaattgagctccagccctggttttcctacccatgcagttagggactttaatttaattttttttttgtagggccaccgccttcaaacacaactgctacaacattctaataaaggctcatttaacccccaggctcctgtcgtgtgaatatcctcagtctgtaggaaactttttttgacacagcatagaagacctagttttggaaaacattatctaattttttgttgtgcaaatccccaaatttctcactaatttttgtttttttgtgcataacttggatgggctgaaggaggtgaggacagattggggaagggtggctttcattccaagatccagggatttggggaaaaggaaggaatttgatgttttttggggtgggaggggagggtgtgttttttacaccaaaaaaaaaaaaaaatcaagagtatgcaagcatttctattcctcgcatttttctgtgtgcctggcaaataaatacctgtctcctacgaccctgagctgttagccctctctgttccatgacaggggccagatcttccagctcctcccagaaggagcacccaggctggcttcttcccactgaaagccctccccagcgaaccaacctcagttctatgcagtggctggggatcaggcatccagaccgaagtcacctctgcctgctccagcttgggtcagctgggtctgaccagggggccagatccgagccgcacctgccggcccccagccccagctccagctcctgacctctcccagcctggcctggctgttcctccagggctgatggctgtcaacccatccttgtgagttcatatggactgctgcccctcgaaagggagagggtcggccccatgtccccagggagcattccatcagggacaacgtacatactgtgatgtaaacttttttttttccccccagggggcaaaagtgtgagatgccttaatctttccttcatttctgctgtctcgaacactctagcccattatttcctttcagttccttgcagcataacctctacgataagccccaagcgggttgttgtattatgacgtttatgatgttccaggtgaaggcattattaagtacctctctgggtgtggggtttggacgcaccaggatagctattgattaatgttaagggtgttctacccacagcaaagcacaccctcttaaaccaggcactgcctgggtcctggtcccgagagccctaccaggatcaggttcctgcaagccgtcagaatgtgggagcccccagcccaactgattgtaactgtcccctgttacctgtgacatgaacctccaacagcacctggaaacggttccctctgtcagctgctctgtagacagggctggggagatctcagagttcacacctcgcctgttgtaggggaggttgggggtagggtttggaatggccaagtgcccttggaacctcccacagctatggccgtcctgacctcatcccaggaactctacggtgaccaggaaccacccctctgacgaggtctgtagcggcccttctcagagtggaacagcccacagtgctagttgtgcctggtcttacctgtactccacggacctcggtgaagcaaaagcttcagggcagagggaatgaggcaacccagtggcagccccgctgggccccgtggctcctgctctcctattggacgtagaggcaggggagagacttctctatacaaatattctcatcacagaagggatgatccttgctgctctgccgtagggtttttgatgctgagctatgctgcacatgacgttaacctaaagaacttggactgagcttttaaaaaaggacagcaaacaattttataatccttaaagtgtaatagacggttacactagtgcagggtattggggaggctctttgggtgtggaggctgtcacttgtatttattgtgactctaaatctttgatagtaaaacaaatgtaaaaagaaatgtttgccaccagatgggaatagaagttccaataagcaggctggaatgggtggctatacgttgtatcacgaggaagttttagactctgaaggataataaatggatgatgtgtcaactgga

SEQ ID NO: 316912 - DNA, 5397 bp, Homo sapiens
gcacggagattgttgccagggctctggtgagttcagaatgaccgaagaagcatgccgaacacggagtcagaaacgagcgcttgaacgggacccaacagaggacgatgtggagagcaagaaaataaaaatggagagaggattgttggcttcagatttaaacactgacggagacatgagggtgacacctgagccgggagcaggtccaacccaaggattgctgagggcaacagaggccacggccatggccatgggcagaggcgaagggctggtgggcgatgggcccgtggacatgcgcacctcacacagtgacatgaagtccgagaggagacccccctcacctgacgtgattgtgctctccgacaacgagcagccctcgagcccgagagtgaatgggctgaccacggtggccttgaaggagactagcaccgaggccctcatgaaaagcagtcctgaagaacgagaaaggatgatcaagcagctgaaggaagaattgaggttagaagaagcaaaactcgtgttgttgaaaaagttgcggcagagtcaaatacaaaaggaagccaccgcccagaagcccacaggttctgttgggagcaccgtgaccacccctcccccgcttgttcggggcactcagaacattcctgctggcaagccatcactccagacctcttcagctcggatgcccggcagtgtcatacccccgcccctggtccgaggtgggcagcaggcgtcctcgaagctggggccacaggcgagctcacaggtcgtcatgcccccactcgtcaggggggctcagcaaatccacagcattaggcaacattccagcacagggccaccgcccctcctcctggccccccgggcgtcggtgcccagtgtgcagattcagggacagaggatcatccagcagggcctcatccgcgtcgccaatgttcccaacaccagcctgctcgtcaacatcccacagcccaccccagcatcactgaaggggacaacagccacctccgctcaggccaactccacccccactagtgtggcctctgtggtcacctctgccgagtctccagcaagccgacaggcggccgccaagctggcgctgcgcaaacagctggagaagacgctactcgagatccccccacccaagcccccagccccagagatgaacttcctgcccagcgccgccaacaacgagttcatctacctggtcggcctggaggaggtggtgcagaacctactggagacacaagcaggcaggatgtcggccgccactgtgctgtcccgggagccctacatgtgtgcacagtgcaagacggacttcacgtgccgctggcgggaggagaagagcggcgccatcatgtgtgagaactgcatgacaaccaaccagaagaaggcgctcaaggtggagcacaccagccggctgaaggccgcctttgtgaaggcgctgcagcaggaacaggagattgagcagcggctcctgcagcagggcacggcccctgcacaggccaaggccgagcccaccgctgccccacaccccgtgctgaagcaggtcataaaaccccggcgtaagttggcgttccgctcaggagaggcccgcgactggagtaacggggctgtgctacaggcctccagccagctgtcccggggttcggccacgacgccccgaggtgtcctgcacacgttcagtccgtcacccaaactgcagaactcagcctcggccacagccctggtcagcaggaccggcagacattctgagagaaccgtgagcgccggcaagggcagcgccacctccaactggaagaagacgcccctcagcacaggcgggacccttgcgtttgtcagcccaagcctggcggtgcacaagagctcctcggccgtggaccgccagcgagagtacctcctggacatgatcccaccccgctccatcccccagtcagccacgtggaaatagtgcgagccaggccccgtggaagacgggctccctcctcccccacctggcccctggtctagaaggacccactgcaccaccctccgctggctcgggaagacaccgtgcccgccccaagagcaagcaccggccatgctgcagaggcaagacctcaattcttggctgcaaagtttcatcagggctagggggctggtgccgcctcataggcagacgaggatcatcgctgggggacctttcccgtgggctttcttcctttctctctttgcctttagtttgcccgacaccagcagaaaagtggaccttgggggctggttctgctcctggcccccttgttcagcccctgccggcacacgggcggctcaccctggacactgtgatgcgcatgggcaaggccagcgcccggggcttctgaaccgagcggggtgtttcatttttttgcttttccctgtcttaggctcccagtctttgactgccttcccatggcgatctataagttgaaagattttttttttttttaatcacctcatgatgatggagttaaaagtaaaccgtgcagaccctggggtccctgttgtacgctgcatcatcccgctggccctgtgccctggagggtgggcggctcatggtgccacagcccctggcagggacggccggcccgcccccgtgactgactgacagatgcagggatggccgaggcagccctcgctccagctgaacgcctccattgctgcttgttctggagacccccgcccccgcaccttccagacttagcagaagaacaaactgaagaacagacccagccagagaagcagggattccagaagctgcccattaagggagaaggagaggatccggtcggcagcagccctgagcagaaagctggaggggggactgtcgcggggtttttctgttgtggtttattttattaaattttttccttttttctattcatttcgatggacgcaatcttaagccaccctggccttgctcctgggaggtgagcgtgcacaggtgtgtgcaggtcaggaggtgccgtccaggtgtgcggcgagccgctgcgcacagatgtcaggatttccgtttgggtctagtttagaacctgtccttaaacctaggggttgctgtcaggatttgctttcagactttttttttttttgtaattccctttagagtctacaaaaatgtttttaaaaggatcaggtctgcttttagtttcatttttgtttctttcccgtcccactctttaaaaactggttccgtgaggaaaggcagaagccgttccgtgtctcttgcaggctgggccggcttcatgccagtgcgagggcgtcccgtgcccacgtacatacgtatgtctccatgagttctgggctccactggttccaattgagctccagccctggttttcctacccatgcagttagggactttaatttaattttttttttgtagggccaccgccttcaaacacaactgctacaacattctaataaaggctcatttaacccccaggctcctgtcgtgtgaatatcctcagtctgtaggaaactttttttgacacagcatagaagacctagttttggaaaacattatctaattttttgttgtgcaaatccccaaatttctcactaatttttgtttttttgtgcataacttggatgggctgaaggaggtgaggacagattggggaagggtggctttcattccaagatccagggatttggggaaaaggaaggaatttgatgttttttggggtgggaggggagggtgtgttttttacaccaaaaaaaaaaaaaaatcaagagtatgcaagcatttctattcctcgcatttttctgtgtgcctggcaaataaatacctgtctcctacgaccctgagctgttagccctctctgttccatgacaggggccagatcttccagctcctcccagaaggagcacccaggctggcttcttcccactgaaagccctccccagcgaaccaacctcagttctatgcagtggctggggatcaggcatccagaccgaagtcacctctgcctgctccagcttgggtcagctgggtctgaccagggggccagatccgagccgcacctgccggcccccagccccagctccagctcctgacctctcccagcctggcctggctgttcctccagggctgatggctgtcaacccatccttgtgagttcatatggactgctgcccctcgaaagggagagggtcggccccatgtccccagggagcattccatcagggacaacgtacatactgtgatgtaaacttttttttttccccccagggggcaaaagtgtgagatgccttaatctttccttcatttctgctgtctcgaacactctagcccattatttcctttcagttccttgcagcataacctctacgataagccccaagcgggttgttgtattatgacgtttatgatgttccaggtgaaggcattattaagtacctctctgggtgtggggtttggacgcaccaggatagctattgattaatgttaagggtgttctacccacagcaaagcacaccctcttaaaccaggcactgcctgggtcctggtcccgagagccctaccaggatcaggttcctgcaagccgtcagaatgtgggagcccccagcccaactgattgtaactgtcccctgttacctgtgacatgaacctccaacagcacctggaaacggttccctctgtcagctgctctgtagacagggctggggagatctcagagttcacacctcgcctgttgtaggggaggttgggggtagggtttggaatggccaagtgcccttggaacctcccacagctatggccgtcctgacctcatcccaggaactctacggtgaccaggaaccacccctctgacgaggtctgtagcggcccttctcagagtggaacagcccacagtgctagttgtgcctggtcttacctgtactccacggacctcggtgaagcaaaagcttcagggcagagggaatgaggcaacccagtggcagccccgctgggccccgtggctcctgctctcctattggacgtagaggcaggggagagacttctctatacaaatattctcatcacagaagggatgatccttgctgctctgccgtagggtttttgatgctgagctatgctgcacatgacgttaacctaaagaacttggactgagcttttaaaaaaggacagcaaacaattttataatccttaaagtgtaatagacggttacactagtgcagggtattggggaggctctttgggtgtggaggctgtcacttgtatttattgtgactctaaatctttgatagtaaaacaaatgtaaaaagaaatgtttgccaccagatgggaatagaagttccaataagcaggctggaatgggtggctatacgttgtatcacgaggaagttttagactctgaaggataataaatggatgatgtgtcaactgga

SEQ ID NO: 316913 - DNA, 5900 bp, Homo sapiens
ttgagtggctctgcggcccgctcccatctaccattggcaggatgcctgtcagtcattccgtcccgcctcctcggacccgccccggccggcggcgcgatcccgagaaccagccggcccgcgcactcactggtcgtcatgcgctgtctgtcatgaagctggccacaccttccatggggtgcgggtcctgggagtcctggctggacctcattggcttgtggcgccttcactcggagagacgcgcctcaacccggaagtgtgcgaggcgaaatctgcctagcaaccggggaagccgggctgtgaagcgggcaatttcagtgtgagactgagccgcgagactgagctgcggctccgagcgctgcgcggcggctcctcccgcccagggtcagcgccccggcgcgcgcacgcgcacccccgccgcccgagcgcgccccgcgccgcccgcgcagtcggtcggtcggtcgtctgtcctgtcgccgctgccgccgccgccacagcggccgccgcgggcgccacctgagggagtcgcctccgcgggacgccacaagacctgaccggactgcgccgcccgaggccgtcggccgccgtcagcgagggcgccgagcaacttcgttcagaatgaccgaagaagcatgccgaacacggagtcagaaacgagcgcttgaacgggacccaacagaggacgatgtggagagcaagaaaataaaaatggagagaggattgttggcttcagatttaaacactgacggagacatgagggtgacacctgagccgggagcaggtccaacccaaggattgctgagggcaacagaggccacggccatggccatgggcagaggcgaagggctggtgggcgatgggcccgtggacatgcgcacctcacacagtgacatgaagtccgagaggagacccccctcacctgacgtgattgtgctctccgacaacgagcagccctcgagcccgagagtgaatgggctgaccacggtggccttgaaggagactagcaccgaggccctcatgaaaagcagtcctgaagaacgagaaaggatgatcaagcagctgaaggaagaattgaggttagaagaagcaaaactcgtgttgttgaaaaagttgcggcagagtcaaatacaaaaggaagccaccgcccagaagcccacaggttctgttgggagcaccgtgaccacccctcccccgcttgttcggggcactcagaacattcctgctggcaagccatcactccagacctcttcagctcggatgcccggcagtgtcatacccccgcccctggtccgaggtgggcagcaggcgtcctcgaagctggggccacaggcgagctcacaggtcgtcatgcccccactcgtcaggggggctcagcaaatccacagcattaggcaacattccagcacagggccaccgcccctcctcctggccccccgggcgtcggtgcccagtgtgcagattcagggacagaggatcatccagcagggcctcatccgcgtcgccaatgttcccaacaccagcctgctcgtcaacatcccacagcccaccccagcatcactgaaggggacaacagccacctccgctcaggccaactccacccccactagtgtggcctctgtggtcacctctgccgagtctccagcaagccgacaggcggccgccaagctggcgctgcgcaaacagctggagaagacgctactcgagatccccccacccaagcccccagccccagagatgaacttcctgcccagcgccgccaacaacgagttcatctacctggtcggcctggaggaggtggtgcagaacctactggagacacaagcaggcaggatgtcggccgccactgtgctgtcccgggagccctacatgtgtgcacagtgcaagacggacttcacgtgccgctggcgggaggagaagagcggcgccatcatgtgtgagaactgcatgacaaccaaccagaagaaggcgctcaaggtggagcacaccagccggctgaaggccgcctttgtgaaggcgctgcagcaggaacaggagattgagcagcggctcctgcagcagggcacggcccctgcacaggccaaggccgagcccaccgctgccccacaccccgtgctgaagcaggcctccagccagctgtcccggggttcggccacgacgccccgaggtgtcctgcacacgttcagtccgtcacccaaactgcagaactcagcctcggccacagccctggtcagcaggaccggcagacattctgagagaaccgtgagcgccggcaagggcagcgccacctccaactggaagaagacgcccctcagcacaggcgggacccttgcgtttgtcagcccaagcctggcggtgcacaagagctcctcggccgtggaccgccagcgagagtacctcctggacatgatcccaccccgctccatcccccagtcagccacgtggaaatagtgcgagccaggccccgtggaagacgggctccctcctcccccacctggcccctggtctagaaggacccactgcaccaccctccgctggctcgggaagacaccgtgcccgccccaagagcaagcaccggccatgctgcagaggcaagacctcaattcttggctgcaaagtttcatcagggctagggggctggtgccgcctcataggcagacgaggatcatcgctgggggacctttcccgtgggctttcttcctttctctctttgcctttagtttgcccgacaccagcagaaaagtggaccttgggggctggttctgctcctggcccccttgttcagcccctgccggcacacgggcggctcaccctggacactgtgatgcgcatgggcaaggccagcgcccggggcttctgaaccgagcggggtgtttcatttttttgcttttccctgtcttaggctcccagtctttgactgccttcccatggcgatctataagttgaaagattttttttttttttaatcacctcatgatgatggagttaaaagtaaaccgtgcagaccctggggtccctgttgtacgctgcatcatcccgctggccctgtgccctggagggtgggcggctcatggtgccacagcccctggcagggacggccggcccgcccccgtgactgactgacagatgcagggatggccgaggcagccctcgctccagctgaacgcctccattgctgcttgttctggagacccccgcccccgcaccttccagacttagcagaagaacaaactgaagaacagacccagccagagaagcagggattccagaagctgcccattaagggagaaggagaggatccggtcggcagcagccctgagcagaaagctggaggggggactgtcgcggggtttttctgttgtggtttattttattaaattttttccttttttctattcatttcgatggacgcaatcttaagccaccctggccttgctcctgggaggtgagcgtgcacaggtgtgtgcaggtcaggaggtgccgtccaggtgtgcggcgagccgctgcgcacagatgtcaggatttccgtttgggtctagtttagaacctgtccttaaacctaggggttgctgtcaggatttgctttcagactttttttttttttgtaattccctttagagtctacaaaaatgtttttaaaaggatcaggtctgcttttagtttcatttttgtttctttcccgtcccactctttaaaaactggttccgtgaggaaaggcagaagccgttccgtgtctcttgcaggctgggccggcttcatgccagtgcgagggcgtcccgtgcccacgtacatacgtatgtctccatgagttctgggctccactggttccaattgagctccagccctggttttcctacccatgcagttagggactttaatttaattttttttttgtagggccaccgccttcaaacacaactgctacaacattctaataaaggctcatttaacccccaggctcctgtcgtgtgaatatcctcagtctgtaggaaactttttttgacacagcatagaagacctagttttggaaaacattatctaattttttgttgtgcaaatccccaaatttctcactaatttttgtttttttgtgcataacttggatgggctgaaggaggtgaggacagattggggaagggtggctttcattccaagatccagggatttggggaaaaggaaggaatttgatgttttttggggtgggaggggagggtgtgttttttacaccaaaaaaaaaaaaaaatcaagagtatgcaagcatttctattcctcgcatttttctgtgtgcctggcaaataaatacctgtctcctacgaccctgagctgttagccctctctgttccatgacaggggccagatcttccagctcctcccagaaggagcacccaggctggcttcttcccactgaaagccctccccagcgaaccaacctcagttctatgcagtggctggggatcaggcatccagaccgaagtcacctctgcctgctccagcttgggtcagctgggtctgaccagggggccagatccgagccgcacctgccggcccccagccccagctccagctcctgacctctcccagcctggcctggctgttcctccagggctgatggctgtcaacccatccttgtgagttcatatggactgctgcccctcgaaagggagagggtcggccccatgtccccagggagcattccatcagggacaacgtacatactgtgatgtaaacttttttttttccccccagggggcaaaagtgtgagatgccttaatctttccttcatttctgctgtctcgaacactctagcccattatttcctttcagttccttgcagcataacctctacgataagccccaagcgggttgttgtattatgacgtttatgatgttccaggtgaaggcattattaagtacctctctgggtgtggggtttggacgcaccaggatagctattgattaatgttaagggtgttctacccacagcaaagcacaccctcttaaaccaggcactgcctgggtcctggtcccgagagccctaccaggatcaggttcctgcaagccgtcagaatgtgggagcccccagcccaactgattgtaactgtcccctgttacctgtgacatgaacctccaacagcacctggaaacggttccctctgtcagctgctctgtagacagggctggggagatctcagagttcacacctcgcctgttgtaggggaggttgggggtagggtttggaatggccaagtgcccttggaacctcccacagctatggccgtcctgacctcatcccaggaactctacggtgaccaggaaccacccctctgacgaggtctgtagcggcccttctcagagtggaacagcccacagtgctagttgtgcctggtcttacctgtactccacggacctcggtgaagcaaaagcttcagggcagagggaatgaggcaacccagtggcagccccgctgggccccgtggctcctgctctcctattggacgtagaggcaggggagagacttctctatacaaatattctcatcacagaagggatgatccttgctgctctgccgtagggtttttgatgctgagctatgctgcacatgacgttaacctaaagaacttggactgagcttttaaaaaaggacagcaaacaattttataatccttaaagtgtaatagacggttacactagtgcagggtattggggaggctctttgggtgtggaggctgtcacttgtatttattgtgactctaaatctttgatagtaaaacaaatgtaaaaagaaatgtttgccaccagatgggaatagaagttccaataagcaggctggaatgggtggctatacgttgtatcacgaggaagttttagactctgaaggataataaatggatgatgtgtcaactgga

SEQ ID NO: 316914 - DNA, 5921 bp, Homo sapiens
ttgagtggctctgcggcccgctcccatctaccattggcaggatgcctgtcagtcattccgtcccgcctcctcggacccgccccggccggcggcgcgatcccgagaaccagccggcccgcgcactcactggtcgtcatgcgctgtctgtcatgaagctggccacaccttccatggggtgcgggtcctgggagtcctggctggacctcattggcttgtggcgccttcactcggagagacgcgcctcaacccggaagtgtgcgaggcgaaatctgcctagcaaccggggaagccgggctgtgaagcgggcaatttcagtgtgagactgagccgcgagactgagctgcggctccgagcgctgcgcggcggctcctcccgcccagggtcagcgccccggcgcgcgcacgcgcacccccgccgcccgagcgcgccccgcgccgcccgcgcagtcggtcggtcggtcgtctgtcctgtcgccgctgccgccgccgccacagcggccgccgcgggcgccacctgagggagtcgcctccgcgggacgccacaagacctgaccggactgcgccgcccgaggccgtcggccgccgtcagcgagggcgccgagcaacttcgttcagaatgaccgaagaagcatgccgaacacggagtcagaaacgagcgcttgaacgggacccaacagaggacgatgtggagagcaagaaaataaaaatggagagaggattgttggcttcagatttaaacactgacggagacatgagggtgacacctgagccgggagcaggtccaacccaaggattgctgagggcaacagaggccacggccatggccatgggcagaggcgaagggctggtgggcgatgggcccgtggacatgcgcacctcacacagtgacatgaagtccgagaggagacccccctcacctgacgtgattgtgctctccgacaacgagcagccctcgagcccgagagtgaatgggctgaccacggtggccttgaaggagactagcaccgaggccctcatgaaaagcagtcctgaagaacgagaaaggatgatcaagcagctgaaggaagaattgaggttagaagaagcaaaactcgtgttgttgaaaaagttgcggcagagtcaaatacaaaaggaagccaccgcccagaagcccacaggttctgttgggagcaccgtgaccacccctcccccgcttgttcggggcactcagaacattcctgctggcaagccatcactccagacctcttcagctcggatgcccggcagtgtcatacccccgcccctggtccgaggtgggcagcaggcgtcctcgaagctggggccacaggcgagctcacaggtcgtcatgcccccactcgtcaggggggctcagcaaatccacagcattaggcaacattccagcacagggccaccgcccctcctcctggccccccgggcgtcggtgcccagtgtgcagattcagggacagaggatcatccagcagggcctcatccgcgtcgccaatgttcccaacaccagcctgctcgtcaacatcccacagcccaccccagcatcactgaaggggacaacagccacctccgctcaggccaactccacccccactagtgtggcctctgtggtcacctctgccgagtctccagcaagccgacaggcggccgccaagctggcgctgcgcaaacagctggagaagacgctactcgagatccccccacccaagcccccagccccagagatgaacttcctgcccagcgccgccaacaacgagttcatctacctggtcggcctggaggaggtggtgcagaacctactggagacacaagcaggcaggatgtcggccgccactgtgctgtcccgggagccctacatgtgtgcacagtgcaagacggacttcacgtgccgctggcgggaggagaagagcggcgccatcatgtgtgagaactgcatgacaaccaaccagaagaaggcgctcaaggtggagcacaccagccggctgaaggccgcctttgtgaaggcgctgcagcaggaacaggagattgagcagcggctcctgcagcagggcacggcccctgcacaggccaaggccgagcccaccgctgccccacaccccgtgctgaagcaggtcataaaaccccggcgtaagttggcgttccgctcaggagaggcccgcgactggagtaacggggctgtgctacaggcctccagccagctgtcccggggttcggccacgacgccccgaggtgtcctgcacacgttcagtccgtcacccaaactgcagaactcagcctcggccacagccctggtcagcaggaccggcagacattctgagagaaccgtgagcgccggcaagggcagcgccacctccaactggaagaagacgcccctcagcacaggcgggacccttgcgtttgtcagcccaagcctggcggtgcacaagagctcctcggccgtggaccgccagcgagagtacctcctggacatgatcccaccccgctccatcccccagtcagccacgtggaaatagtgcgagccaggccccgtggaagacgggctccctcctcccccacctggcccctggtctagaaggacccactgcaccaccctccgctggctcgggaagacaccgtgcccgccccaagagcaagcaccggccatgctgcagaggcaagacctcaattcttggctgcaaagtttcatcagggctagggggctggtgccgcctcataggcagacgaggatcatcgctgggggacctttcccgtgggctttcttcctttctctctttgcctttagtttgcccgacaccagcagaaaagtggaccttgggggctggttctgctcctggcccccttgttcagcccctgccggcacacgggcggctcaccctggacactgtgatgcgcatgggcaaggccagcgcccggggcttctgaaccgagcggggtgtttcatttttttgcttttccctgtcttaggctcccagtctttgactgccttcccatggcgatctataagttgaaagattttttttttttttaatcacctcatgatgatggagttggccctgtgccctggagggtgggcggctcatggtgccacagcccctggcagggacggccggcccgcccccgtgactgactgacagatgcagggatggccgaggcagccctcgctccagctgaacgcctccattgctgcttgttctggagacccccgcccccgcaccttccagacttagcagaagaacaaactgaagaacagacccagccagagaagcagggattccagaagctgcccattaagggagaaggagaggatccggtcggcagcagccctgagcagaaagctggaggggggactgtcgcggggtttttctgttgtggtttattttattaaattttttccttttttctattcatttcgatggacgcaatcttaagccaccctggccttgctcctgggaggtgagcgtgcacaggtgtgtgcaggtcaggaggtgccgtccaggtgtgcggcgagccgctgcgcacagatgtcaggatttccgtttgggtctagtttagaacctgtccttaaacctaggggttgctgtcaggatttgctttcagactttttttttttttgtaattccctttagagtctacaaaaatgtttttaaaaggatcaggtctgcttttagtttcatttttgtttctttcccgtcccactctttaaaaactggttccgtgaggaaaggcagaagccgttccgtgtctcttgcaggctgggccggcttcatgccagtgcgagggcgtcccgtgcccacgtacatacgtatgtctccatgagttctgggctccactggttccaattgagctccagccctggttttcctacccatgcagttagggactttaatttaattttttttttgtagggccaccgccttcaaacacaactgctacaacattctaataaaggctcatttaacccccaggctcctgtcgtgtgaatatcctcagtctgtaggaaactttttttgacacagcatagaagacctagttttggaaaacattatctaattttttgttgtgcaaatccccaaatttctcactaatttttgtttttttgtgcataacttggatgggctgaaggaggtgaggacagattggggaagggtggctttcattccaagatccagggatttggggaaaaggaaggaatttgatgttttttggggtgggaggggagggtgtgttttttacaccaaaaaaaaaaaaaaatcaagagtatgcaagcatttctattcctcgcatttttctgtgtgcctggcaaataaatacctgtctcctacgaccctgagctgttagccctctctgttccatgacaggggccagatcttccagctcctcccagaaggagcacccaggctggcttcttcccactgaaagccctccccagcgaaccaacctcagttctatgcagtggctggggatcaggcatccagaccgaagtcacctctgcctgctccagcttgggtcagctgggtctgaccagggggccagatccgagccgcacctgccggcccccagccccagctccagctcctgacctctcccagcctggcctggctgttcctccagggctgatggctgtcaacccatccttgtgagttcatatggactgctgcccctcgaaagggagagggtcggccccatgtccccagggagcattccatcagggacaacgtacatactgtgatgtaaacttttttttttccccccagggggcaaaagtgtgagatgccttaatctttccttcatttctgctgtctcgaacactctagcccattatttcctttcagttccttgcagcataacctctacgataagccccaagcgggttgttgtattatgacgtttatgatgttccaggtgaaggcattattaagtacctctctgggtgtggggtttggacgcaccaggatagctattgattaatgttaagggtgttctacccacagcaaagcacaccctcttaaaccaggcactgcctgggtcctggtcccgagagccctaccaggatcaggttcctgcaagccgtcagaatgtgggagcccccagcccaactgattgtaactgtcccctgttacctgtgacatgaacctccaacagcacctggaaacggttccctctgtcagctgctctgtagacagggctggggagatctcagagttcacacctcgcctgttgtaggggaggttgggggtagggtttggaatggccaagtgcccttggaacctcccacagctatggccgtcctgacctcatcccaggaactctacggtgaccaggaaccacccctctgacgaggtctgtagcggcccttctcagagtggaacagcccacagtgctagttgtgcctggtcttacctgtactccacggacctcggtgaagcaaaagcttcagggcagagggaatgaggcaacccagtggcagccccgctgggccccgtggctcctgctctcctattggacgtagaggcaggggagagacttctctatacaaatattctcatcacagaagggatgatccttgctgctctgccgtagggtttttgatgctgagctatgctgcacatgacgttaacctaaagaacttggactgagcttttaaaaaaggacagcaaacaattttataatccttaaagtgtaatagacggttacactagtgcagggtattggggaggctctttgggtgtggaggctgtcacttgtatttattgtgactctaaatctttgatagtaaaacaaatgtaaaaagaaatgtttgccaccagatgggaatagaagttccaataagcaggctggaatgggtggctatacgttgtatcacgaggaagttttagactctgaaggataataaatggatgatgtgtcaactgga

SEQ ID NO: 316915 - DNA, 3880 bp, Homo sapiens
ggaagaggtcagccagagcaaggagaggctgcgctgagtgtctcgcctgctgctgtcttttccctgcatgagccgtcacccccctttctccactgcaggcctccagccagctgtcccggggttcggccacgacgccccgaggtgtcctgcacacgttcagtccgtcacccaaactgcagaactcagcctcggccacagccctggtcagcaggaccggcagacattctgagagaaccgtgagcgccggcaagggcagcgccacctccaactggaagaagacgcccctcagcacaggcgggacccttgcgtttgtcagcccaagcctggcggtgcacaagagctcctcggccgtggaccgccagcgagagtacctcctggacatgatcccaccccgctccatcccccagtcagccacgtggaaatagtgcgagccaggccccgtggaagacgggctccctcctcccccacctggcccctggtctagaaggacccactgcaccaccctccgctggctcgggaagacaccgtgcccgccccaagagcaagcaccggccatgctgcagaggcaagacctcaattcttggctgcaaagtttcatcagggctagggggctggtgccgcctcataggcagacgaggatcatcgctgggggacctttcccgtgggctttcttcctttctctctttgcctttagtttgcccgacaccagcagaaaagtggaccttgggggctggttctgctcctggcccccttgttcagcccctgccggcacacgggcggctcaccctggacactgtgatgcgcatgggcaaggccagcgcccggggcttctgaaccgagcggggtgtttcatttttttgcttttccctgtcttaggctcccagtctttgactgccttcccatggcgatctataagttgaaagattttttttttttttaatcacctcatgatgatggagttaaaagtaaaccgtgcagaccctggggtccctgttgtacgctgcatcatcccgctggccctgtgccctggagggtgggcggctcatggtgccacagcccctggcagggacggccggcccgcccccgtgactgactgacagatgcagggatggccgaggcagccctcgctccagctgaacgcctccattgctgcttgttctggagacccccgcccccgcaccttccagacttagcagaagaacaaactgaagaacagacccagccagagaagcagggattccagaagctgcccattaagggagaaggagaggatccggtcggcagcagccctgagcagaaagctggaggggggactgtcgcggggtttttctgttgtggtttattttattaaattttttccttttttctattcatttcgatggacgcaatcttaagccaccctggccttgctcctgggaggtgagcgtgcacaggtgtgtgcaggtcaggaggtgccgtccaggtgtgcggcgagccgctgcgcacagatgtcaggatttccgtttgggtctagtttagaacctgtccttaaacctaggggttgctgtcaggatttgctttcagactttttttttttttgtaattccctttagagtctacaaaaatgtttttaaaaggatcaggtctgcttttagtttcatttttgtttctttcccgtcccactctttaaaaactggttccgtgaggaaaggcagaagccgttccgtgtctcttgcaggctgggccggcttcatgccagtgcgagggcgtcccgtgcccacgtacatacgtatgtctccatgagttctgggctccactggttccaattgagctccagccctggttttcctacccatgcagttagggactttaatttaattttttttttgtagggccaccgccttcaaacacaactgctacaacattctaataaaggctcatttaacccccaggctcctgtcgtgtgaatatcctcagtctgtaggaaactttttttgacacagcatagaagacctagttttggaaaacattatctaattttttgttgtgcaaatccccaaatttctcactaatttttgtttttttgtgcataacttggatgggctgaaggaggtgaggacagattggggaagggtggctttcattccaagatccagggatttggggaaaaggaaggaatttgatgttttttggggtgggaggggagggtgtgttttttacaccaaaaaaaaaaaaaaatcaagagtatgcaagcatttctattcctcgcatttttctgtgtgcctggcaaataaatacctgtctcctacgaccctgagctgttagccctctctgttccatgacaggggccagatcttccagctcctcccagaaggagcacccaggctggcttcttcccactgaaagccctccccagcgaaccaacctcagttctatgcagtggctggggatcaggcatccagaccgaagtcacctctgcctgctccagcttgggtcagctgggtctgaccagggggccagatccgagccgcacctgccggcccccagccccagctccagctcctgacctctcccagcctggcctggctgttcctccagggctgatggctgtcaacccatccttgtgagttcatatggactgctgcccctcgaaagggagagggtcggccccatgtccccagggagcattccatcagggacaacgtacatactgtgatgtaaacttttttttttccccccagggggcaaaagtgtgagatgccttaatctttccttcatttctgctgtctcgaacactctagcccattatttcctttcagttccttgcagcataacctctacgataagccccaagcgggttgttgtattatgacgtttatgatgttccaggtgaaggcattattaagtacctctctgggtgtggggtttggacgcaccaggatagctattgattaatgttaagggtgttctacccacagcaaagcacaccctcttaaaccaggcactgcctgggtcctggtcccgagagccctaccaggatcaggttcctgcaagccgtcagaatgtgggagcccccagcccaactgattgtaactgtcccctgttacctgtgacatgaacctccaacagcacctggaaacggttccctctgtcagctgctctgtagacagggctggggagatctcagagttcacacctcgcctgttgtaggggaggttgggggtagggtttggaatggccaagtgcccttggaacctcccacagctatggccgtcctgacctcatcccaggaactctacggtgaccaggaaccacccctctgacgaggtctgtagcggcccttctcagagtggaacagcccacagtgctagttgtgcctggtcttacctgtactccacggacctcggtgaagcaaaagcttcagggcagagggaatgaggcaacccagtggcagccccgctgggccccgtggctcctgctctcctattggacgtagaggcaggggagagacttctctatacaaatattctcatcacagaagggatgatccttgctgctctgccgtagggtttttgatgctgagctatgctgcacatgacgttaacctaaagaacttggactgagcttttaaaaaaggacagcaaacaattttataatccttaaagtgtaatagacggttacactagtgcagggtattggggaggctctttgggtgtggaggctgtcacttgtatttattgtgactctaaatctttgatagtaaaacaaatgtaaaaagaaatgtttgccaccagatgggaatagaagttccaataagcaggctggaatgggtggctatacgttgtatcacgaggaagttttagactctgaaggataataaatggatgatgtgtcaactgga

SEQ ID NO: 316916 - DNA, 4098 bp, Homo sapiens
ttgagtggctctgcggcccgctcccatctaccattggcaggatgcctgtcagtcattccgtcccgcctcctcggacccgccccggccggcggcgcgatcccgagaaccagccggcccgcgcactcactggtcgtcatgcgctgtctgtcatgaagctggccacaccttccatggggtgcgggtcctgggagtcctggctggacctcattggcttgtggcgccttcactcggagagacgcgcctcaacccggaagtgtgcgaggcgaaatctgcctagcaaccggggaagccgggctgtgaagcgggcaatttcagtgtgagactgagccgcgagactgagctgcggctccgagcgctgcgcggcggctcctcccgcccagggtcagcgccccggcgcgcgcacgcgcacccccgccgcccgagcgcgccccgcgccgcccgcgcagtcggtcggtcggtcgtctgtcctgtcgccgctgccgccgccgccacagcggccgccgcgggcgccacctgagggagtcgcctccgcgggacgccacaagacctgaccggactgcgccgcccgaggccgtcggccgccgtcagcgagggcgccgagcaacttcgttcagaatgaccgaagaagcatgccgaacacggagtcagaaacgagcgcttgaacgggacccaacagaggacgatgtggagagcaagaaaataaaaatggagagaggattgttggcttcagatttaaacactgacggagacatgagggtgacacctgagccgggagcaggtccaacccaaggattgctgagggcaacagaggccacggccatggccatgggcagaggcgaagggctggtgggcgatgggcccgtggacatgcgcacctcacacagtgacatgaagtccgagaggagacccccctcacctgacgtgattgtgctctccgacaacgagcagccctcgagcccgagagtgaatgggctgaccacggtggccttgaaggagactagcaccgaggccctcatgaaaagcagtcctgaagaacgagaaaggatgatcaagcagctgaaggaagaattgaggttagaagaagcaaaactcgtgttgttgaaaaagttgcggcagagtcaaatacaaaaggaagccaccgcccagaagcccacaggttctgttgggagcaccgtgaccacccctcccccgcttgttcggggcactcagaacattcctgctggcaagccatcactccagacctcttcagctcggatgcccggcagtgtcatacccccgcccctggtccgaggtgggcagcaggcgtcctcgaagctggggccacaggcgagctcacaggtcgtcatgcccccactcgtcaggggggctcagcaaatccacagcattaggcaacattccagcacagggccaccgcccctcctcctggccccccgggcgtcggtgcccagtgtgcagattcagggacagaggatcatccagcagggcctcatccgcgtcgccaatgttcccaacaccagcctgctcgtcaacatcccacagcccaccccagcatcactgaaggggacaacagccacctccgctcaggccaactccacccccactagtgtggcctctgtggtcacctctgccgagtctccagcaagccgacaggcggccgccaagctggcgctgcgcaaacagctggagaagacgctactcgagatccccccacccaagcccccagccccagagatgaacttcctgcccagcgccgccaacaacgagttcatctacctggtcggcctggaggaggtggtgcagaacctactggagacacaagcaggcaggatgtcggccgccactgtgctgtcccgggagccctacatgtgtgcacagtgcaagacggacttcacgtgccgctggcgggaggagaagagcggcgccatcatgtgtgagaactgcatgacaaccaaccagaagaagggcgtcccgtgcccacgtacatacgtatgtctccatgagttctgggctccactggttccaattgagctccagccctggttttcctacccatgcagttagggactttaatttaattttttttttgtagggccaccgccttcaaacacaactgctacaacattctaataaaggctcatttaacccccaggctcctgtcgtgtgaatatcctcagtctgtaggaaactttttttgacacagcatagaagacctagttttggaaaacattatctaattttttgttgtgcaaatccccaaatttctcactaatttttgtttttttgtgcataacttggatgggctgaaggaggtgaggacagattggggaagggtggctttcattccaagatccagggatttggggaaaaggaaggaatttgatgttttttggggtgggaggggagggtgtgttttttacaccaaaaaaaaaaaaaaatcaagagtatgcaagcatttctattcctcgcatttttctgtgtgcctggcaaataaatacctgtctcctacgaccctgagctgttagccctctctgttccatgacaggggccagatcttccagctcctcccagaaggagcacccaggctggcttcttcccactgaaagccctccccagcgaaccaacctcagttctatgcagtggctggggatcaggcatccagaccgaagtcacctctgcctgctccagcttgggtcagctgggtctgaccagggggccagatccgagccgcacctgccggcccccagccccagctccagctcctgacctctcccagcctggcctggctgttcctccagggctgatggctgtcaacccatccttgtgagttcatatggactgctgcccctcgaaagggagagggtcggccccatgtccccagggagcattccatcagggacaacgtacatactgtgatgtaaacttttttttttccccccagggggcaaaagtgtgagatgccttaatctttccttcatttctgctgtctcgaacactctagcccattatttcctttcagttccttgcagcataacctctacgataagccccaagcgggttgttgtattatgacgtttatgatgttccaggtgaaggcattattaagtacctctctgggtgtggggtttggacgcaccaggatagctattgattaatgttaagggtgttctacccacagcaaagcacaccctcttaaaccaggcactgcctgggtcctggtcccgagagccctaccaggatcaggttcctgcaagccgtcagaatgtgggagcccccagcccaactgattgtaactgtcccctgttacctgtgacatgaacctccaacagcacctggaaacggttccctctgtcagctgctctgtagacagggctggggagatctcagagttcacacctcgcctgttgtaggggaggttgggggtagggtttggaatggccaagtgcccttggaacctcccacagctatggccgtcctgacctcatcccaggaactctacggtgaccaggaaccacccctctgacgaggtctgtagcggcccttctcagagtggaacagcccacagtgctagttgtgcctggtcttacctgtactccacggacctcggtgaagcaaaagcttcagggcagagggaatgaggcaacccagtggcagccccgctgggccccgtggctcctgctctcctattggacgtagaggcaggggagagacttctctatacaaatattctcatcacagaagggatgatccttgctgctctgccgtagggtttttgatgctgagctatgctgcacatgacgttaacctaaagaacttggactgagcttttaaaaaaggacagcaaacaattttataatccttaaagtgtaatagacggttacactagtgcagggtattggggaggctctttgggtgtggaggctgtcacttgtatttattgtgactctaaatctttgatagtaaaacaaatgtaaaaagaaatgtttgccaccagatgggaatagaagttccaataagcaggctggaatgggtggctatacgttgtatcacgaggaagttttagactctgaaggataataaatggatgatgtgtcaactgga

SEQ ID NO: 316917 - DNA, 1204 bp, Homo sapiens
ttgagtggctctgcggcccgctcccatctaccattggcaggatgcctgtcagtcattccgtcccgcctcctcggacccgccccggccggcggcgcgatcccgagaaccagccggcccgcgcactcactggtcgtcatgcgctgtctgtcatgaagctggccacaccttccatggggtgcgggtcctgggagtcctggctggacctcattggcttgtggcgccttcactcggagagacgcgcctcaacccggaagtgtgcgaggcgaaatctgcctagcaaccggggaagccgggctgtgaagcgggcaatttcagtgtgagactgagccgcgagactgagctgcggctccgagcgctgcgcggcggctcctcccgcccagggtcagcgccccggcgcgcgcacgcgcacccccgccgcccgagcgcgccccgcgccgcccgcgcagtcggtcggtcggtcgtctgtcctgtcgccgctgccgccgccgccacagcggccgccgcgggcgccacctgagggagtcgcctccgcgggacgccacaagacctgaccggactgcgccgcccgaggccgtcggccgccgtcagcgagggcgccgagcaacttcgttcagaatgaccgaagaagcatgccgaacacggagtcagaaacgagcgcttgaacgggacccaacagaggacgatgtggagagcaagaaaataaaaatggagagaggattgttggcttcagatttaaacactgacggagacatgagggtgacacctgagccgggagcaggtccaacccaaggattgctgagggcaacagaggccacggccatggccatgggcagaggcgaagggctggtgggcgatgggcccgtggacatgcgcacctcacacagtgacatgaagtccgagaggagacccccctcacctgacgtgattgtgctctccgacaacgagcagccctcgagcccgagagtgaatgggctgaccacggtggccttgaaggagactagcaccgaggccctcatgaaaagcagtcctgaagaacgagaaaggatgatcaagcagctgaaggaagaattgaggttagaagaagcaaaactcgtgttgttgaaaaagttgcggcagagtcaaatacaaaaggaagccaccgcccagaagcccacaggttctgttggtaccgtcgacagggatcctctagatcaccccccgacca

SEQ ID NO: 316918 - DNA, 1227 bp, Homo sapiens
actcgggcaccgcaggtagggcaggaggctggagagcctgctgcccgcccgcccgtaaaatggtcccctcggctggacagctcgccctgttcgctctgggtattgtgttggctgcgtgccaggccttggagaacagcacgtccccgctgagtgcagacccgcccgtggctgcagcagtggtgtcccattttaatgactgcccagattcccacactcagttctgcttccatggaacctgcaggtttttggtgcaggaggacaagccagcatgtgtctgccattctgggtacgttggtgcacgctgtgagcatgcggacctcctggccgtggtggctgccagccagaagaagcaggccatcaccgccttggtggtggtctccatcgtggccctggctgtccttatcatcacatgtgtgctgatacactgctgccaggtccgaaaacactgtgagtggtgccgggccctcatctgccggcacgagaagcccagcgccctcctgaagggaagaaccgcttgctgccactcagaaacagtggtctgaagagcccagaggaggagtttggccaggtggactgtggcagatcaataaagaaaggcttcttcaggacagcactgccagagatgcctgggtgtgccacagaccttcctacttggcctgtaatcacctgtgcagccttttgtgggccttcaaaactctgtcaagaactccgtctgcttggggttattcagtgtgacctagagaagaaatcagcggaccacgatttcaagacttgttaaaaaagaactgcaaagagacggactcctgttcacctaggtgaggtgtgtgcagcagttggtgtctgagtccacatgtgtgcagttgtcttctgccagccatggattccaggctatatatttctttttaatgggccacctccccacaacagaattctgcccaacacaggagatttctatagttattgttttctgtcatttgcctactggggaagaaagtgaaggaggggaaactgtttaatatcacatgaagaccctagctttaagagaagctgtatcctctaaccacgagaccctcaaccagcccaacatcttccatggacacatgacattgaagaccatcccaagctatcgccacccttggagatgatgtcttatttattagatggataatggttttatttttaatctcttaagtcaatgtaaaaagtataaaaccccttcagacttct

SEQ ID NO: 316919 - DNA, 2871 bp, Homo sapiens
actcgggcaccgcaggtagggcaggaggctggagagcctgctgcccgcccgcccgtaaaatggtcccctcggctggacagctcgccctgttcgctctgggtattgtgttggctgcgtgccaggccttggagaacagcacgtccccgctgagtgcagacccgcccgtggctgcagcagtggtgtcccattttaatgactgcccagattcccacactcagttctgcttccatggaacctgcaggtttttggtgcaggaggacaagccagcatgtgtctgccattctgggtacgttggtgcacgctgtgagcatgcggacctcctggccgtggtggctgccagccagaagaagcaggccatcaccgccttggtggtggtctccatcgtggccctggctgtccttatcatcacatgtgtgctgatacactgctgccaggtccgaaaacactgtgagtggtgccgggccctcatctgccggcacgagaagcccagcgccctcctgaagggaagaaccgcttgctgccactcagaaacaggatgccggctttattaacaaaaactctaacaagtcacctccactatgtgggtcttcctttcccctcaagagaaggagcaattgttcccctgacatctgggtccatctgacccatggggcctgcctgtgagaaacagtgggtcccttcaaatacatagtggatagctcatccctaggaattttcattaaaatttggaaacagagtaatgaagaaataatatataaactccttatgtgaggaaatgctactaatatctgaaaagtgaaagatttctatgtattaactcttaagtgcacctagcttattacatcgtgaaaggtacatttaaaatatgttaaattggcttgaaattttcagagaattttgtcttcccctaattcttcttccttggtctggaagaacaatttctatgaattttctctttattttttttttataattcagacaattctatgacccgtgtcttcatttttggcactcttatttaacaatgccacacctgaagcacttggatctgttcagagctgaccccctagcaacgtagttgacacagctccaggtttttaaattactaaaataagttcaagtttacatcccttgggccagatatgtgggttgaggcttgactgtagcatcctgcttagagaccaatcaatggacactggtttttagacctctatcaatcagtagttagcatccaagagactttgcagaggcgtaggaatgaggctggacagatggcggaagcagaggttccctgcgaagacttgagatttagtgtctgtgaatgttctagttcctaggtccagcaagtcacacctgccagtgccctcatccttatgcctgtaacacacatgcagtgagaggcctcacatatacgcctccctagaagtgccttccaagtcagtcctttggaaaccagcaggtctgaaaaagaggctgcatcaatgcaagcctggttggaccattgtccatgcctcaggatagaacagcctggcttatttggggatttttcttctagaaatcaaatgactgataagcattggatccctctgccatttaatggcaatggtagtctttggttagctgcaaaaatactccatttcaagttaaaaatgcatcttctaatccatctctgcaagctccctgtgtttccttgccctttagaaaatgaattgttcactacaattagagaatcatttaacatcctgacctggtaagctgccacacacctggcagtggggagcatcgctgtttccaatggctcaggagacaatgaaaagcccccatttaaaaaaataacaaacattttttaaaaggcctccaatactcttatggagcctggatttttcccactgctctacaggctgtgactttttttaagcatcctgacaggaaatgttttcttctacatggaaagatagacagcagccaaccctgatctggaagacagggccccggctggacacacgtggaaccaagccagggatgggctggccattgtgtccccgcaggagagatgggcagaatggccctagagttcttttccctgagaaaggagaaaaagatgggattgccactcacccacccacactggtaagggaggagaatttgtgcttctggagcttctcaagggattgtgttttgcaggtacagaaaactgcctgttatcttcaagccaggttttcgagggcacatgggtcaccagttgctttttcagtcaatttggccgggatggactaatgaggctctaacactgctcaggagacccctgccctctagttggttctgggctttgatctcttccaacctgcccagtcacagaaggaggaatgactcaaatgcccaaaaccaagaacacattgcagaagtaagacaaacatgtatatttttaaatgttctaacataagacctgttctctctagccattgatttaccaggctttctgaaagatctagtggttcacacagagagagagagagtactgaaaaagcaactcctcttgttagtcttaataatttactaaaatggtcaacttttcattatctttattataataaacctgatgcttttttttagaactccttactctgatgtctgtatatgttgcactgaaaaggttaatatttaatgttttaatttattttgtgtggtaagttaattttgatttctgtaatgtgttaatgtgattagcagttattttccttaatatctgaattatacttaaagagtagtgagcaatataagacgcaattgtgtttttcagtaatgtgcattgttattgagttgtactgtaccttatttggaaggatgaaggaatgaatctttttttcctaa

SEQ ID NO: 316920 - DNA, 3733 bp, Homo sapiens
ttgcatgatacaatcgagctctgtacccagcagcatagatactgctgccaggtccgaaaacactgtgagtggtgccgggccctcatctgccggcacgagaagcccagcgccctcctgaagggaagaaccgcttgctgccactcagaaacagtggtctgaagagcccagaggaggagtttggccaggtggactgtggcagatcaataaagaaaggcttcttcaggacagcactgccagagatgcctgggtgtgccacagaccttcctacttggcctgtaatcacctgtgcagccttttgtgggccttcaaaactctgtcaagaactccgtctgcttggggttattcagtgtgacctagagaagaaatcagcggaccacgatttcaagacttgttaaaaaagaactgcaaagagacggactcctgttcacctaggtgaggtgtgtgcagcagttggtgtctgagtccacatgtgtgcagttgtcttctgccagccatggattccaggctatatatttctttttaatgggccacctccccacaacagaattctgcccaacacaggagatttctatagttattgttttctgtcatttgcctactggggaagaaagtgaaggaggggaaactgtttaatatcacatgaagaccctagctttaagagaagctgtatcctctaaccacgagaccctcaaccagcccaacatcttccatggacacatgacattgaagaccatcccaagctatcgccacccttggagatgatgtcttatttattagatggataatggttttatttttaatctcttaagtcaatgtaaaaagtataaaaccccttcagacttctacattaatgatgtatgtgttgctgactgaaaagctatactgattagaaatgtctggcctcttcaagacagctaaggcttgggaaaagtcttccagggtgcggagatggaaccagaggctgggttactggtaggaataaaggtaggggttcagaaatggtgccattgaagccacaaagccggtaaatgcctcaatacgttctgggagaaaacttagcaaatccatcagcagggatctgtcccctctgttggggagagaggaagagtgtgtgtgtctacacaggataaacccaatacatattgtactgctcagtgattaaatgggttcacttcctcgtgagccctcggtaagtatgtttagaaatagaacattagccacgagccataggcatttcaggccaaatccatgaaagggggaccagtcatttattttccattttgttgcttggttggtttgttgctttatttttaaaaggagaagtttaactttgctatttattttcgagcactaggaaaactattccagtaatttttttttcctcatttccattcaggatgccggctttattaacaaaaactctaacaagtcacctccactatgtgggtcttcctttcccctcaagagaaggagcaattgttcccctgacatctgggtccatctgacccatggggcctgcctgtgagaaacagtgggtcccttcaaatacatagtggatagctcatccctaggaattttcattaaaatttggaaacagagtaatgaagaaataatatataaactccttatgtgaggaaatgctactaatatctgaaaagtgaaagatttctatgtattaactcttaagtgcacctagcttattacatcgtgaaaggtacatttaaaatatgttaaattggcttgaaattttcagagaattttgtcttcccctaattcttcttccttggtctggaagaacaatttctatgaattttctctttattttttttttataattcagacaattctatgacccgtgtcttcatttttggcactcttatttaacaatgccacacctgaagcacttggatctgttcagagctgaccccctagcaacgtagttgacacagctccaggtttttaaattactaaaataagttcaagtttacatcccttgggccagatatgtgggttgaggcttgactgtagcatcctgcttagagaccaatcaatggacactggtttttagacctctatcaatcagtagttagcatccaagagactttgcagaggcgtaggaatgaggctggacagatggcggaagcagaggttccctgcgaagacttgagatttagtgtctgtgaatgttctagttcctaggtccagcaagtcacacctgccagtgccctcatccttatgcctgtaacacacatgcagtgagaggcctcacatatacgcctccctagaagtgccttccaagtcagtcctttggaaaccagcaggtctgaaaaagaggctgcatcaatgcaagcctggttggaccattgtccatgcctcaggatagaacagcctggcttatttggggatttttcttctagaaatcaaatgactgataagcattggatccctctgccatttaatggcaatggtagtctttggttagctgcaaaaatactccatttcaagttaaaaatgcatcttctaatccatctctgcaagctccctgtgtttccttgccctttagaaaatgaattgttcactacaattagagaatcatttaacatcctgacctggtaagctgccacacacctggcagtggggagcatcgctgtttccaatggctcaggagacaatgaaaagcccccatttaaaaaaataacaaacattttttaaaaggcctccaatactcttatggagcctggatttttcccactgctctacaggctgtgactttttttaagcatcctgacaggaaatgttttcttctacatggaaagatagacagcagccaaccctgatctggaagacagggccccggctggacacacgtggaaccaagccagggatgggctggccattgtgtccccgcaggagagatgggcagaatggccctagagttcttttccctgagaaaggagaaaaagatgggattgccactcacccacccacactggtaagggaggagaatttgtgcttctggagcttctcaagggattgtgttttgcaggtacagaaaactgcctgttatcttcaagccaggttttcgagggcacatgggtcaccagttgctttttcagtcaatttggccgggatggactaatgaggctctaacactgctcaggagacccctgccctctagttggttctgggctttgatctcttccaacctgcccagtcacagaaggaggaatgactcaaatgcccaaaaccaagaacacattgcagaagtaagacaaacatgtatatttttaaatgttctaacataagacctgttctctctagccattgatttaccaggctttctgaaagatctagtggttcacacagagagagagagagtactgaaaaagcaactcctcttgttagtcttaataatttactaaaatggtcaacttttcattatctttattataataaacctgatgcttttttttagaactccttactctgatgtctgtatatgttgcactgaaaaggttaatatttaatgttttaatttattttgtgtggtaagttaattttgatttctgtaatgtgttaatgtgattagcagttattttccttaatatctgaattatacttaaagagtagtgagcaatataagacgcaattgtgtttttcagtaatgtgcattgttattgagttgtactgtaccttatttggaaggatgaaggaatgaatctttttttcctaa

SEQ ID NO: 316921 - DNA, 2903 bp, Homo sapiens
actcgggcaccgcaggtagggcaggaggctggagagcctgctgcccgcccgcccgtaaaatggtcccctcggctggacagctcgccctgttcgctctgggtattgtgttggctgcgtgccaggccttggagaacagcacgtccccgctgagtgcagacccgcccgtggctgcagcagtggtgtcccattttaatgactgcccagattcccacactcagttctgcttccatggaacctgcaggtttttggtgcaggaggacaagccagcatgtgtctgccattctgggtacgttggtgcacgctgtgagcatgcggacctcctggccgtggtggctgccagccagaagaagcaggccatcaccgccttggtggtggtctccatcgtggccctggctgtccttatcatcacatgtgtgctgatacactgctgccaggtccgaaaacactgtgagtggtgccgggccctcatctgccggcacgagaagcccagcgccctcctgaagggaagaaccgcttgctgccactcagaaacagctaccttgggctaatctattgagctaatgaaggatgccggctttattaacaaaaactctaacaagtcacctccactatgtgggtcttcctttcccctcaagagaaggagcaattgttcccctgacatctgggtccatctgacccatggggcctgcctgtgagaaacagtgggtcccttcaaatacatagtggatagctcatccctaggaattttcattaaaatttggaaacagagtaatgaagaaataatatataaactccttatgtgaggaaatgctactaatatctgaaaagtgaaagatttctatgtattaactcttaagtgcacctagcttattacatcgtgaaaggtacatttaaaatatgttaaattggcttgaaattttcagagaattttgtcttcccctaattcttcttccttggtctggaagaacaatttctatgaattttctctttattttttttttataattcagacaattctatgacccgtgtcttcatttttggcactcttatttaacaatgccacacctgaagcacttggatctgttcagagctgaccccctagcaacgtagttgacacagctccaggtttttaaattactaaaataagttcaagtttacatcccttgggccagatatgtgggttgaggcttgactgtagcatcctgcttagagaccaatcaatggacactggtttttagacctctatcaatcagtagttagcatccaagagactttgcagaggcgtaggaatgaggctggacagatggcggaagcagaggttccctgcgaagacttgagatttagtgtctgtgaatgttctagttcctaggtccagcaagtcacacctgccagtgccctcatccttatgcctgtaacacacatgcagtgagaggcctcacatatacgcctccctagaagtgccttccaagtcagtcctttggaaaccagcaggtctgaaaaagaggctgcatcaatgcaagcctggttggaccattgtccatgcctcaggatagaacagcctggcttatttggggatttttcttctagaaatcaaatgactgataagcattggatccctctgccatttaatggcaatggtagtctttggttagctgcaaaaatactccatttcaagttaaaaatgcatcttctaatccatctctgcaagctccctgtgtttccttgccctttagaaaatgaattgttcactacaattagagaatcatttaacatcctgacctggtaagctgccacacacctggcagtggggagcatcgctgtttccaatggctcaggagacaatgaaaagcccccatttaaaaaaataacaaacattttttaaaaggcctccaatactcttatggagcctggatttttcccactgctctacaggctgtgactttttttaagcatcctgacaggaaatgttttcttctacatggaaagatagacagcagccaaccctgatctggaagacagggccccggctggacacacgtggaaccaagccagggatgggctggccattgtgtccccgcaggagagatgggcagaatggccctagagttcttttccctgagaaaggagaaaaagatgggattgccactcacccacccacactggtaagggaggagaatttgtgcttctggagcttctcaagggattgtgttttgcaggtacagaaaactgcctgttatcttcaagccaggttttcgagggcacatgggtcaccagttgctttttcagtcaatttggccgggatggactaatgaggctctaacactgctcaggagacccctgccctctagttggttctgggctttgatctcttccaacctgcccagtcacagaaggaggaatgactcaaatgcccaaaaccaagaacacattgcagaagtaagacaaacatgtatatttttaaatgttctaacataagacctgttctctctagccattgatttaccaggctttctgaaagatctagtggttcacacagagagagagagagtactgaaaaagcaactcctcttgttagtcttaataatttactaaaatggtcaacttttcattatctttattataataaacctgatgcttttttttagaactccttactctgatgtctgtatatgttgcactgaaaaggttaatatttaatgttttaatttattttgtgtggtaagttaattttgatttctgtaatgtgttaatgtgattagcagttattttccttaatatctgaattatacttaaagagtagtgagcaatataagacgcaattgtgtttttcagtaatgtgcattgttattgagttgtactgtaccttatttggaaggatgaaggaatgaatctttttttcctaa

SEQ ID NO: 316922 - DNA, 509 bp, Homo sapiens
  misc_feature (26)..(26): n is a, c, g, or t
  misc_feature (35)..(35): n is a, c, g, or t
  misc_feature (38)..(38): n is a, c, g, or t
ggtgactcttgagtatccccatcgancatcaaagnacnggaagtaagacaaacatgtatatttttaaatgttctaacataagacctgttctctctagccattgatttaccaggctttctgaaagatctagtggttcacacagagagagagagagtactgaaaaagcaactcctcttgttagtcttaataatttactaaaatggtcaacttttcattatctttattataataaacctgatgcttttttttagaactccttactctgatgtctgtatatgttgcactgaaaaggttaatatttaatgttttaatttattttgtgtggtaagttaattttgatttctgtaatgtgttaatgtgattagcagttattttccttaatatctgaattatacttaaagagtagtgagcaatataagacgcaattgtgtttttcagtaatgtgcattgttattgagttgtactgtaccttatttggaaggatgaaggaatgaatctttttttcctaa

SEQ ID NO: 316923 - DNA, 466 bp, Homo sapiens
ggctgcgtgccaggccttggagaacagcacgtccccgctgagtggtgagtgcagctgccgtgggtgtgtggatcgtgtgtgggaagggagcgggcctgctgctgtgtggctcctcaagagctccctccctggcctcctgcccaccgagcacacgcctgtcccggagtcctctctgccccctcctcaggggcgaggaggcgctcactggaaggtcttaactgcaggcccaagggggggctgttcctggccccctcaggggcctcccctacgtgtctctcttcagctgttcagacaattcctgtgggcaagtgtgccaaaacagggcctgcaggaccccagagcttggggccagctgttttccccactctcgtaatagtccacctgaagtagaacccagatttctgaaccctcatcggtgacctttgtttagttattttctggtttacgttttaatacttatagtaaa

SEQ ID NO: 316924 - DNA, 4116 bp, Homo sapiens
actcgggcaccgcaggtagggcaggaggctggagagcctgctgcccgcccgcccgtaaaatggtcccctcggctggacagctcgccctgttcgctctgggtattgtgttggctgcgtgccaggccttggagaacagcacgtccccgctgagtgcagacccgcccgtggctgcagcagtggtgtcccattttaatgactgcccagattcccacactcagttctgcttccatggaacctgcaggtttttggtgcaggaggacaagccagcatgtgtctgccattctgggtacgttggtgcacgctgtgagcatgcggacctcctggccgtggtggctgccagccagaagaagcaggccatcaccgccttggtggtggtctccatcgtggccctggctgtccttatcatcacatgtgtgctgatacactgctgccaggtccgaaaacactgtgagtggtgccgggccctcatctgccggcacgagaagcccagcgccctcctgaagggaagaaccgcttgctgccactcagaaacagtggtctgaagagcccagaggaggagtttggccaggtggactgtggcagatcaataaagaaaggcttcttcaggacagcactgccagagatgcctgggtgtgccacagaccttcctacttggcctgtaatcacctgtgcagccttttgtgggccttcaaaactctgtcaagaactccgtctgcttggggttattcagtgtgacctagagaagaaatcagcggaccacgatttcaagacttgttaaaaaagaactgcaaagagacggactcctgttcacctaggtgaggtgtgtgcagcagttggtgtctgagtccacatgtgtgcagttgtcttctgccagccatggattccaggctatatatttctttttaatgggccacctccccacaacagaattctgcccaacacaggagatttctatagttattgttttctgtcatttgcctactggggaagaaagtgaaggaggggaaactgtttaatatcacatgaagaccctagctttaagagaagctgtatcctctaaccacgagaccctcaaccagcccaacatcttccatggacacatgacattgaagaccatcccaagctatcgccacccttggagatgatgtcttatttattagatggataatggttttatttttaatctcttaagtcaatgtaaaaagtataaaaccccttcagacttctacattaatgatgtatgtgttgctgactgaaaagctatactgattagaaatgtctggcctcttcaagacagctaaggcttgggaaaagtcttccagggtgcggagatggaaccagaggctgggttactggtaggaataaaggtaggggttcagaaatggtgccattgaagccacaaagccggtaaatgcctcaatacgttctgggagaaaacttagcaaatccatcagcagggatctgtcccctctgttggggagagaggaagagtgtgtgtgtctacacaggataaacccaatacatattgtactgctcagtgattaaatgggttcacttcctcgtgagccctcggtaagtatgtttagaaatagaacattagccacgagccataggcatttcaggccaaatccatgaaagggggaccagtcatttattttccattttgttgcttggttggtttgttgctttatttttaaaaggagaagtttaactttgctatttattttcgagcactaggaaaactattccagtaatttttttttcctcatttccattcaggatgccggctttattaacaaaaactctaacaagtcacctccactatgtgggtcttcctttcccctcaagagaaggagcaattgttcccctgacatctgggtccatctgacccatggggcctgcctgtgagaaacagtgggtcccttcaaatacatagtggatagctcatccctaggaattttcattaaaatttggaaacagagtaatgaagaaataatatataaactccttatgtgaggaaatgctactaatatctgaaaagtgaaagatttctatgtattaactcttaagtgcacctagcttattacatcgtgaaaggtacatttaaaatatgttaaattggcttgaaattttcagagaattttgtcttcccctaattcttcttccttggtctggaagaacaatttctatgaattttctctttattttttttttataattcagacaattctatgacccgtgtcttcatttttggcactcttatttaacaatgccacacctgaagcacttggatctgttcagagctgaccccctagcaacgtagttgacacagctccaggtttttaaattactaaaataagttcaagtttacatcccttgggccagatatgtgggttgaggcttgactgtagcatcctgcttagagaccaatcaatggacactggtttttagacctctatcaatcagtagttagcatccaagagactttgcagaggcgtaggaatgaggctggacagatggcggaagcagaggttccctgcgaagacttgagatttagtgtctgtgaatgttctagttcctaggtccagcaagtcacacctgccagtgccctcatccttatgcctgtaacacacatgcagtgagaggcctcacatatacgcctccctagaagtgccttccaagtcagtcctttggaaaccagcaggtctgaaaaagaggctgcatcaatgcaagcctggttggaccattgtccatgcctcaggatagaacagcctggcttatttggggatttttcttctagaaatcaaatgactgataagcattggatccctctgccatttaatggcaatggtagtctttggttagctgcaaaaatactccatttcaagttaaaaatgcatcttctaatccatctctgcaagctccctgtgtttccttgccctttagaaaatgaattgttcactacaattagagaatcatttaacatcctgacctggtaagctgccacacacctggcagtggggagcatcgctgtttccaatggctcaggagacaatgaaaagcccccatttaaaaaaataacaaacattttttaaaaggcctccaatactcttatggagcctggatttttcccactgctctacaggctgtgactttttttaagcatcctgacaggaaatgttttcttctacatggaaagatagacagcagccaaccctgatctggaagacagggccccggctggacacacgtggaaccaagccagggatgggctggccattgtgtccccgcaggagagatgggcagaatggccctagagttcttttccctgagaaaggagaaaaagatgggattgccactcacccacccacactggtaagggaggagaatttgtgcttctggagcttctcaagggattgtgttttgcaggtacagaaaactgcctgttatcttcaagccaggttttcgagggcacatgggtcaccagttgctttttcagtcaatttggccgggatggactaatgaggctctaacactgctcaggagacccctgccctctagttggttctgggctttgatctcttccaacctgcccagtcacagaaggaggaatgactcaaatgcccaaaaccaagaacacattgcagaagtaagacaaacatgtatatttttaaatgttctaacataagacctgttctctctagccattgatttaccaggctttctgaaagatctagtggttcacacagagagagagagagtactgaaaaagcaactcctcttgttagtcttaataatttactaaaatggtcaacttttcattatctttattataataaacctgatgcttttttttagaactccttactctgatgtctgtatatgttgcactgaaaaggttaatatttaatgttttaatttattttgtgtggtaagttaattttgatttctgtaatgtgttaatgtgattagcagttattttccttaatatctgaattatacttaaagagtagtgagcaatataagacgcaattgtgtttttcagtaatgtgcattgttattgagttgtactgtaccttatttggaaggatgaaggaatgaatctttttttcctaa

SEQ ID NO: 316925 - DNA, 4062 bp, Homo sapiens
actcgggcaccgcaggtagggcaggaggctggagagcctgctgcccgcccgcccgtaaaatggtcccctcggctggacagctcgccctgttcgctctgggtattgtgttggctgcgtgccaggccttggagaacagcacgtccccgctgagtgcagacccgcccgtggctgcagcagtggtgtcccattttaatgactgcccagattcccacactcagttctgcttccatggaacctgcaggtttttggtgcaggaggacaagccagcatgtgtctgccattctgggtacgttggtgcacgctgtgagcatgcggacctcctggccgtggtggctgccagccagaagaagcaggccatcaccgccttggtggtggtctccatcgtggccctggctgtccttatcatcacatgtgtgctgatacactgctgccaggtccgaaaacactgtgagtggtgccgggccctcatctgccggcacgagaagcccagcgccctcctgaagggaagaaccgcttgctgccactcagaaacagtggtctgaagagcccagaggaggagtttggccaggtggactgtggcagatcaataaagaaaggcttcttcaggacagcactgccagagatgcctgggtgtgccacagaccttcctacttggcctgtaatcacctgtgcagccttttgtgggccttcaaaactctgtcaagaactccgtctgcttggggttattcagtgtgacctagagaagaaatcagcggaccacgatttcaagacttgttaaaaaagaactgcaaagagacggactcctgttcacctaggtgaggtgtgtgcagcagttggtgtctgagtccacatgtgtgcagttgtcttctgccagccatggattccaggctatatatttctttttaatgggccacctccccacaacagaattctgcccaacacaggagatttctatagttattgttttctgtcatttgcctactggggaagaaagtgaaggaggggaaactgtttaatatcacatgaagaccctagctttaagagaagctgtatcctctaaccacgagaccctcaaccagcccaacatcttccatggacacatgacattgaagaccatcccaagctatcgccacccttggagatgatgtcttatttattagatggataatggttttatttttaatctcttaagtcaatgtaaaaagtataaaaccccttcagacttctacattaatgatgtatgtgttgctgactgaaaagctatactgattagaaatgtctggcctcttcaagacagctaaggcttgggaaaagtcttccagggtgcggagatggaaccagaggctgggttactggtaggaataaaggtaggggttcagaaatggtgccattgaagccacaaagccggtaaatgcctcaatacgttctgggagaaaacttagcaaatccatcagcagggatctgtcccctctgttggggagagaggaagagtgtgtgtgtctacacaggataaacccaatacatattgtactgctcagtgattaaatgggttcacttcctcgtgagccctcggtaagtatgtttagaaatagaacattagccacgagccataggcatttcaggccaaatccatgaaagggggaccagtcatttattttccattttgttgcttggttggtttgttgctttatttttaaaaggagaagtttaactttgctatttattttcgagcactaggaaaactattccagtaatttttttttcctcatttccattcaggatgccggctttattaacaaaaactctaacaagtcacctccactatgtgggtcttcctttcccctcaagagaaggagcaattgttcccctgacatctgggtccatctgacccatggggcctgcctgtgagaaacagtgggtcccttcaaatacatagtggatagctcatccctaggaattttcattaaaatttggaaacagagtaatgaagaaataatatataaactccttatgtgaggaaatgctactaatatctgaaaagtgaaagatttctatgtattaactcttaagtgcacctagcttattacatcgtgaaaggtacatttaaaatatgttaaattggcttgaaattttcagagaattttgtcttcccctaattcttcttccttggtctggaagaacaatttctatgaattttctctttattttttttttataattcagacaattctatgacccgtgtcttcatttttggcactcttatttaacaatgccacacctgaagcacttggatctgttcagagctgaccccctagcaacgtagttgacacagctccaggtttttaaattactaaaataagttcaagtttacatcccttgggccagatatgtgggttgaggcttgactgtagcatcctgcttagagaccaatcaatggacactggtttttagacctctatcaatcagtagttagcatccaagagactttgcagaggcgtaggaatgaggctggacagatggcggaagcagaggttccctgcgaagacttgagatttagtgtctgtgaatgttctagttcctaggtccagcaagtcacacctgccagtgccctcatccttatgcctgtaacacacatgcagtgagaggcctcacatatacgcctccctagaagtgccttccaagtcagtcctttggaaaccagcaggtctgaaaaagaggctgcatcaatgcaagcctggttggaccattgtccatgcctcaggatagaacagcctggcttatttggggatttttcttctagaaatcaaatgactgataagcattggatccctctgccatttaatggcaatggtagtctttggttagctgcaaaaatactccatttcaagttaaaaatgcatcttctaatccatctctgcaagctccctgtgtttccttgccctttagaaaatgaattgttcactacaattagagaatcatttaacatcctgacctggtaagctgccacacacctggcagtggggagcatcgctgtttccaatggctcaggagacaatgaaaagcccccatttaaaaaaataacaaacattttttaaaaggcctccaatactcttatggagcctggatttttcccactgctctacaggctgtgactttttttaagcatcctgacaggaaatgttttcttctacatggaaagatagacagcagccaaccctgatctggaagacagggccccggctggacacacgtggaaccaagccagggatgggctggccattgtgtccccgcaggagagatgggcagaatggccctagagttcttttccctgagaaaggagaaaaagatgggattgccactcacccacccacactggtaagggaggagaatttgtgcttctggagcttctcaagggattgtgttttgcaggtacagaaaactgcctgttatcttcaagccaggttttcgagggcacatgggtcaccagttgctttttcagtcaatttggccgggatggactaatgaggctctaacactgctcaggagacccctgccctctagttggttctgggctttgatctcttccaacctgcccagtcacagaaggaggaatgactcaaatgcccaaaaccaagaacacattgcagaagtaagacaaacatgtatatttttaaatgttctaacataagacctgttctctctagccattgatttaccaggctttctgaaagatctagtggttcacacagagagagagagagtattcattatctttattataataaacctgatgcttttttttagaactccttactctgatgtctgtatatgttgcactgaaaaggttaatatttaatgttttaatttattttgtgtggtaagttaattttgatttctgtaatgtgttaatgtgattagcagttattttccttaatatctgaattatacttaaagagtagtgagcaatataagacgcaattgtgtttttcagtaatgtgcattgttattgagttgtactgtaccttatttggaaggatgaaggaatgaatctttttttcctaa

SEQ ID NO: 316926 - DNA, 1618 bp, Homo sapiens
actcgggcaccgcaggtagggcaggaggctggagagcctgctgcccgcccgcccgtaaaatggtcccctcggctggacagctcgccctgttcgctctgggtattgtgttggctgcgtgccaggccttggagaacagcacgtccccgctgagtgcagacccgcccgtggctgcagcagtggtgtcccattttaatgactgcccagattcccacactcagttctgcttccatggaacctgcaggtttttggtgcaggaggacaagccagcatgtgtctgccattctgggtacgttggtgcacgctgtgagcatgcggacctcctggccgtggtggctgccagccagaagaagcaggccatcaccgccttggtggtggtctccatcgtggccctggctgtccttatcatcacatgtgtgctgatacactgctgccaggtccgaaaacactgtgagtggtgccgggccctcatctgccggcacgagaagcccagcgccctcctgaagggaagaaccgcttgctgccactcagaaacagtggtctgaagagcccagaggaggagtttggccaggtggactgtggcagatcaataaagaaaggcttcttcaggacagcactgccagagatgcctgggtgtgccacagaccttcctacttggcctgtaatcacctgtgcagccttttgtgggccttcaaaactctgtcaagaactccgtctgcttggggttattcagtgtgacctagagaagaaatcagcggaccacgatttcaagacttgttaaaaaagaactgcaaagagacggactcctgttcacctaggtgaggtgtgtgcagcagttggtgtctgagtccacatgtgtgcagttgtcttctgccagccatggattccaggctatatatttctttttaatgggccacctccccacaacagaattctgcccaacacaggagatttctatagttattgttttctgtcatttgcctactggggaagaaagtgaaggaggggaaactgtttaatatcacatgaagaccctagctttaagagaagctgtatcctctaaccacgagaccctcaaccagcccaacatcttccatggacacatgacattgaagaccatcccaagctatcgccacccttggagatgatgtcttatttattagatggataatggttttatttttaatctcttaagtcaatgtaaaaagtataaaaccccttcagacttctacattaatgatgtatgtgttgctgactgaaaagctatactgattagaaatgtctggcctcttcaagacagctaaggcttgggaaaagtcttccagggtgcggagatggaaccagaggctgggttactggtaggaataaaggtaggggttcagaaatggtgccattgaagccacaaagccggtaaatgcctcaatacgttctgggagaaaacttagcaaatccatcagcagggatctgtcccctctgttggggagagaggaagagtgtgtgtgtctacacaggataaacccaatacatattgtactgctcagtgattaaatgggttcacttcctcgtgagccctcggtaatatctatgctgctgggtacagagctcgattgtatcatgtcta

SEQ ID NO: 316927 - DNA, 458 bp, Homo sapiens
agaataaggagaccgagactgcgaaggagaacgcagcaagcccaggcggcggtggaaaggctggaggacacacctaaacatgtggaatcccaatgccgggcagccagggccaaatccatatccccccaatattgggtgccctggaggttccaatcctgcccacccaccacctattaatccaccctttcccccaggcccctgtcctcctcccccaggagctccccatggcaatccagctttccccccaggtgggccccctcatcctgtgccacagccagggtatccaggatgccaaccgttgggtccctaccctcctccatacccaccgcctgcccctggaatccctcctgtgaatcccttggctcctggcatggttggaccagcagtgatagtggacaagaagatgcagaagaaaatgaagaaagctcataaaaagatgcacaagcaccaaaagcacc

SEQ ID NO: 316928 - DNA, 423 bp, Homo sapiens
tagtctggaagcgcctacctagcaatatcaaccattaaccttccctctacacttatcatcttcacaattctaattctactgactatcctagaaatcgctgtcgccttaatccaagcctacgttttcacacttctagtaagcttccaggcttgattgcaggcccctgtcctcctcccccaggagctccccatggcaatccagctttccccccaggtgggccccctcatcctgtgccacagccagggtatccaggatgccaaccgttgggtccctaccctcctccatacccaccgcctgcccctggaatccctcctgtgaatcccttggctcctggcatggttggaccagcagtgatagtggacaagaagatgcagaagaaaatgaagaaagctcataaaaagatgcacaagcaccaaaagcacc

SEQ ID NO: 316929 - DNA, 2263 bp, Homo sapiens
tgggaaggggctcagcgtgggaaaggatggttgagttttaaccagaggcaaagcgtgagcgggatcagtgtgtgcggaacgcaagcagccgagagcggagaggcgccgctgtagttaactcctccctgcccgccgcgccgaccctccccaggaacccccagggagccagcatgaagcgagctcaccccgagtacagctcctcggacagcgagctggacgagaccatcgaggtggagaaggagagtgcggacgagaatggaaacttgagttcggctctaggttccatgtccccaactacatcttcccagattttggccagaaaaagacggagaggaataattgagaagcgccgacgagaccggatcaataacagtttgtctgagctgagaaggctggtacccagtgcttttgagaagcagggatctgctaagctagaaaaagccgagatcctgcagatgaccgtggatcacctgaaaatgctgcatacggcaggagggaaaggttactttgacgcgcacgcccttgctatggactatcggagtttgggatttcgggaatgcctggcagaagttgcgcgttatctgagcatcattgaaggactagatgcctctgacccgcttcgagttcgactggtttcgcatctcaacaactacgcttcccagcgggaagccgcgagcggcgcccacgcgggcctcggacacattccctgggggaccgtcttcggacatcacccgcacatcgcgcacccgctgttgctgccccagaacggccacgggaacgcgggcaccacggcctcacccacggaaccgcaccaccagggcaggctgggctcggcacatccggaggcgcctgctttgcgagcgccccctagcggcagcctcggaccggtgctccctgtggtcacctccgcctccaaactgtcgccgcctctgctctcctcagtggcctccctgtcggccttccccttctctttcggctccttccacttactgtctcccaatgcactgagcccttcagcacccacgcaggctgcaaaccttggcaagccctatagaccttgggggacggagatcggagctttttaaagaactgatgtagaatgagggaggggaaagtttaaaatcccagctgggctggactgttgccaacatcaccttaaagtcgtcagtaaaagtaaaaaggaaaaaggtacactttcagataattttttttttaaagactaaaggtttgttggtttacttttttcttttttaatgtttttttcatcatgtcatgtattagcagtttttaaaaactagttgttaaattttgttcaagacattaaattgaaatagtgagtataagccaacactttgtgataggtttgtactgtgcctaatttactttgtaaaccagaatgattccgtttttgcctcaaaatttggggaatcttaacatttagtatttttggtctgtttttctccttgtatagttatggtctgtttttagaattaattttccaaaccactatgcttaatgttaacatgattctgtttgttaatattttgacagattaaggtgttgtataaataatattcttttggggggaggggaactatattgaattttatatttctgagcaaagcgttgacaaatcagatgatcagctttatccaagaaagaagactagtaaattgtctgcctcctatagcagaaaggtgaatgtacaaactgttggtggccctgaatccatctgaccagctgctggtatctgccaggactggcagttctgatttagttaggagagagccgctgataggttaggtctcatttggagtgttggtggaaaggaaactgaaggtaattgaatagaatacgcctgcatttaccagccccagcaacacaaagaatttttaatcacacggatctcaaattcacaaatgttaacatggataagtgatcatggtgtgcgagtggtcaattgagtagtacagtggaacctgttaaatgcataacctaattttcctgggactgccatattttcttttaactggaaatttttatgtgagttttccttttggtgcatggaactgtggttgccaaggtatttaaaagggctttcctgcctccttctctttgatttatttaatttgatttgggctataaaatatcatttttcaggtttattcttttagcaggtgtagttaaacgacctccactgaactgggtttgacctctgttgtactgatgtgttgtgactaaataaaaaagaaagaacaaagta

SEQ ID NO: 316930 - DNA, 957 bp, Homo sapiens
ctgcaaccaggtgtcgtccacgggcgggggcatgggcatggtgacagtggtcctgttgatgtcaccgatgatgctgagcgcctccttcagcgcgtggtgcatgtgcagcatctcgtcgtgctgctgtgcctgctctgccaactcctccatcagtgtgttctggttcccacatgagtacatattggccagcggctccgagatgatgaactccggggtctgagagtgggcaaacagggaagaaggttgggacctggtgcctgtgccgccctggctgccttgctgggcccttctgggactgtgcgctggacttggagccccttggagtatggcttttcacacgggcttctataccgcttcgactggaagatccacctccccactgccttttctcactcagatggggacaccgaggtccagaggaaaagacacctgtcaaatgtcacagatctgggaggggacttaagacctatcatgccaagaggacacctgtctactcagtttttttttggtggggcggggggcggtgatagggtctcgctctgtcaccaggctggagtacagtgatgactgctcactgcagcctccacctcctgggctcaaagtgatcctccaacgtcagcctctcgagtagctaggactacaggcacatgccaccaccaagcccagctatttttaaaatttttgtgtggagacaaggtctcactatgtggcccaggctggtctcgaactcctgggctcaagtgatcctcctgcctcggcctccaggagtgggagttggagttgatgcctggatacaggagctctgtgggtgggagtgagacaaaacacagggtcctgagctctggggaccaagcaatgtcctctggtgaaaaaaatcctggacttgctggcagaagatttgcctcttactcgccatgtgctctgaatacatttacctgccctctgggagcttcagtt

SEQ ID NO: 316931 - DNA, 2926 bp, Homo sapiens
gcagcttccatggcctggggctgtgagaggcccgggaaggcactgtctttgcgcctgcacatgtgtgtgtctggagtgtaggatggcactggtgccgggcctgggcttcctcgagcgtcccaccggctggaagttgtagacgcggccctggacgtgggtgcgcgccaacaccgggcggcgcgtgctgtagatggagacgcgcgggtctaggctcaccggcggccagggccgcgtctacaacttcctcgagcgtcccaccggctggaaatgcttcgtttaccacttcgccgtcttcctcatcgtcctggtctgcctcatcttcagcgtgctgtccaccatcgagcagtatgccgccctggccacggggactctcttctggatggagatcgtgctggtggtgttcttcgggacggagtacgtggtccgcctctggtccgccggctgccgcagcaagtacgtgggcctctgggggcggctgcgctttgcccggaagcccatttccatcatcgacctcatcgtggtcgtggcctccatggtggtcctctgcgtgggctccaaggggcaggtgtttgccacgtcggccatcaggggcatccgcttcctgcagatcctgaggatgctacacgtcgaccgccagggaggcacctggaggctcctgggctccgtggtcttcatccaccgccaggagctgataaccaccctgtacatcggcttcctgggcctcatcttctcctcgtactttgtgtacctggctgagaaggacgcggtgaacgagtcaggccgcgtggagttcggcagctacgcagatgcgctgtggtggggggtggtcacagtcaccaccatcggctatggggacaaggtgccccagacgtgggtcgggaagaccatcgcctcctgcttctctgtctttgccatctccttctttgcgctcccagcggggattcttggctcggggtttgccctgaaggtgcagcagaagcagaggcagaagcacttcaaccggcagatcccggcggcagcctcactcattcagaccgcatggaggtgctatgctgccgagaaccccgactcctccacctggaagatctacatccggaaggccccccggagccacactctgctgtcacccagccccaaacccaagaagtctgtggtggtaaagaaaaaaaagttcaagctggacaaagacaatggggtgactcctggagagaagatgctcacagtcccccatatcacgtgcgaccccccagaagagcggcggctggaccacttctctgtcgacggctatgacagttctgtaaggaagagcccaacactgctggaagtgagcatgccccatttcatgagaaccaacagcttcgccgaggacctggacctggaaggggagactctgctgacacccatcacccacatctcacagctgcgggaacaccatcgggccaccattaaggtcattcgacgcatgcagtactttgtggccaagaagaaattccagcaagcgcggaagccttacgatgtgcgggacgtcattgagcagtactcgcagggccacctcaacctcatggtgcgcatcaaggagctgcagaggaggctggaccagtccattgggaagccctcactgttcatctccgtctcagaaaagagcaaggatcgcggcagcaacacgatcggcgcccgcctgaaccgagtagaagacaaggtgacgcagctggaccagaggctggcactcatcaccgacatgcttcaccagctgctctccttgcacggtggcagcacccccggcagcggcggcccccccagagagggcggggcccacatcacccagccctgcggcagtggcggctccgtcgaccctgagctcttcctgcccagcaacaccctgcccacctacgagcagctgaccgtgcccaggaggggccccgatgaggggtcctgaggaggggatggggctgggggatgggcctgagtgagaggggaggccaagagtggccccacctggccctctctgaaggaggccacctcctaaaaggcccagagagaagagccccactctcagaggccccaataccccatggaccatgctgtctggcacagcctgcacttgggggctcagcaaggccacctcttcctggccggtgtgggggccccgtctcaggtctgagttgttaccccaagcgccctggcccccacatggtgatgttgacatcactggcatggtggttgggacccagtggcagggcacagggcctggcccatgtatggccaggaagtagcacaggctgagtgcaggcccaccctgcttggcccagggggcttcctgaggggagacagagcaacccctggaccccagcctcaaatccaggaccctgccaggcacaggcagggcaggaccagcccacgctgactacagggccgccggcaataaaagcccaggagcccatttggagggcctgggcctggctccctcactctcaggaaatgctgacccatgggcaggagactgtggagactgctcctgagcccccagcttccagcaggagggacagtctcaccatttccccagggcacgtggttgagtggggggaacgcccacttccctgggttagactgccagctcttcctagctggagaggagccctgcctctccgcccctgagcccactgtgcgtggggctcccgcctccaacccctcgcccagtcccagcagccagccaaacacacagaaggggactgccacctccccttgccagctgctgagccgcagagaagtgacggttcctacacaggacaggggttccttctgggcattacatcgcatagaaatcaataatttgtggtgatttggatctgtgttttaatgagtttcacagtgtgattttgattattaattgtgcaagcttttcctaataaacgtggagaatcacagg

SEQ ID NO: 316932 - DNA, 3131 bp, Homo sapiens
  misc_feature (1)..(2): n is a, c, g, or t
nngcggcggggctggcagcagtggctgcccgcactgcgcccgggcgctcgccttcgctgcagctcccggtgccgccgctcgggccggccccccggcaggccctcctcgttatggccgcggcctcctccccgcccagggccgagaggaagcgctggggttggggccgcctgccaggcgcccggcggggcagcgcgggcctggccaagaagtgccccttctcgctggagctggcggagggcggcccggcgggcggcgcgctctacgcgcccatcgcgcccggcgccccaggtcccgcgccccctgcgtccccggccgcgcccgccgcgcccccagttgcctccgaccttggcccgcggccgccggtgagcctagacccgcgcgtctccatctacagcacgcgccgcccggtgttggcgcgcacccacgtccagggccgcgtctacaacttcctcgagcgtcccaccggctggaaatgcttcgtttaccacttcgccgtcttcctcatcgtcctggtctgcctcatcttcagcgtgctgtccaccatcgagcagtatgccgccctggccacggggactctcttctggatggagatcgtgctggtggtgttcttcgggacggagtacgtggtccgcctctggtccgccggctgccgcagcaagtacgtgggcctctgggggcggctgcgctttgcccggaagcccatttccatcatcgacctcatcgtggtcgtggcctccatggtggtcctctgcgtgggctccaaggggcaggtgtttgccacgtcggccatcaggggcatccgcttcctgcagatcctgaggatgctacacgtcgaccgccagggaggcacctggaggctcctgggctccgtggtcttcatccaccgccaggagctgataaccaccctgtacatcggcttcctgggcctcatcttctcctcgtactttgtgtacctggctgagaaggacgcggtgaacgagtcaggccgcgtggagttcggcagctacgcagatgcgctgtggtggggggtggtcacagtcaccaccatcggctatggggacaaggtgccccagacgtgggtcgggaagaccatcgcctcctgcttctctgtctttgccatctccttctttgcgctcccagcggggattcttggctcggggtttgccctgaaggtgcagcagaagcagaggcagaagcacttcaaccggcagatcccggcggcagcctcactcattcagaccgcatggaggtgctatgctgccgagaaccccgactcctccacctggaagatctacatccggaaggccccccggagccacactctgctgtcacccagccccaaacccaagaagtctgtggtggtaaagaaaaaaaagttcaagctggacaaagacaatggggtgactcctggagagaagatgctcacagtcccccatatcacgtgcgaccccccagaagagcggcggctggaccacttctctgtcgacggctatgacagttctgtaaggaagagcccaacactgctggaagtgagcatgccccatttcatgagaaccaacagcttcgccgaggacctggacctggaaggggagactctgctgacacccatcacccacatctcacagctgcgggaacaccatcgggccaccattaaggtcattcgacgcatgcagtactttgtggccaagaagaaattccagcaagcgcggaagccttacgatgtgcgggacgtcattgagcagtactcgcagggccacctcaacctcatggtgcgcatcaaggagctgcagaggaggctggaccagtccattgggaagccctcactgttcatctccgtctcagaaaagagcaaggatcgcggcagcaacacgatcggcgcccgcctgaaccgagtagaagacaaggtgacgcagctggaccagaggctggcactcatcaccgacatgcttcaccagctgctctccttgcacggtggcagcacccccggcagcggcggcccccccagagagggcggggcccacatcacccagccctgcggcagtggcggctccgtcgaccctgagctcttcctgcccagcaacaccctgcccacctacgagcagctgaccgtgcccaggaggggccccgatgaggggtcctgaggaggggatggggctgggggatgggcctgagtgagaggggaggccaagagtggccccacctggccctctctgaaggaggccacctcctaaaaggcccagagagaagagccccactctcagaggccccaataccccatggaccatgctgtctggcacagcctgcacttgggggctcagcaaggccacctcttcctggccggtgtgggggccccgtctcaggtctgagttgttaccccaagcgccctggcccccacatggtgatgttgacatcactggcatggtggttgggacccagtggcagggcacagggcctggcccatgtatggccaggaagtagcacaggctgagtgcaggcccaccctgcttggcccagggggcttcctgaggggagacagagcaacccctggaccccagcctcaaatccaggaccctgccaggcacaggcagggcaggaccagcccacgctgactacagggccgccggcaataaaagcccaggagcccatttggagggcctgggcctggctccctcactctcaggaaatgctgacccatgggcaggagactgtggagactgctcctgagcccccagcttccagcaggagggacagtctcaccatttccccagggcacgtggttgagtggggggaacgcccacttccctgggttagactgccagctcttcctagctggagaggagccctgcctctccgcccctgagcccactgtgcgtggggctcccgcctccaacccctcgcccagtcccagcagccagccaaacacacagaaggggactgccacctccccttgccagctgctgagccgcagagaagtgacggttcctacacaggacaggggttccttctgggcattacatcgcatagaaatcaataatttgtggtgatttggatctgtgttttaatgagtttcacagtgtgattttgattattaattgtgcaagcttttcctaataaacgtggagaatcacagg

SEQ ID NO: 316933 - DNA, 6373 bp, Homo sapiens
  misc_feature (298)..(298): n is a, c, g, or t
  misc_feature (380)..(380): n is a, c, g, or t
  misc_feature (386)..(386): n is a, c, g, or t
  misc_feature (400)..(401): n is a, c, g, or t
  misc_feature (432)..(433): n is a, c, g, or t
  misc_feature (677)..(677): n is a, c, g, or t
  misc_feature (2552)..(2552): n is a, c, g, or t
  misc_feature (4712)..(4712): n is a, c, g, or t
cctgctaccagagagccctaggccggctcattggaatagtcatttatttgttccttcattcgttcattcagcatgtccatgttgagcactgactggagcaggtcctgttctggggcctgggaaatgggggtggataagaccaaggtagcctcttctctaaggagctcagccggacctcagcctagagccctggtccccaggagctgaggacagaggtgggacccacaccccccccatgaggccacagagcctgcaggtgtccacaccttttgtttttgttttttgatttttgtttttngttttttgttttttgagatggagtctcactctgtcacccaggctggagtacaatggtgtgatctcggctcactgcaagctcngcctcncgagttcaagcgannctcctgcctcagcctcctgagtagctgggannacagggcgtgcgccaccatgccaggctaatttttgtatttttagtggagacagggtttcaccatgttgatcaggctggtcttgaactcctgaactcgtgatctgcctgcctcggcctcccagagtgctgggattacaggcgtgagcccccgcacctggcccacaccctttctttaccttacacccctgccatctccagtatgcacctgtccgcacacacccacacacccctgaaggatttgacntcatgagccaaaaacatttttgcaaaaggaaagcaactaagctcccagcgtgtctccccttatccattgggcttgtcccaaacacatgccggatggtgtaagtatcattccatcctaattaataacatttgggagccagcgatggcagtgtccagctgactgctcatagtggactccctggtgggggcgtggcatgggagcaaggccagccactgtcacccagtgggagcagaagtcccctccagggcccggcttctgagggaggacaggcaggagtccgccggaagtgggcctgagacgccgtatgcctgtggctttgtggctttgtgtggctagcgcctctcacacgtgggggctggtttcatcttccagccccacacaccttccccaagggcctcccgtacaccccggctgcctgggcgctgggctccagcctgcaggtggccgctgcactttaagtgtcacaatgggctgcacttcacatgaaagctgcattttggcaataagtccccaccaagcccactgagcctggccctgctgcatccacactatacagctgaggaaactgaggcccagctttccacttctgtgcctagggggtgggatccagctccgagggtcttcttcccactcctccaggaacctccgccctctggtgtcggtggagttgaggaggtgttggggtgtggaggggccaggtgactccctgtaagggcaaagtgatccagaggctgcccctaccgcaggtacaccaggctcaaaggccagctgtgaggctttccggggctggatctggtgggaaagtgcttatcacggagggcacccggggttcctggcgtgggaccccctctgacccaggctagggttcctggcgtgggacgccctctggcccaagctggggttcctggtgtggggccccctctgacccaagctggggttcctggcgtcggacgccctctggcccaagctggagttcctggtgtggggccccctctgacccaagctggggttcctggcgtcggacgccctctggcccaagctggggttcctggtgtggggccccctctggccaaggctggggttcctggtgtggggcctcctctggcctgggtgggcctggcctgagagctgcagcctcacctgggctccactgcctatggacatgagctgaagctgctcagccttccagggcctctgtgcgcaggcatcaccatccgcagcaggccaggacccgggcctgctgttctcagggtgtccttcagcggaggctccagcatggctgggttcaaacaggttgcagggtctgaagccactcaaggccgagcctgcctgcagtgagcgtcccactctgtccctgcaggagatcgtgctggtggtgttcttcgggacggagtacgtggtccgcctctggtccgccggctgccgcagcaagtacgtgggcctctgggggcggctgcgctttgcccggaagcccatttccatcatcggtgagtcatgcctgccctgtggaggtcacgcccaggtttccagaccaggaaggacccccacctcatgacccctaccagatggagtcccctaaggactggggaaccccaaggccagcagggggtgactgcccaggacccagcacaggagcattggcagccctcagcagcctctgcactcagacgctgatcatggtgttgggggtagggggttggtccctcacagattcccatgagcctcacagcccagcatagcttcatggtgggccagtcaccctcggcagcctgagaaccatggtccaggcctgaggccctgccctttctggccacttgcagggctcagcacagggcccagcctaggccgggggctccacatggccaggacagaggntgggtctctccgtttagatgctgcctgcctccctatccgaggtgtctccatgtccccggtcatcagggcgtgacccgtctgaccagcaagccccttccccagacgagagcagggtgtatgctcttccctggggccctggctgtggcgatcacgaaaagctccccctctcctgcactccacagacctcatcgtggtcgtggcctccatggtggtcctctgcgtgggctccaaggggcaggtgtttgccacgtcggccatcaggtgcgtctgtgccacaagctccccccgccatgccgccccaccccgagcacccctcctgagccgcgggtggtctcacgccccatccaccttgctcagatgcaaggtgccttggtgcccactgcccccgggggcactgagccatgtgctgggatgggtggagcagggtgggtgcaggcaagtgtggagggcacggctcaacccaagatgcctcaggcagccctaggctctggcccagcactagcgcctctgaacttccaggacttgggtggtaacctgaccatctgggcacacagcctgcccatctgcaaactggggtgacccaaggagccccccagaaggcagtctggggactgagggaatctggaggtacctggccgacccccagctcagccctgtgtgggcagattcagagcaggctctggggggctgcgcctgagagggagattcccaggcccctgtcgggatggacatatacccagcctccccacccagagtggacgcctgggaggggcaggggcagggacacccatgccatcggccagccctaggcccggcgtgaacagctgagcccagcctggctccctcagccccacaccatctccttcgcaggggcatccgcttcctgcagatcctgaggatgctacacgtcgaccgccagggaggcacctggaggctcctgggctccgtggtcttcatccaccgccaggtgggtggcccgggttaggggtgcggggcccaggttggggacaggacggagggagcagagcagcccacactaggacagcttgagatgcgctgaggccccgggggccggtgggtgcctgggcgcaggggtacctgaacggggcccaggatctcagagcaagcccaagcttgagcccagcctggatgctccaccccagcctggtgccagtgaccctggcctgccaggctgatggtgtgctcaccttcctctgagctgggggcaaatgaagacagaaagtcagaaatgaaaaacccaggcaaatcaaggacccggtcaaggcagggccaccagactccctcccgagggctgcactcagatgggttcaggctgcactggcccctggctctgtggggtgaggggacccttcctctccctgaggatctcctgggtcctggtccattcttggttctgtcacgtggcaggaaagagagctgggcaatcagtggagcccgcgccggcccagacagtgggcctagggcgaccccagggctgagcctcattctgggggtaacccccacccgccacttaccggagttgtgaggagtgggctatattgaagccggccctgtgcatgtgaaccgcgctggagcggcgtaggacgcccagtgatcgctgggactcgctgccttaggcgtctgcacaggaggctcccagcctgcggttcctggagcccgacactgtgtgttttctggcctaggagctgataaccaccctgtacatcggcttcctgggcctcatcttctcctcgtactttgtgtacctggctgagaaggacgcggtgaacgagtcaggccgcgtggagttcggcagctacgcagatgcgctgtggtggggggtggtaagtcggaaacttccaggcatggggacaggggcagctcaggctgaggagtgggcaggacatctgggcactggtgtcttgagacttcgggccttggcaggggcttctcacctgcacgctcacaggcctctgtccacaaacctgtgcttggagccgctggcacaggtccccacgctcagtgttgagtcctttggcatcaccatcttgaagttctgaatggtctcatccttgaacttgagatttgagagggaaatcggaggggtcactggagcgtgtgttgggggcttagcggtttcggctcccccatggctctgcntcccgccatcgtcctaggttgcccattccctgcctccaccgtggccctcaccctggcagggcccaaggagagcggcgtcagatgcatacctcgcgtgtctctgagggtccacacaggccctgtaagtgcccctgtccccaaggagccagacatgagacagcaaacaggaaagaccatgatggctcaagagaccccagcagagatcagagagcccccgtgtttccagtggatgctgggcctgcaagttctggagccgggcctgggcagtggcgacataggtgcagctgggcctagggaagcagggacccggcctgtgggcccagaggctgcccctggctgtgaaggtgggttccggccacctagagcagcccgggagccttggggaagccggtgtgcagcaggcagatcccgcactggaacaccgagccacccaaagctcagagaggctgtgcgggaggggtggggcagggtgtcttgggccgtgtctgtgggggcttccttgagggactcaggcttgcacgtgggagagggagatgttccgatgaggatgcagctgcaggaatcagggtgcgccctccgagctgcaggctccccaagtcccaagtcactggcctgtgggcccagcagcagtttctcatggctcagaggacgctggctgaggcatttttagggggcaggcctagcttgccagtgtccctctgggagctggtggctgccttcaaatcctccagtgaaagtcggcgtttatatatgcatggagctcaagggctgcttctagggggaacacgtgggtaccccgaggggagtagctggctggaggccagagtgcagggagggaatgactccatcccatctccccccacagctgcagggccaggtgggccgtccacaggccactaaggcccagggtggcaccatcacaccttggggagtggccctgggtggggaccgagaagcccaagtgccgaggtgacagggtgacccctactctgccgccacaagcctgcccccgcgtctgcccttgtctaccgacctccgggctcactcagtccgataacaggttagatggaatcgtggtagcaacaggggctgggggctggggaggaggccgtcgaagcccacacagggtgggagccaaggcctgggggccgcacgggggctggaggtgggggcgggcagggcagccgtgggaaacacgtggtggtgccaggacccagtccgtctgccccgagtcctccttccagaaaggaccggacttgctggctctcgggaccccccaccaccatcagagcatatctgggtggggtgagaagcctcccggtggctccccaggcaggcacgtgtccctgcgattgctgtgcctcctccctccccctcaaccgccgcttcccccatgaggccagacactcagcagtggctcctgacgtaggccaagtcagcaggttttctggaagcttccaaagtgctgcaatgctcagggatggcaggggcatgctgacacagctcctgggttggggcaggccccactttcggcctcttcccgccttcctgggggcctgtgtccccgaaggccccagtgtggcaggcctgagcaggtttgggcagcagggcccagcccccctgcgggagcctgcctgcagtgagtgtggatgggtagggcg

SEQ ID NO: 316934 - DNA, 851 bp, Homo sapiens
  misc_feature (1)..(2): n is a, c, g, or t
nngcggcggggctggcagcagtggctgcccgcactgcgcccgggcgctcgccttcgctgcagctcccggtgccgccgctcgggccggccccccggcaggccctcctcgttatggccgcggcctcctccccgcccagggccgagaggaagcgctggggttggggccgcctgccaggcgcccggcggggcagcgcgggcctggccaagaagtgccccttctcgctggagctggcggagggcggcccggcgggcggcgcgctctacgcgcccatcgcgcccggcgccccaggtcccgcgccccctgcgtccccggccgcgcccgccgcgcccccagttgcctccgaccttggcccgcggccgccggtgagcctagacccgcgcgtctccatctacagcacgcgccgcccggtgttggcgcgcacccacgtccagggccgcgtctacaacttcctcgagcgtcccaccggctggaaatgcttcgtttaccacttcgccgtgtgagtatcgccaccggcgacggccggcacgaaggtgcttcctgagagctggtgtgggggagctctgtcccagcgccacctgccccgtcggagctgcgaccccggagcagaggagggaaggaagtggggaaacgcagaaacacaaactctgcactctcccttgaagttcagaggcgctgctgtgtctgggggtgcgcatcttctcgcaggcccggcgtggggagggagccggctggggaggggaccacctggagcccagaatttggctccacacctccgggagggtagtccaggtgtgaatccttctgggaagagaagcgtgctggggagcgcacccttgggtgcagtaagataa

SEQ ID NO: 316935 - DNA, 398 bp, Homo sapiens
  misc_feature (382)..(382): n is a, c, g, or t
  misc_feature (384)..(386): n is a, c, g, or t
  misc_feature (390)..(390): n is a, c, g, or t
  misc_feature (392)..(393): n is a, c, g, or t
  misc_feature (396)..(396): n is a, c, g, or t
  misc_feature (398)..(398): n is a, c, g, or t
gcagcttccatggcctggggctgtgagaggcccgggaaggcactgtctttgcgcctgcacatgtgtgtgtctggagtgtaggatggcactggtgccgggcctggatttactcagcccagatcacggctgcttttgtttacgtggcccctgctctcacccacaactccaggtttctggctctcgggaatttgaggcctgtggctgctgtggaccctgggaaagagcctgtgcttcctgagccagtgcggggcctggcatggagtaggtaccccgggggtggacagataggcagaggaagggatgggcaggtggatggggggctgaattgtggtcagttatgggtggcgggtagatgggtggacagctggatagatgaagtacngnnngggngnnganan

SEQ ID NO: 316936 - DNA, 2896 bp, Homo sapiens
gcagcttccatggcctggggctgtgagaggcccgggaaggcactgtctttgcgcctgcacatgtgtgtgtctggagtgtaggatggcactggtgccgggcctggatttactcagcccagatcacggctgcttttgtttacgtggcccctgctctcacccacaactccaggtttctggctctcgggaatttgaggcctgtggctgctgtggaccctgggaaagagcctgtgcttcctgagccagtgcggggcctggcatggacttcctcatcgtcctggtctgcctcatcttcagcgtgctgtccaccatcgagcagtatgccgccctggccacggggactctcttctggatggagatcgtgctggtggtgttcttcgggacggagtacgtggtccgcctctggtccgccggctgccgcagcaagtacgtgggcctctgggggcggctgcgctttgcccggaagcccatttccatcatcgacctcatcgtggtcgtggcctccatggtggtcctctgcgtgggctccaaggggcaggtgtttgccacgtcggccatcaggggcatccgcttcctgcagatcctgaggatgctacacgtcgaccgccagggaggcacctggaggctcctgggctccgtggtcttcatccaccgccaggagctgataaccaccctgtacatcggcttcctgggcctcatcttctcctcgtactttgtgtacctggctgagaaggacgcggtgaacgagtcaggccgcgtggagttcggcagctacgcagatgcgctgtggtggggggtggtcacagtcaccaccatcggctatggggacaaggtgccccagacgtgggtcgggaagaccatcgcctcctgcttctctgtctttgccatctccttctttgcgctcccagcggggattcttggctcggggtttgccctgaaggtgcagcagaagcagaggcagaagcacttcaaccggcagatcccggcggcagcctcactcattcagaccgcatggaggtgctatgctgccgagaaccccgactcctccacctggaagatctacatccggaaggccccccggagccacactctgctgtcacccagccccaaacccaagaagtctgtggtggtaaagaaaaaaaagttcaagctggacaaagacaatggggtgactcctggagagaagatgctcacagtcccccatatcacgtgcgaccccccagaagagcggcggctggaccacttctctgtcgacggctatgacagttctgtaaggaagagcccaacactgctggaagtgagcatgccccatttcatgagaaccaacagcttcgccgaggacctggacctggaaggggagactctgctgacacccatcacccacatctcacagctgcgggaacaccatcgggccaccattaaggtcattcgacgcatgcagtactttgtggccaagaagaaattccagcaagcgcggaagccttacgatgtgcgggacgtcattgagcagtactcgcagggccacctcaacctcatggtgcgcatcaaggagctgcagaggaggctggaccagtccattgggaagccctcactgttcatctccgtctcagaaaagagcaaggatcgcggcagcaacacgatcggcgcccgcctgaaccgagtagaagacaaggtgacgcagctggaccagaggctggcactcatcaccgacatgcttcaccagctgctctccttgcacggtggcagcacccccggcagcggcggcccccccagagagggcggggcccacatcacccagccctgcggcagtggcggctccgtcgaccctgagctcttcctgcccagcaacaccctgcccacctacgagcagctgaccgtgcccaggaggggccccgatgaggggtcctgaggaggggatggggctgggggatgggcctgagtgagaggggaggccaagagtggccccacctggccctctctgaaggaggccacctcctaaaaggcccagagagaagagccccactctcagaggccccaataccccatggaccatgctgtctggcacagcctgcacttgggggctcagcaaggccacctcttcctggccggtgtgggggccccgtctcaggtctgagttgttaccccaagcgccctggcccccacatggtgatgttgacatcactggcatggtggttgggacccagtggcagggcacagggcctggcccatgtatggccaggaagtagcacaggctgagtgcaggcccaccctgcttggcccagggggcttcctgaggggagacagagcaacccctggaccccagcctcaaatccaggaccctgccaggcacaggcagggcaggaccagcccacgctgactacagggccgccggcaataaaagcccaggagcccatttggagggcctgggcctggctccctcactctcaggaaatgctgacccatgggcaggagactgtggagactgctcctgagcccccagcttccagcaggagggacagtctcaccatttccccagggcacgtggttgagtggggggaacgcccacttccctgggttagactgccagctcttcctagctggagaggagccctgcctctccgcccctgagcccactgtgcgtggggctcccgcctccaacccctcgcccagtcccagcagccagccaaacacacagaaggggactgccacctccccttgccagctgctgagccgcagagaagtgacggttcctacacaggacaggggttccttctgggcattacatcgcatagaaatcaataatttgtggtgatttggatctgtgttttaatgagtttcacagtgtgattttgattattaattgtgcaagcttttcctaataaacgtggagaatcacagg

SEQ ID NO: 316937 - DNA, 3015 bp, Homo sapiens
gcagcttccatggcctggggctgtgagaggcccgggaaggcactgtctttgcgcctgcacatgtgtgtgtctggagtgtaggatggcactggtgccgggcctggatttactcagcccagatcacggctgcttttgtttacgtggcccctgctctcacccacaactccaggtttctggctctcgggaatttgaggcctgtggctgctgtggaccctgggaaagagcctgtgcttcctgagccagtgcggggcctggcatggacttcctcatcgtcctggtctgcctcatcttcagcgtgctgtccaccatcgagcagtatgccgccctggccacggggactctcttctggatggagatcgtgctggtggtgttcttcgggacggagtacgtggtccgcctctggtccgccggctgccgcagcaagtacgtgggcctctgggggcggctgcgctttgcccggaagcccatttccatcatcgacctcatcgtggtcgtggcctccatggtggtcctctgcgtgggctccaaggggcaggtgtttgccacgtcggccatcaggggcatccgcttcctgcagatcctgaggatgctacacgtcgaccgccagggaggcacctggaggctcctgggctccgtggtcttcatccaccgccaggagctgataaccaccctgtacatcggcttcctgggcctcatcttctcctcgtactttgtgtacctggctgagaaggacgcggtgaacgagtcaggccgcgtggagttcggcagctacgcagatgcgctgtggtggggggtggtcacagtcaccaccatcggctatggggacaaggtgccccagacgtgggtcgggaagaccatcgcctcctgcttctctgtctttgccatctccttctttgcgctcccagcggggattcttggctcggggtttgccctgaaggtgcagcagaagcagaggcagaagcacttcaaccggcagatcccggcggcagcctcactcattcagaccgcatggaggtgctatgctgccgagaaccccgactcctccacctggaagatctacatccggaaggccccccggagccacactctgctgtcacccagccccaaacccaagaagtctgtggtggtaaagaaaaaaaagttcaagctggacaaagacaatggggtgactcctggagagaagatgctcacagtcccccatatcacgtgcgaccccccagaagagcggcggctggaccacttctctgtcgacggctatgacagttctgtaaggaagagcccaacactgctggaagtgagcatgccccatttcatgagaaccaacagcttcgccgaggacctggacctggaaggggagactctgctgacacccatcacccacatctcacagctgcgggaacaccatcgggccaccattaaggtcattcgacgcatgcagtactttgtggccaagaagaaattccagcaagcgcggaagccttacgatgtgcgggacgtcattgagcagtactcgcagggccacctcaacctcatggtgcgcatcaaggagctgcagaggaggctggaccagtccattgggaagccctcactgttcatctccgtctcagaaaagagcaaggatcgcggcagcaacacgatcggcgcccgcctgaaccgagtagaagacaaggtgacgcagctggaccagaggctggcactcatcaccgacatgcttcaccagctgctctccttgcacggtggcagcacccccggcagcggcggcccccccagagagggcggggcccacatcacccagccctgcggcagtggcggctccgtcgaccctgagctcttcctgcccagcaacaccctgcccacctacgagcagctgaccgtgcccaggaggggccccgatgaggggtcctgaggaggggatggggctgggggatgggcctgagtgagaggggaggccaagagtggccccacctggccctctctgaaggaggccacctcctaaaaggcccagagagaagagccccactctcagaggccccaataccccatggaccatgctgtctggcacagcctgcacttgggggctcagcaaggccacctcttcctggccggtgtgggggccccgtctcaggtctgagttgttaccccaagcgccctggcccccacatggtgatgttgacatcactggcatggtggttgggacccagtggcagggcacagggcctggcccatgtatggccaggaagtagcacaggctgagtgcaggcccaccctgcttggcccagggggcttcctgaggggagacagagcaacccctggaccccagcctcaaatccaggaccctgccaggcacaggcagggcaggaccagcccacgctgactacagggccgccggcaataaaagcccaggagcccatttggagggcctgggcctggctccctcactctcaggaaatgctgacccatgggcaggagactgtggagactgctcctgagcccccagcttccagcaggagggacagtctcaccatttccccagggcacgtggttgagtggggggaacgcccacttccctgggttagactgccagctcttcctagctggagaggagccctgcctctccgcccctgagcccactgtgcgtggggctcccgcctccaacccctcgcccagtcccagcagccagccaaacacacagaaggggactgccacctccccttgccagctgctgagccgcagagaagtgacggttcctacacaggacaggggttccttctgggcattacatcgcatagaaatcaataatttgtggtgatttggatctgtgttttaatgagtttcacagtgtgattttgattattaattgtgcaagcttttcctaataaacgtggagaatcacaggctgggctgggcactgctctcaccttggttcctggggcatccatggggtctctcacagacaggacccctgcagttcccctggaagcagtgcccaggtggctgtggaataggaacgctatg

SEQ ID NO: 316938 - DNA, 3223 bp, Homo sapiens
  misc_feature (1)..(2): n is a, c, g, or t
nngcggcggggctggcagcagtggctgcccgcactgcgcccgggcgctcgccttcgctgcagctcccggtgccgccgctcgggccggccccccggcaggccctcctcgttatggccgcggcctcctccccgcccagggccgagaggaagcgctggggttggggccgcctgccaggcgcccggcggggcagcgcgggcctggccaagaagtgccccttctcgctggagctggcggagggcggcccggcgggcggcgcgctctacgcgcccatcgcgcccggcgccccaggtcccgcgccccctgcgtccccggccgcgcccgccgcgcccccagttgcctccgaccttggcccgcggccgccggtgagcctagacccgcgcgtctccatctacagcacgcgccgcccggtgttggcgcgcacccacgtccagggccgcgtctacaacttcctcgagcgtcccaccggctggaaatgcttcgtttaccacttcgccgtattcaagaaattaagcatacggtcacgagagtgcaaagttctgtgaaacgctccagtggttacacgccccggggtttcagcttcgaccctggcttcctcatcgtcctggtctgcctcatcttcagcgtgctgtccaccatcgagcagtatgccgccctggccacggggactctcttctggatggagatcgtgctggtggtgttcttcgggacggagtacgtggtccgcctctggtccgccggctgccgcagcaagtacgtgggcctctgggggcggctgcgctttgcccggaagcccatttccatcatcgacctcatcgtggtcgtggcctccatggtggtcctctgcgtgggctccaaggggcaggtgtttgccacgtcggccatcaggggcatccgcttcctgcagatcctgaggatgctacacgtcgaccgccagggaggcacctggaggctcctgggctccgtggtcttcatccaccgccaggagctgataaccaccctgtacatcggcttcctgggcctcatcttctcctcgtactttgtgtacctggctgagaaggacgcggtgaacgagtcaggccgcgtggagttcggcagctacgcagatgcgctgtggtggggggtggtcacagtcaccaccatcggctatggggacaaggtgccccagacgtgggtcgggaagaccatcgcctcctgcttctctgtctttgccatctccttctttgcgctcccagcggggattcttggctcggggtttgccctgaaggtgcagcagaagcagaggcagaagcacttcaaccggcagatcccggcggcagcctcactcattcagaccgcatggaggtgctatgctgccgagaaccccgactcctccacctggaagatctacatccggaaggccccccggagccacactctgctgtcacccagccccaaacccaagaagtctgtggtggtaaagaaaaaaaagttcaagctggacaaagacaatggggtgactcctggagagaagatgctcacagtcccccatatcacgtgcgaccccccagaagagcggcggctggaccacttctctgtcgacggctatgacagttctgtaaggaagagcccaacactgctggaagtgagcatgccccatttcatgagaaccaacagcttcgccgaggacctggacctggaaggggagactctgctgacacccatcacccacatctcacagctgcgggaacaccatcgggccaccattaaggtcattcgacgcatgcagtactttgtggccaagaagaaattccagcaagcgcggaagccttacgatgtgcgggacgtcattgagcagtactcgcagggccacctcaacctcatggtgcgcatcaaggagctgcagaggaggctggaccagtccattgggaagccctcactgttcatctccgtctcagaaaagagcaaggatcgcggcagcaacacgatcggcgcccgcctgaaccgagtagaagacaaggtgacgcagctggaccagaggctggcactcatcaccgacatgcttcaccagctgctctccttgcacggtggcagcacccccggcagcggcggcccccccagagagggcggggcccacatcacccagccctgcggcagtggcggctccgtcgaccctgagctcttcctgcccagcaacaccctgcccacctacgagcagctgaccgtgcccaggaggggccccgatgaggggtcctgaggaggggatggggctgggggatgggcctgagtgagaggggaggccaagagtggccccacctggccctctctgaaggaggccacctcctaaaaggcccagagagaagagccccactctcagaggccccaataccccatggaccatgctgtctggcacagcctgcacttgggggctcagcaaggccacctcttcctggccggtgtgggggccccgtctcaggtctgagttgttaccccaagcgccctggcccccacatggtgatgttgacatcactggcatggtggttgggacccagtggcagggcacagggcctggcccatgtatggccaggaagtagcacaggctgagtgcaggcccaccctgcttggcccagggggcttcctgaggggagacagagcaacccctggaccccagcctcaaatccaggaccctgccaggcacaggcagggcaggaccagcccacgctgactacagggccgccggcaataaaagcccaggagcccatttggagggcctgggcctggctccctcactctcaggaaatgctgacccatgggcaggagactgtggagactgctcctgagcccccagcttccagcaggagggacagtctcaccatttccccagggcacgtggttgagtggggggaacgcccacttccctgggttagactgccagctcttcctagctggagaggagccctgcctctccgcccctgagcccactgtgcgtggggctcccgcctccaacccctcgcccagtcccagcagccagccaaacacacagaaggggactgccacctccccttgccagctgctgagccgcagagaagtgacggttcctacacaggacaggggttccttctgggcattacatcgcatagaaatcaataatttgtggtgatttggatctgtgttttaatgagtttcacagtgtgattttgattattaattgtgcaagcttttcctaataaacgtggagaatcacagg

SEQ ID NO: 316939 - DNA, 3035 bp, Homo sapiens
  misc_feature (1)..(2): n is a, c, g, or t
nngcggcggggctggcagcagtggctgcccgcactgcgcccgggcgctcgccttcgctgcagctcccggtgccgccgctcgggccggccccccggcaggccctcctcgttatggccgcggcctcctccccgcccagggccgagaggaagcgctggggttggggccgcctgccaggcgcccggcggggcagcgcgggcctggccaagaagtgccccttctcgctggagctggcggagggcggcccggcgggcggcgcgctctacgcgcccatcgcgcccggcgccccaggtcccgcgccccctgcgtccccggccgcgcccgccgcgcccccagttgcctccgaccttggcccgcggccgccggtgagcctagacccgcgcgtctccatctacagcacgcgccgcccggtgttggcgcgcacccacgtccagggccgcgtctacaacttcctcgagcgtcccaccggctggaaatgcttcgtttaccacttcgccgtcttcctcatcgtcctggtctgcctcatcttcagcgtgctgtccaccatcgagcagtatgccgccctggccacggggactctcttctggatggagatcgtgctggtggtgttcttcgggacggagtacgtggtccgcctctggtccgccggctgccgcagcaagtacgtgggcctctgggggcggctgcgctttgcccggaagcccatttccatcatcgacctcatcgtggtcgtggcctccatggtggtcctctgcgtgggctccaaggggcaggtgtttgccacgtcggccatcaggggcatccgcttcctgcagatcctgaggatgctacacgtcgaccgccagggaggcacctggaggctcctgggctccgtggtcttcatccaccgccaggagctgataaccaccctgtacatcggcttcctgggcctcatcttctcctcgtactttgtgtacctggctgagaaggacgcggtgaacgagtcaggccgcgtggagttcggcagctacgcagatgcgctgtggtggggggtggtcacagtcaccaccatcggctatggggacaaggtgccccagacgtgggtcgggaagaccatcgcctcctgcttctctgtctttgccatctccttctttgcgctcccagcgaccgcatggaggtgctatgctgccgagaaccccgactcctccacctggaagatctacatccggaaggccccccggagccacactctgctgtcacccagccccaaacccaagaagtctgtggtggtaaagaaaaaaaagttcaagctggacaaagacaatggggtgactcctggagagaagatgctcacagtcccccatatcacgtgcgaccccccagaagagcggcggctggaccacttctctgtcgacggctatgacagttctgtaaggaagagcccaacactgctggaagtgagcatgccccatttcatgagaaccaacagcttcgccgaggacctggacctggaaggggagactctgctgacacccatcacccacatctcacagctgcgggaacaccatcgggccaccattaaggtcattcgacgcatgcagtactttgtggccaagaagaaattccagcaagcgcggaagccttacgatgtgcgggacgtcattgagcagtactcgcagggccacctcaacctcatggtgcgcatcaaggagctgcagaggaggctggaccagtccattgggaagccctcactgttcatctccgtctcagaaaagagcaaggatcgcggcagcaacacgatcggcgcccgcctgaaccgagtagaagacaaggtgacgcagctggaccagaggctggcactcatcaccgacatgcttcaccagctgctctccttgcacggtggcagcacccccggcagcggcggcccccccagagagggcggggcccacatcacccagccctgcggcagtggcggctccgtcgaccctgagctcttcctgcccagcaacaccctgcccacctacgagcagctgaccgtgcccaggaggggccccgatgaggggtcctgaggaggggatggggctgggggatgggcctgagtgagaggggaggccaagagtggccccacctggccctctctgaaggaggccacctcctaaaaggcccagagagaagagccccactctcagaggccccaataccccatggaccatgctgtctggcacagcctgcacttgggggctcagcaaggccacctcttcctggccggtgtgggggccccgtctcaggtctgagttgttaccccaagcgccctggcccccacatggtgatgttgacatcactggcatggtggttgggacccagtggcagggcacagggcctggcccatgtatggccaggaagtagcacaggctgagtgcaggcccaccctgcttggcccagggggcttcctgaggggagacagagcaacccctggaccccagcctcaaatccaggaccctgccaggcacaggcagggcaggaccagcccacgctgactacagggccgccggcaataaaagcccaggagcccatttggagggcctgggcctggctccctcactctcaggaaatgctgacccatgggcaggagactgtggagactgctcctgagcccccagcttccagcaggagggacagtctcaccatttccccagggcacgtggttgagtggggggaacgcccacttccctgggttagactgccagctcttcctagctggagaggagccctgcctctccgcccctgagcccactgtgcgtggggctcccgcctccaacccctcgcccagtcccagcagccagccaaacacacagaaggggactgccacctccccttgccagctgctgagccgcagagaagtgacggttcctacacaggacaggggttccttctgggcattacatcgcatagaaatcaataatttgtggtgatttggatctgtgttttaatgagtttcacagtgtgattttgattattaattgtgcaagcttttcctaataaacgtggagaatcacagg

SEQ ID NO: 316940 - DNA, 2759 bp, Homo sapiens
gcagcttccatggcctggggctgtgagaggcccgggaaggcactgtctttgcgcctgcacatgtgtgtgtctggagtgtaggatggcactggtgccgggcctggatttactcagcccagatcacggctgcttttgtttacgtggcccctgctctcacccacaactccaggtttctggctctcgggaatttgaggcctgtggctgctgtggaccctgggaaagagcctgtgcttcctgagccagtgcggggcctggcatggacttcctcatcgtcctggtctgcctcatcttcagcgtgctgtccaccatcgagcagtatgccgccctggccacggggactctcttctggatggagatcgtgctggtggtgttcttcgggacggagtacgtggtccgcctctggtccgccggctgccgcagcaagtacgtgggcctctgggggcggctgcgctttgcccggaagcccatttccatcatcgacctcatcgtggtcgtggcctccatggtggtcctctgcgtgggctccaaggggcaggtgtttgccacgtcggccatcaggggcatccgcttcctgcagatcctgaggatgctacacgtcgaccgccagggaggcacctggaggctcctgggctccgtggtcttcatccaccgccaggagctgataaccaccctgtacatcggcttcctgggcctcatcttctcctcgtactttgtgtacctggctgagaaggacgcggtgaacgagtcaggccgcgtggagttcggcagctacgcagatgcgctgtggtggggggtggtcacagtcaccaccatcggctatggggacaaggtgccccagacgtgggtcgggaagaccatcgcctcctgcttctctgtctttgccatctccttctttgcgctcccagcggggattcttggctcggggtttgccctgaaggtgcagcagaagcagaggcagaagcacttcaaccggcagatcccggcggcagcctcactcattcagaccgcatggaggtgctatgctgccgagaaccccgactcctccacctggaagatctacatccggaaggccccccggagccacactctgctgtcacccagccccaaacccaagaagtctgtggtggtaaagaaaaaaaagttcaagctggacaaagacaatggggtgactcctggagagaagatgctcacagtcccccatatcacgtgcgaccccccagaagagcggcggctggaccacttctctgtcgacggctatgacagttctgtaaggaagagcccaacactgctggaagtgagcatgccccatttcatgagaaccaacagcttcgccgaggacctggacctggaaggggagactctgctgacacccatcacccacatctcacagctgcgggaacaccatcgggccaccattaaggtcattcgacgcatgcagtactttgtggccaagaagaaattccagcaagcgcggaagccttacgatgtgcgggacgtcattgagcagtactcgcagggccacctcaacctcatggtgcgcatcaaggagctgcagaggaggctggaccagtccattgggaagccctcactgttcatctccgtctcagaaaagagcaaggatcgcggcagcaacacgatcggcgcccgcctgaaccgagtagaagacaaggtgacgcagctggaccagaggctggcactcatcaccgacatgcttcaccagctgctctccttgcacggtggcagcacccccggcagcggcggcccccccagagagggcggggcccacatcacccagccctgcggcagtggcggctccgtcgaccctgagctcttcctgcccagcaacaccctgcccacctacgagcagctgaccgtgcccaggaggggccccgatgaggggtcctgaggaggggatggggctgggggatgggcctgagtgagaggggaggccaagagtggccccacctggccctctctgaaggaggccacctcctaaaaggcccagagagaagagccccactctcagaggccccaataccccatggaccatgctgtctggcacagcctgcacttgggggctcagcaaggccacctcttcctggccggtgtgggggccccgtctcaggtctgagttgttaccccaagcgccctggcccccacatggtgatgttgacatcactggcatggtggttgggacccagtggcagggcacagggcctggcccatgtatggccaggaagtagcacaggctgagtgcaggcccaccctgcttggcccagggggcttcctgaggggagacagagcaacccctggaccccagcctcaaatccaggaccctgccaggcacaggcagggcaggaccagcccacgctgactacagggccgccggcaataaaagcccaggagcccatttggagggcctgggcctggctccctcactctcaggaaatgctgacccatgggcaggagactgtggagactgctcctgacccactgtgcgtggggctcccgcctccaacccctcgcccagtcccagcagccagccaaacacacagaaggggactgccacctccccttgccagctgctgagccgcagagaagtgacggttcctacacaggacaggggttccttctgggcattacatcgcatagaaatcaataatttgtggtgatttggatctgtgttttaatgagtttcacagtgtgattttgattattaattgtgcaagcttttcctaataaacgtggagaatcacagg

SEQ ID NO: 316941 - DNA, 2406 bp, Homo sapiens
actctagaggatctctggtcgctgtatcgggggctccaaggggcagagtgtttgccacgtcggcatcagggcatccgcttcctgcagatcctgaggatgctacacgtcgaccgccagggaggcacctggaggctcctgggctccgtggtcttcatccaccgccaggagctgataaccaccctgtacatcggcttcctgggcctcatcttctcctcgtactttgtgtacctggctgagaaggacgcggtgaacgagtcaggccgcgtggagttcggcagctacgcagatgcgctgtggtggggggtggtcacagtcaccaccatcggctatggggacaaggtgccccagacgtgggtcgggaagaccatcgcctcctgcttctctgtctttgccatctccttctttgcgctcccagcggggattcttggctcggggtttgccctgaaggtgcagcagaagcagaggcagaagcacttcaaccggcagatcccggcggcagcctcactcattcagaccgcatggaggtgctatgctgccgagaaccccgactcctccacctggaagatctacatccggaaggccccccggagccacactctgctgtcacccagccccaaacccaagaagtctgtggtggtaaagaaaaaaaagttcaagctggacaaagacaatggggtgactcctggagagaagatgctcacagtcccccatatcacgtgcgaccccccagaagagcggcggctggaccacttctctgtcgacggctatgacagttctgtaaggaagagcccaacactgctggaagtgagcatgccccatttcatgagaaccaacagcttcgccgaggacctggacctggaaggggagactctgctgacacccatcacccacatctcacagctgcgggaacaccatcgggccaccattaaggtcattcgacgcatgcagtactttgtggccaagaagaaattccagcaagcgcggaagccttacgatgtgcgggacgtcattgagcagtactcgcagggccacctcaacctcatggtgcgcatcaaggagctgcagaggaggctggaccagtccattgggaagccctcactgttcatctccgtctcagaaaagagcaaggatcgcggcagcaacacgatcggcgcccgcctgaaccgagtagaagacaaggtgacgcagctggaccagaggctggcactcatcaccgacatgcttcaccagctgctctccttgcacggtggcagcacccccggcagcggcggcccccccagagagggcggggcccacatcacccagccctgcggcagtggcggctccgtcgaccctgagctcttcctgcccagcaacaccctgcccacctacgagcagctgaccgtgcccaggaggggccccgatgaggggtcctgaggaggggatggggctgggggatgggcctgagtgagaggggaggccaagagtggccccacctggccctctctgaaggaggccacctcctaaaaggcccagagagaagagccccactctcagaggccccaataccccatggaccatgctgtctggcacagcctgcacttgggggctcagcaaggccacctcttcctggccggtgtgggggccccgtctcaggtctgagttgttaccccaagcgccctggcccccacatggtgatgttgacatcactggcatggtggttgggacccagtggcagggcacagggcctggcccatgtatggccaggaagtagcacaggctgagtgcaggcccaccctgcttggcccagggggcttcctgaggggagacagagcaacccctggaccccagcctcaaatccaggaccctgccaggcacaggcagggcaggaccagcccacgctgactacagggccgccggcaataaaagcccaggagcccatttggagggcctgggcctggctccctcactctcaggaaatgctgacccatgggcaggagactgtggagactgctcctgagcccccagcttccagcaggagggacagtctcaccatttccccagggcacgtggttgagtggggggaacgcccacttccctgggttagactgccagctcttcctagctggagaggagccctgcctctccgcccctgagcccactgtgcgtggggctcccgcctccaacccctcgcccagtcccagcagccagccaaacacacagaaggggactgccacctccccttgccagctgctgagccgcagagaagtgacggttcctacacaggacaggggttccttctgggcattacatcgcatagaaatcaataatttgtggtgatttggatctgtgttttaatgagtttcacagtgtgattttgattattaattgtgcaagcttttcctaataaacgtggagaatcacagg

SEQ ID NO: 316942 - DNA, 2081 bp, Homo sapiens
  misc_feature (1)..(2): n is a, c, g, or t
nngcggcggggctggcagcagtggctgcccgcactgcgcccgggcgctcgccttcgctgcagctcccggtgccgccgctcgggccggccccccggcaggccctcctcgttatggccgcggcctcctccccgcccagggccgagaggaagcgctggggttggggccgcctgccaggcgcccggcggggcagcgcgggcctggccaagaagtgccccttctcgctggagctggcggagggcggcccggcgggcggcgcgctctacgcgcccatcgcgcccggcgccccaggtcccgcgccccctgcgtccccggccgcgcccgccgcgcccccagttgcctccgaccttggcccgcggccgccggtgagcctagacccgcgcgtctccatctacagcacgcgccgcccggtgttggcgcgcacccacgtccagggccgcgtctacaacttcctcgagcgtcccaccggctggaaatgcttcgtttaccacttcgccgtcttcctcatcgtcctggtctgcctcatcttcagcgtgctgtccaccatcgagcagtatgccgccctggccacggggactctcttctggatggagatcgtgctggtggtgttcttcgggacggagtacgtggtccgcctctggtccgccggctgccgcagcaagtacgtgggcctctgggggcggctgcgctttgcccggaagcccatttccatcatcgacctcatcgtggtcgtggcctccatggtggtcctctgcgtgggctccaaggggcaggtgtttgccacgtcggccatcaggggcatccgcttcctgcagatcctgaggatgctacacgtcgaccgccagggaggcacctggaggctcctgggctccgtggtcttcatccaccgccaggagctgataaccaccctgtacatcggcttcctgggcctcatcttctcctcgtactttgtgtacctggctgagaaggacgcggtgaacgagtcaggccgcgtggagttcggcagctacgcagatgcgctgtggtggggggtggtcacagtcaccaccatcggctatggggacaaggtgccccagacgtgggtcgggaagaccatcgcctcctgcttctctgtctttgccatctccttctttgcgctcccagcggggattcttggctcggggtttgccctgaaggtgcagcagaagcagaggcagaagcacttcaaccggcagatcccggcggcagcctcactcattcagaccgcatggaggtgctatgctgccgagaaccccgactcctccacctggaagatctacatccggaaggccccccggagccacactctgctgtcacccagccccaaacccaagaagtctgtggtggtaaagaaaaaaaagttcaagctggacaaagacaatggggtgactcctggagagaagatgctcacagtcccccatatcacgtgcgaccccccagaagagcggcggctggaccacttctctgtcgacggctatgacagttctgtaaggaagagcccaacactgctggaagtgagcatgccccatttcatgagaaccaacagcttcgccgaggacctggacctggaaggggagactctgctgacacccatcacccacatctcacatctcaggaaatgctgacccatgggcaggagactgtggagactgctcctgagcccccagcttccagcaggagggacagtctcaccatttccccagggcacgtggttgagtggggggaacgcccacttccctgggttagactgccagctcttcctagctggagaggagccctgcctctccgcccctgagcccactgtgcgtggggctcccgcctccaacccctcgcccagtcccagcagccagccaaacacacagaaggggactgccacctccccttgccagctgctgagccgcagagaagtgacggttcctacacaggacaggggttccttctgggcattacatcgcatagaaatcaataatttgtggtgatttggatctgtgttttaatgagtttcacagtgtgattttgattattaattgtgcaagcttttcctaataaacgtggagaatcacagg

SEQ ID NO: 316943 - DNA, 1530 bp, Homo sapiens
caacagcagccacggctcatagtgtgggctggtgtaacgggggcagtggaatggctgtgcccccagcctggagtcaggcctgtgtcgccctgggagtggaatggcatgggcttgcacagctggcagtgtggccagcttaggcagccccctagggctctcagaggtcagaggtggagagcgtggagcaggatggagcccaggtccccagctgcagccatgcccggccaccgtaccacccctgaaaagagcaaggatcgcggcagcaacacgatcggcgcccgcctgaaccgagtagaagacaaggtgacgcagctggaccagaggctggcactcatcaccgacatgcttcaccagctgctctccttgcacggtggcagcacccccggcagcggcggcccccccagagagggcggggcccacatcacccagccctgcggcagtggcggctccgtcgaccctgagctcttcctgcccagcaacaccctgcccacctacgagcagctgaccgtgcccaggaggggccccgatgaggggtcctgaggaggggatggggctgggggatgggcctgagtgagaggggaggccaagagtggccccacctggccctctctgaaggaggccacctcctaaaaggcccagagagaagagccccactctcagaggccccaataccccatggaccatgctgtctggcacagcctgcacttgggggctcagcaaggccacctcttcctggccggtgtgggggccccgtctcaggtctgagttgttaccccaagcgccctggcccccacatggtgatgttgacatcactggcatggtggttgggacccagtggcagggcacagggcctggcccatgtatggccaggaagtagcacaggctgagtgcaggcccaccctgcttggcccagggggcttcctgaggggagacagagcaacccctggaccccagcctcaaatccaggaccctgccaggcacaggcagggcaggaccagcccacgctgactacagggccgccggcaataaaagcccaggagcccatttggagggcctgggcctggctccctcactctcaggaaatgctgacccatgggcaggagactgtggagactgctcctgagcccccagcttccagcaggagggacagtctcaccatttccccagggcacgtggttgagtggggggaacgcccacttccctgggttagactgccagctcttcctagctggagaggagccctgcctctccgcccctgagcccactgtgcgtggggctcccgcctccaacccctcgcccagtcccagcagccagccaaacacacagaaggggactgccacctccccttgccagctgctgagccgcagagaagtgacggttcctacacaggacaggggttccttctgggcattacatcgcatagaaatcaataatttgtggtgatttggatctgtgttttaatgagtttcacagtgtgattttgattattaattgtgcaagcttttcctaataaacgtggagaatcacagg

SEQ ID NO: 316944 - DNA, 1378 bp, Homo sapiens
  misc_feature (1)..(2): n is a, c, g, or t
nngcggcggggctggcagcagtggctgcccgcactgcgcccgggcgctcgccttcgctgcagctcccggtgccgccgctcgggccggccccccggcaggccctcctcgttatggccgcggcctcctccccgcccagggccgagaggaagcgctggggttggggccgcctgccaggcgcccggcggggcagcgcgggcctggccaagaagtgccccttctcgctggagctggcggagggcggcccggcgggcggcgcgctctacgcgcccatcgcgcccggcgccccaggtcccgcgccccctgcgtccccggccgcgcccgccgcgcccccagttgcctccgaccttggcccgcggccgccggtgagcctagacccgcgcgtctccatctacagcacgcgccgcccggtgttggcgcgcacccacgtccagggccgcgtctacaacttcctcgagcgtcccaccggctggaaatgcttcgtttaccacttcgccgtcttcctcatcgtcctggtctgcctcatcttcagcgtgctgtccaccatcgagcagtatgccgccctggccacggggactctcttctggatggagatcgtgctggtggtgttcttcgggacggagtacgtggtccgcctctggtccgccggctgccgcagcaagtacgtgggcctctgggggcggctgcgctttgcccggaagcccatttccatcatcgacctcatcgtggtcgtggcctccatggtggtcctctgcgtgggctccaaggggcaggtgtttgccacgtcggccatcaggggcatccgcttcctgcagatcctgaggatgctacacgtcgaccgccagggaggcacctggaggctcctgggctccgtggtcttcatccaccgccaggagctgataaccaccctgtacatcggcttcctgggcctcatcttctcctcgtactttgtgtacctggctgagaaggacgcggtgaacgagtcaggccgcgtggagttcggcagctacgcagatgcgctgtggtggggggtggtcacagtcaccaccatcggctatggggacaaggtgccccagacgtgggtcgggaagaccatcgcctcctgcttctctgtctttgccatctccttctttgcgctcccagcggggattcttggctcggggtttgccctgaaggtgcagcagaagcagaggcagaagcacttcaaccggcagatcccggcggcagcctcactcattcagaccgcatggaggtgctatgctgccgagaaccccgactcctccacctggaagatctacatccggaaggccccccggagccacactctgctgtcacccagccccaaacccaagaagtctgtggtggtgagtagcccacctgc

SEQ ID NO: 316945 - DNA, 5121 bp, Homo sapiens
ggcccgagccaccgactgcaggaggagaaggggttgtgctcctggccgaggaaggagaaaggggcggggccggcgggcagcgtgcggcagtgcggagctcctgagaccggcgggcacacgggggtctgtggcccccgccgtagcagtggctgccgccgtcgcttggttcccgtcggtctgcgggaggcgggttatggcggcggcggcagtgagagctgtgaatgaattctccgggtggacgagggaagaagaaaggctccggcggcgccagcaacccggtgcctcccaggcctccgcccccttgcctggcccccgcccctcccgccgccgggccggcccctccgcccgagtcgccgcataagcggaacctgtactatttctcctacccgctgtttgtaggcttcgcgctgctgcgtttggtcgccttccacctggggctcctcttcgtgtggctctgccagcgcttctcccgcgccctcatggcagccaagaggagctccggggccgcgccagcacctgcctcggcctcggccccggcgccggtgccgggcggcgaggccgagcgcgtccgagtcttccacaaacaggccttcgagtacatctccattgccctgcgcatcgatgaggatgagaaagcaggacagaaggagcaagctgtggaatggtataagaaaggtattgaagaactggaaaaaggaatagctgttatagttacaggacaaggtgaacagtgtgaaagagctagacgccttcaagctaaaatgatgactaatttggttatggccaaggaccgcttacaacttctagaaagtggagctgttccaaaaagaaaagaccccttaacacacactagtaattcactgcctcgttcaaaaacagttatgaaaactggatctgcaggcctttcaggccaccatagagcacctagttacagtggtttatccatggtttctggagtgaaacagggatctggtcctgctcctaccactcataagggtactccgaaaacaaataggacaaataaaccttctacccctacaactgctactcgtaagaaaaaagacttgaagaattttaggaatgtggacagcaaccttgctaaccttataatgaatgaaattgtggacaatggaacagctgttaaatttgatgatatagctggtcaagacttggcaaaacaagcattgcaagaaattgttattcttccttctctgaggcctgagttgttcacagggcttagagctcctgccagagggctgttactctttggtccacctgggaatgggaagacaatgctggctaaagcagtagctgcagaatcgaatgcaaccttctttaatataagtgctgcaagtttaacttcaaaatacgtgggagaaggagagaaattggtgagggctctttttgctgtggctcgagaacttcaaccttctataatttttatagatgaagttgatagccttttgtgtgaaagaagagaaggggagcacgatgctagtagacgcctaaaaactgaatttctaatagaatttgatggtgtacagtctgctggagatgacagagtacttgtaatgggtgcaactaataggccacaagagcttgatgaggctgttctcaggcgtttcatcaaacgggtatatgtgtctttaccaaatgaggagacaagactacttttgcttaaaaatctgttatgtaaacaaggaagtccattgacccaaaaagaactagcacaacttgctagaatgactgatggatactcaggaagtgacctaacagctttggcaaaagatgcagcactgggtcctatccgagaactaaaaccagaacaggtgaagaatatgtctgccagtgagatgagaaatattcgattatctgacttcactgaatccttgaaaaaaataaaacgcagcgtcagccctcaaactttagaagcgtacatacgttggaacaaggactttggagataccactgtttaaggaaatacctttgtaaacctgcagaacattttacttaaaagaggaaacacaagatcttcaatgaacgtcatcggctacagaaacagcctaagtttacaggactttttagagtcttacatatttgtgcaccaaacttgaagatgaaccagaaaacagacttaaacaaaatatacaatgcaaatgtaattttttgttgtttaaggccttgccttgatggtcacagttatcccaatggacactaagttagagcacaacaaaacctgattctggtcttctttaccaatataatcataatgtaaataataatttgtatattgtgttgcagatgaaagtattccaggaacagtgaatggtagaagacacaagaacatttgtttgtttgtcttctgatgttttttcttaaaatagtaatttctcctacttttcttttctactgttgtcttaactacaggtgattggaatgccaaacactcttaagtttattttcttttttcgttttataaattcagtgtgccaaatgaaacttttttcctaagtaactgtaataggaaaaagtttattttgagagtttcttcttcataaatctacagacattaaacaattgttgtgttctttttaccttttatttttctattaccttgctaccaaacagtttagatagcaatataatagcaaaaaagcaaatatggtaaaatagagaaggtttgaaggtttgagttactctgtcatataacatgtagatcagtcttcatgtgacctgcagtatttttttttctaatgtatttgtcagaaatctgttgtagactgttaacttcttcctgatggaatttattttctgcaagaattattctgatatttaagagagccaattttaactgctgtgaaaatgtttccagtgcaagagaagggaaatactaggaactaagacatttctaatttattgcttattactttcttaattttacaggataattataagcaagtggaactaccatcttttattcttaataattattaatcccttcaatgaaactttaaaaaaactgaatttttatacatggcatacatttttctagttccttctgcttgctttattaactcaaaagttctagttctagtctgttgatctgccttttgttctcccaaaatgtacagtaattccatttgtttgtataaatatgcctggattttcattataaaaatgtcattgtagggagtagagactcatatcatggccttttaaatattgtaataaaggcaaatagatatttgcccttagtttactggttaaaagtttgtttacagaacttttctctggtgcttaaatgatgctatgtaaaatgtcatgagtggaaagaatatttgtagtagtaacaagaatttttcatttaggaaagatttcttaggttttgaaagaatacattaaaataaaaaacttgcccctactaggtaagaactttataatgaagacatacattcttcttaattttactcttgctcttgttaaagatttgtttgaatatagaagatgcatgatttctggggtttttttttttttttgagacagagtttcgctcttgttgcccaggctggagtgcaatggcgcaatctcgactcaccacaacctccgcctcccaggttcaagcaattctcctgcctcagcctcccgagtagctgggattacaggcatgcgccactaccccagctaattttgtatttttagtagagatggggtttctccatgttggtcaggctggtcttgaactcctgacctcaggtgatccgcctgcctcggcctcccaaagtgctgggattacaggcataagccactgcgcccagccagaagatgcatgatttcttaggatcatatgctgtttgtagccataaggtaaatcatgtctcttccaatcatgactttggaactccctgaataataaaaatgagagttgagataaataggggaaaaaaaatttttttcaagccagagctatgcatatgttaggtgatgggtagtatccctttaaggtctctaacattacaacatcaattatgaaatactgataacgaaaggtagtaatgaaatatatatgatgaaaagaattgagaagttctaaattaagacatttcagttaagctcataaaatttcattgttttcatttaaaaggagattaacgttattgatacttggataactggctaatcatattaaaggactatgtggttccagctcaacttttaatatattgtctcctttaaaactatcatggttataattctattgggaaagacttttagataacaaagatttcaaatgttaaaagagataaaagtcaggttaatactatcttaaacactgagtcagaaaatcattactgtatagaagttgctttcctgatcaagtctgaacttcagctagtgctagagaactattttctatgacttaactctaaccaagttttattttaagctgtttctttgatagaagggccatgaaaatagagtaatgatatagtaggagataagggattggtttggtctttttcaataaagatagaagttgctgaagttttctgaattaataatgacttagattgtgaccttttagattcggtgttgagctctgtgttgtattacttcctaaaagataatgcttaaacattaagcattagtgtgctcttcatgttaatatggcagagttttgtaaactaaattaaaacttactgatatattggactttgagccaagggaaagaatgagtactatctttccagatatcttaagggtaaaagcttattctaagacagtctgtccattgagaatattagatttctgacttgcaaatatgtttgtactccagaagaattagaggaaaagcagatactagaattctaatttaattacatatacagccgtctttgtttatagtgtagaattctttatattttgtacaaaaactaattcttttggtaaaatgaaccatttacagttcggttttggactctgagtcaaaggattttcctttaaatgcttgtctcaattttagtctggtcttttgtacttttcttcagaagaaatgaattaaagggtacagttgcataaagtgggtttttatcctaatgtattggaaataaatgataaacttta

SEQ ID NO: 316946 - DNA, 555 bp, Homo sapiens
tgaatattatattttaaaagcttttcctgtcatttgctgtttcagctttaaattcaaaattatatttctaaaagtgctggatttttttttttaggcgtttcatcaaacgggtatatgtgtctttaccaaatgaggaggtatgtatctgtgtttgaattttttttgttttagagcagaaacaagaactaccatcttgacaatattaagtcttccaatccatggtacagctactttggaaaacagtttagtggtttcttaaaaagatgtacataagcttactgtcagagccagcaatttcactcctaagaatttaccccagagaaacaaaaatgtatgtccacacaaagacttgtacaagaatttttatagcagcaatattaataatagccagaactacaaatgatctaaaatgtttattttggtgaataaacaaatgtggtatattcatttaatggatactgttatccattatacatgctgcatactcacttcatatattaagttttatgaatgaaatccagcctgggtaacagcacaagaccctgtctcaatata

SEQ ID NO: 316947 - DNA, 5217 bp, Homo sapiens
ggcccgagccaccgactgcaggaggagaaggggttgtgctcctggccgaggaaggagaaaggggcggggccggcgggcagcgtgcggcagtgcggagctcctgagaccggcgggcacacgggggtctgtggcccccgccgtagcagtggctgccgccgtcgcttggttcccgtcggtctgcgggaggcgggttatggcggcggcggcagtgagagctgtgaatgaattctccgggtggacgagggaagaagaaaggctccggcggcgccagcaacccggtgcctcccaggcctccgcccccttgcctggcccccgcccctcccgccgccgggccggcccctccgcccgagtcgccgcataagcggaacctgtactatttctcctacccgctgtttgtaggcttcgcgctgctgcgtttggtcgccttccacctggggctcctcttcgtgtggctctgccagcgcttctcccgcgccctcatggcagccaagaggagctccggggccgcgccagcacctgcctcggcctcggccccggcgccggtgccgggcggcgaggccgagcgcgtccgagtcttccacaaacaggccttcgagtacatctccattgccctgcgcatcgatgaggatgagaaagcaggacagaaggagcaagctgtggaatggtataagaaaggtattgaagaactggaaaaaggaatagctgttatagttacaggacaaggtgaacagtgtgaaagagctagacgccttcaagctaaaatgatgactaatttggttatggccaaggaccgcttacaacttctagagaagatgcaaccagttttgccattttccaagtcacaaacggacgtctataatgacagtactaacttggcatgccgcaatggacatctccagtcagaaagtggagctgttccaaaaagaaaagaccccttaacacacactagtaattcactgcctcgttcaaaaacagttatgaaaactggatctgcaggcctttcaggccaccatagagcacctagttacagtggtttatccatggtttctggagtgaaacagggatctggtcctgctcctaccactcataagggtactccgaaaacaaataggacaaataaaccttctacccctacaactgctactcgtaagaaaaaagacttgaagaattttaggaatgtggacagcaaccttgctaaccttataatgaatgaaattgtggacaatggaacagctgttaaatttgatgatatagctggtcaagacttggcaaaacaagcattgcaagaaattgttattcttccttctctgaggcctgagttgttcacagggcttagagctcctgccagagggctgttactctttggtccacctgggaatgggaagacaatgctggctaaagcagtagctgcagaatcgaatgcaaccttctttaatataagtgctgcaagtttaacttcaaaatacgtgggagaaggagagaaattggtgagggctctttttgctgtggctcgagaacttcaaccttctataatttttatagatgaagttgatagccttttgtgtgaaagaagagaaggggagcacgatgctagtagacgcctaaaaactgaatttctaatagaatttgatggtgtacagtctgctggagatgacagagtacttgtaatgggtgcaactaataggccacaagagcttgatgaggctgttctcaggcgtttcatcaaacgggtatatgtgtctttaccaaatgaggagacaagactacttttgcttaaaaatctgttatgtaaacaaggaagtccattgacccaaaaagaactagcacaacttgctagaatgactgatggatactcaggaagtgacctaacagctttggcaaaagatgcagcactgggtcctatccgagaactaaaaccagaacaggtgaagaatatgtctgccagtgagatgagaaatattcgattatctgacttcactgaatccttgaaaaaaataaaacgcagcgtcagccctcaaactttagaagcgtacatacgttggaacaaggactttggagataccactgtttaaggaaatacctttgtaaacctgcagaacattttacttaaaagaggaaacacaagatcttcaatgaacgtcatcggctacagaaacagcctaagtttacaggactttttagagtcttacatatttgtgcaccaaacttgaagatgaaccagaaaacagacttaaacaaaatatacaatgcaaatgtaattttttgttgtttaaggccttgccttgatggtcacagttatcccaatggacactaagttagagcacaacaaaacctgattctggtcttctttaccaatataatcataatgtaaataataatttgtatattgtgttgcagatgaaagtattccaggaacagtgaatggtagaagacacaagaacatttgtttgtttgtcttctgatgttttttcttaaaatagtaatttctcctacttttcttttctactgttgtcttaactacaggtgattggaatgccaaacactcttaagtttattttcttttttcgttttataaattcagtgtgccaaatgaaacttttttcctaagtaactgtaataggaaaaagtttattttgagagtttcttcttcataaatctacagacattaaacaattgttgtgttctttttaccttttatttttctattaccttgctaccaaacagtttagatagcaatataatagcaaaaaagcaaatatggtaaaatagagaaggtttgaaggtttgagttactctgtcatataacatgtagatcagtcttcatgtgacctgcagtatttttttttctaatgtatttgtcagaaatctgttgtagactgttaacttcttcctgatggaatttattttctgcaagaattattctgatatttaagagagccaattttaactgctgtgaaaatgtttccagtgcaagagaagggaaatactaggaactaagacatttctaatttattgcttattactttcttaattttacaggataattataagcaagtggaactaccatcttttattcttaataattattaatcccttcaatgaaactttaaaaaaactgaatttttatacatggcatacatttttctagttccttctgcttgctttattaactcaaaagttctagttctagtctgttgatctgccttttgttctcccaaaatgtacagtaattccatttgtttgtataaatatgcctggattttcattataaaaatgtcattgtagggagtagagactcatatcatggccttttaaatattgtaataaaggcaaatagatatttgcccttagtttactggttaaaagtttgtttacagaacttttctctggtgcttaaatgatgctatgtaaaatgtcatgagtggaaagaatatttgtagtagtaacaagaatttttcatttaggaaagatttcttaggttttgaaagaatacattaaaataaaaaacttgcccctactaggtaagaactttataatgaagacatacattcttcttaattttactcttgctcttgttaaagatttgtttgaatatagaagatgcatgatttctggggtttttttttttttttgagacagagtttcgctcttgttgcccaggctggagtgcaatggcgcaatctcgactcaccacaacctccgcctcccaggttcaagcaattctcctgcctcagcctcccgagtagctgggattacaggcatgcgccactaccccagctaattttgtatttttagtagagatggggtttctccatgttggtcaggctggtcttgaactcctgacctcaggtgatccgcctgcctcggcctcccaaagtgctgggattacaggcataagccactgcgcccagccagaagatgcatgatttcttaggatcatatgctgtttgtagccataaggtaaatcatgtctcttccaatcatgactttggaactccctgaataataaaaatgagagttgagataaataggggaaaaaaaatttttttcaagccagagctatgcatatgttaggtgatgggtagtatccctttaaggtctctaacattacaacatcaattatgaaatactgataacgaaaggtagtaatgaaatatatatgatgaaaagaattgagaagttctaaattaagacatttcagttaagctcataaaatttcattgttttcatttaaaaggagattaacgttattgatacttggataactggctaatcatattaaaggactatgtggttccagctcaacttttaatatattgtctcctttaaaactatcatggttataattctattgggaaagacttttagataacaaagatttcaaatgttaaaagagataaaagtcaggttaatactatcttaaacactgagtcagaaaatcattactgtatagaagttgctttcctgatcaagtctgaacttcagctagtgctagagaactattttctatgacttaactctaaccaagttttattttaagctgtttctttgatagaagggccatgaaaatagagtaatgatatagtaggagataagggattggtttggtctttttcaataaagatagaagttgctgaagttttctgaattaataatgacttagattgtgaccttttagattcggtgttgagctctgtgttgtattacttcctaaaagataatgcttaaacattaagcattagtgtgctcttcatgttaatatggcagagttttgtaaactaaattaaaacttactgatatattggactttgagccaagggaaagaatgagtactatctttccagatatcttaagggtaaaagcttattctaagacagtctgtccattgagaatattagatttctgacttgcaaatatgtttgtactccagaagaattagaggaaaagcagatactagaattctaatttaattacatatacagccgtctttgtttatagtgtagaattctttatattttgtacaaaaactaattcttttggtaaaatgaaccatttacagttcggttttggactctgagtcaaaggattttcctttaaatgcttgtctcaattttagtctggtcttttgtacttttcttcagaagaaatgaattaaagggtacagttgcataaagtgggtttttatcctaatgtattggaaataaatgataaacttta

SEQ ID NO: 316948 - DNA, 5676 bp, Homo sapiens
ggcccgagccaccgactgcaggaggagaaggggttgtgctcctggccgaggaaggagaaaggggcggggccggcgggcagcgtgcggcagtgcggagctcctgagaccggcgggcacacgggggtctgtggcccccgccgtagcagtggctgccgccgtcgcttggttcccgtcggtctgcgggaggcgggttatggcggcggcggcagtgagagctgtgaatgaattctccgggtggacgagggaagaagaaaggctccggcggcgccagcaacccggtgcctcccaggcctccgcccccttgcctggcccccgcccctcccgccgccgggccggcccctccgcccgagtcgccgcataagcggaacctgtactatttctcctacccgctgtttgtaggcttcgcgctgctgcgtttggtcgccttccacctggggctcctcttcgtgtggctctgccagcgcttctcccgcgccctcatggcagccaagaggagctccggggccgcgccagcacctgcctcggcctcggccccggcgccggtgccgggcggcgaggccgagcgcgtccgagtcttccacaaacaggccttcgagtacatctccattgccctgcgcatcgatgaggatgagaaagcaggacagaaggagcaagctgtggaatggtataagaaaggtattgaagaactggaaaaaggaatagctgttatagttacaggacaaggtgaacagtgtgaaagagctagacgccttcaagctaaaatgatgactaatttggttatggccaaggaccgcttacaacttctagagaagatgcaaccagttttgccattttccaagtcacaaacggacgtctataatgacagtactaacttggcatgccgcaatggacatctccagtcagaaagtggagctgttccaaaaagaaaagaccccttaacacacactagtaattcactgcctcgttcaaaaacagttatgaaaactggatctgcaggcctttcaggccaccatagagcacctagttacagtggtttatccatggtttctggagtgaaacagggatctggtcctgctcctaccactcataagggtactccgaaaacaaataggacaaataaaccttctacccctacaactgctactcgtaagaaaaaagacttgaagaattttaggaatgtggacagcaaccttgctaaccttataatgaatgaaattgtggacaatggaacagctgttaaatttgatgatatagctggtcaagacttggcaaaacaagcattgcaagaaattgttattcttccttctctgaggcctgagttgttcacagggcttagagctcctgccagagggctgttactctttggtccacctgggaatgggaagacaatgctggctaaagcagtagctgcagaatcgaatgcaaccttctttaatataagtgctgcaagtttaacttcaaaatacgtgggagaaggagagaaattggtgagggctctttttgctgtggctcgagaacttcaaccttctataatttttatagatgaagttgatagccttttgtgtgaaagaagagaaggggagcacgatgctagtagacgcctaaaaactgaatttctaatagaatttgatggtgtacagtctgctggagatgacagagtacttgtaatgggtgcaactaataggccacaagagcttgatgaggctgttctcaggcgtttcatcaaacgggtatatgtgtctttaccaaatgaggagacaagactacttttgcttaaaaatctgttatgtaaacaaggaagtccattgacccaaaaagaactagcacaacttgctagaatgactgatggatactcaggaagtgacctaacagctttggcaaaagatgcagcactgggtcctatccgagaactaaaaccagaacaggtgaagaatatgtctgccagtgagatgagaaatattcgattatctgacttcactgaatccttgaaaaaaataaaacgcagcgtcagccctcaaactttagaagcgtacatacgttggaacaaggactttggagataccactgtttaaggaaatacctttgtaaacctgcagaacattttacttaaaagaggaaacacaagatcttcaatgaacgtcatcggctacagaaacagcctaagtttacaggactttttagagtcttacatatttgtgcaccaaacttgaagatgaaccagaaaacagacttaaacaaaatatacaatgcaaatgtaattttttgttgtttaaggccttgccttgatggtcacagttatcccaatggacactaagttagagcacaacaaaacctgattctggtcttctttaccaatataatcataatgtaaataataatttgtatattgtgttgcagatgaaagtattccaggaacagtgaatggtagaagacacaagaacatttgtttgtttgtcttctgatgttttttcttaaaatagtaatttctcctacttttcttttctactgttgtcttaactacaggtgattggaatgccaaacactcttaagtttattttcttttttcgttttataaattcagtgtgccaaatgaaacttttttcctaagtaactgtaataggaaaaagtttattttgagagtttcttcttcataaatctacagacattaaacaattgttgtgttctttttaccttttatttttctattaccttgctaccaaacagtttagatagcaatataatagcaaaaaagcaaatatggtaaaatagagaaggtttgaaggtttgagttactctgtcatataacatgtagatcagtcttcatgtgacctgcagtatttttttttctaatgtatttgtcagaaatctgttgtagactgttaacttcttcctgatggaatttattttctgcaagaattattctgatatttaagagagccaattttaactgctgtgaaaatgtttccagtgcaagagaagggaaatactaggaactaagacatttctaatttattgcttattactttcttaattttacaggataattataagcaagtggaactaccatcttttattcttaataattattaatcccttcaatgaaactttaaaaaaactgaatttttatacatggcatacatttttctagttccttctgcttgctttattaactcaaaagttctagttctagtctgttgatctgccttttgttctcccaaaatgtacagtaattccatttgtttgtataaatatgcctggattttcattataaaaatgtcattgtagggagtagagactcatatcatggccttttaaatattgtaataaaggcaaatagatatttgcccttagtttactggttaaaagtttgtttacagaacttttctctggtgcttaaatgatgctatgtaaaatgtcatgagtggaaagaatatttgtagtagtaacaagaatttttcatttaggaaagatttcttaggttttgaaagaatacattaaaataaaaaacttgcccctactaggtaagaactttataatgaagacatacattcttcttaattttactcttgctcttgttaaagatttgtttgaatatagaagatgcatgatttctggggtttttttttttttttgagacagagtttcgctcttgttgcccaggctggagtgcaatggcgcaatctcgactcaccacaacctccgcctcccaggttcaagcaattctcctgcctcagcctcccgagtagctgggattacaggcatgcgccactaccccagctaattttgtatttttagtagagatggggtttctccatgttggtcaggctggtcttgaactcctgacctcaggtgatccgcctgcctcggcctcccaaagtgctgggattacaggcataagccactgcgcccagccagaagatgcatgatttcttaggatcatatgctgtttgtagccataaggtaaatcatgtctcttccaatcatgactttggaactccctgaataataaaaatgagagttgagataaataggggaaaaaaaatttttttcaagccagagctatgcatatgttaggtgatgggtagtatccctttaaggtctctaacattacaacatcaattatgaaatactgataacgaaaggtagtaatgaaatatatatgatgaaaagaattgagaagttctaaattaagacatttcagttaagctcataaaatttcattgttttcatttaaaaggagattaacgttattgatacttggataactggctaatcatattaaaggactatgtggttccagctcaacttttaatatattgtctcctttaaaactatcatggttataattctattgggaaagacttttagataacaaagatttcaaatgttaaaagagataaaagtcaggttaatactatcttaaacactgagtcagaaaatcattactgtatagaagttgctttcctgatcaagtctgaacttcagctagtgctagagaactattttctatgacttaactctaaccaagttttattttaagctgtttctttgatagaagggccatgaaaatagagtaatgatatagtaggagataagggattggtttggtctttttcaataaagatagaagttgctgaagttttctgaattaataatgacttagattgtgaccttttagattcggtgttgagctctgtgttgtattacttcctaaaagataatgcttaaacattaagcattagtgtgctcttcatgttaatatggcagagttttgtaaactaaattaaaacttactgatatattggactttgagccaagggaaagaatgagtactatctttccagatatcttaagggtaaaagcttattctaagacagtctgtccattgagaatattagatttctgacttgcaaatatgtttgtactccagaagaattagaggaaaagcagatactagaattctaatttaattacatatacagccgtctttgtttatagtgtagaattctttatattttgtacaaaaactaattcttttggtaaaatgaaccatttacagttcggttttggactctgagtcaaaggattttcctttaaatgcttgtctcaattttagtctggtcttttgtacttttcttcagaagaaatgaattaaagggtacagttgcataaagtgggtttttatcctaatgtattggaaataaatgataaactttaaaaaaaaaaaaaacaaacaaaaaaacaacacactttcgggcgacccactcggcccccgcgaaaaccctctcacaaacacacatcgcgcaatgagggagcacggcgagcccaacgagacgagacacctgaccaccagctggacacaacacggtttctccagagaggagaacacacgggggacacgagcacacaagcgcgagcagtcgagagtaatgaccccaaccacgagtatacagaaaaaagcgccaccgcggcggcgcgaacaaacacgagagaaggcgcatcttccgacgaacacacaaaactaccacgacagcaggcgcagatacccagagaagaggagcacactaaacaggacgcacgatctcatacacaaagcgaggaaggccctacagcggacaccacagacggccaaataaattacgcaaacaaataaaagcccgcgccacccgcgcggcg

SEQ ID NO: 316949 - DNA, 4458 bp, Homo sapiens
ggcccgagccaccgactgcaggaggagaaggggttgtgctcctggccgaggaaggagaaaggggcggggccggcgggcagcgtgcggcagtgcggagctcctgagaccggcgggcacacgggggtctgtggcccccgccgtagcagtggctgccgccgtcgcttggttcccgtcggtctgcgggaggcgggttatggcggcggcggcagtgagagctgtgaatgaattctccgggtggacgagggaagaagaaaggctccggcggcgccagcaacccggtgcctcccaggcctccgcccccttgcctggcccccgcccctcccgccgccgggccggcccctccgcccgagtcgccgcataagcggaacctgtactatttctcctacccgctgtttgtaggcttcgcgctgctgcgtttggtcgccttccacctggggctcctcttcgtgtggctctgccagcgcttctcccgcgccctcatggcagccaagaggagctccggggccgcgccagcacctgcctcggcctcggccccggcgccggtgccgggcggcgaggccgagcgcgtccgagtcttccacaaacaggccttcgagtacatctccattgccctgcgcatcgatgaggatgagaaagcaggacagaaggagcaagctgtggaatggtataagaaaggtattgaagaactggaaaaaggaatagctgttatagttacaggacaaggtgaacagtgtgaaagagctagacgccttcaagctaaaatgatgactaatttggttatggccaaggaccgcttacaacttctagagaagatgcaaccagttttgccattttccaagtcacaaacggacgtctataatgacagtactaacttggcatgccgcaatggacatctccagtcagaaagtggagctgttccaaaaagaaaagaccccttaacacacactagtaattcactgcctcgttcaaaaacagttatgaaaactggatctgcaggcctttcaggccaccatagagcacctagttacagtggtttatccatggtttctggagtgaaacagggatctggtcctgctcctaccactcataagggtactccgaaaacaaataggacaaataaaccttctacccctacaactgctactcgtaagaaaaaagacttgaagaattttaggaatgtggacagcaaccttgctaaccttataatgaatgaaattgtggacaatggaacagctgttaaatttgatgatatagctggtcaagacttggcaaaacaagcattgcaagaaattgttattcttccttctctgaggcctgagttgttcacagggcttagagctcctgccagagggctgttactctttggtccacctgggaatgggaagacaatgctggctaaagcagtagctgcagaatcgaatgcaaccttctttaatataagtgctgcaagtttaacttcaaaatacgtgggagaaggagagaaattggtgagggctctttttgctgtggctcgagaacttcaaccttctataatttttatagatgaagttgatagccttttgtgtgaaagaagagaaggggagcacgatgctagtagacgcctaaaaactgaatttctaatagaatttgatggtgtacagtctgctggagatgacagagtacttgtaatgggtgcaactaataggccacaagagcttgatgaggctgttctcaggcgtttcatcaaacgggtatatgtgtctttaccaaatgaggagacaagactacttttgcttaaaaatctgttatgtaaacaaggaagtccattgacccaaaaagaactagcacaacttgctagaatgactgatggatactcaggaagtgacctaacagctttggcaaaagatgcagcactgggtcctatccgagaactaaaaccagaacaggtgaagaatatgtctgccagtgagatgagaaatattcgattatctgacttcactgaatccttgaaaaaaataaaacgcagcgtcagccctcaaactttagaagcgtacatacgttggaacaaggactttggagataccactgtttaaggaaatacctttgtaaacctgcagaacattttacttaaaagaggaaacacaagatcttcaatgaacgtcatcggctacagaaacagcctaagtttacaggactttttagagtcttacatatttgtgcaccaaacttgaagatgaaccagaaaacagacttaaacaaaatatacaatgcaaatgtaattttttgttgtttaaggccttgccttgatggtcacagttatcccaatggacactaagttagagcacaacaaaacctgattctggtcttctttaccaatataatcataatgtaaataataatttgtatattgtgttgcagatgaaagtattccaggaacagtgaatggtagaagacacaagaacatttgtttgtttgtcttctgatgttttttcttaaaatagtaatttctcctacttttcttttctactgttgtcttaactacaggtgattggaatgccaaacactcttaagtttattttcttttttcgttttataaattcagtgtgccaaatgaaacttttttcctaagtaactgtaataggaaaaagtttattttgagagtttcttcttcataaatctacagacattaaacaattgttgtgttctttttaccttttatttttctattaccttgctaccaaacagtttagatagcaatataatagcaaaaaagcaaatatggtaaaatagagaaggtttgaaggtttgagttactctgtcatataacatgtagatcagtcttcatgtgacctgcagtatttttttttctaatgtatttgtcagaaatctgttgtagactgttaacttcttcctgatggaatttattttctgcaagaattattctgatatttaagagagccaattttaactgctgtgaaaatgtttccagtgcaagagaagggaaatactaggaactaagacatttctaatttattgcttattactttcttaattttacaggataattataagcaagtggaactaccatcttttattcttaataattattaatcccttcaatgaaactttaaaaaaactgaatttttatacatggcatacatttttctagttccttctgcttgctttattaactcaaaagttctagttctagtctgttgatctgccttttgttctcccaaaatgtacagtaattccatttgtttgtataaatatgcctggattttcattataaaaatgtcattgtagggagtagagactcatatcatggccttttaaatattgtaataaaggcaaatagatatttgcccttagtttactggttaaaagtttgtttacagaacttttctctggtgcttaaatgatgctatgtaaaatgtcatgagtggaaagaatatttgtagtagtaacaagaatttttcatttaggaaagatttcttaggttttgaaagaatacattaaaataaaaaacttgcccctactaggtaagaactttataatgaagacatacattcttcttaattttactcttgctcttgttaaagatttgtttgaatatagaagatgcatgatttctggggtttttttttttttttgagacagagtttcgctcttgttgcccaggctggagtgcaatggcgcaatctcgactcaccacaacctccgcctcccaggttcaagcaattctcctgcctcagcctcccgagtagctgggattacaggcatgcgccactaccccagctaattttgtatttttagtagagatggggtttctccatgttggtcaggctggtcttgaactcctgacctcaggtgatccgcctgcctcggcctcccaaagtgctgggattacaggcataagccactgcgcccagccagaagatgcatgatttcttaggatcatatgctgtttgtagccataaggtaaatcatgtctcttccaatcatgactttggaactccctgaataataaaaatgagagttgagataaataggggaaaaaaaatttttttcaagccagagctatgcatatgttaggtgatgggtagtatccctttaaggtctctaacattacaacatcaattatgaaatactgataacgaaaggtagtaatgaaatatatatgatgaaaagaattgagaagttctaaattaagacatttcagttaagctcataaaatttcattgttttcatttaaaaggagattaacgttattgatacttggataactggctaatcatattaaaggactatgtggttccagctcaacttttaatatattgtctcctttaaaactatcatggttataattctattcgttaattgatataaaaaaaaaacgacaaaattaggcttgtaaaactgactttttcatacgtgggttttgaatctagccccagacagacataatgtaggaataca

SEQ ID NO: 316950 - DNA, 3874 bp, Homo sapiens
aaattaaaacacaatactgctgggtgcagtggctcacacctgtaatcccagcactttgggaggccgaggtgggcagatcacctgatgtcaggggttcaagaccagcctgaccaatatggtgaaaccccatctctactaaaaatacaaaaattagctgggcatggtggcgggtgcctgtaatctcagctactcaggaggctgaggcaggagaatcgcttgaacccaggaggcagaggttgcagtgagccaagatcgcgccattgcactccagcctgggggacagagcaagactccgtctcaaaaaattttctataaatgattgtgttttgtttttatattggaaaaatattatgctttcaaatgttaatacctatgaaactaaacacaagtaataaatatattagtatagcatttattaaggtttcttgtgtagcagatcaacatagaaaatatatttaaatggctgacataattttctaagaatacatacacgtatattttttataacattaagaaacagcagcatcattactttaatccatcatttcgttaaccaccatatacctgttgatcatttgtattgtcatgtgctttttaaaaatctagatgagaaatattcgattatctgacttcactgaatccttgaaaaaaataaaacgcagcgtcagccctcaaactttagaagcgtacatacgttggaacaaggactttggagataccactgtttaaggaaatacctttgtaaacctgcagaacattttacttaaaagaggaaacacaagatcttcaatgaacgtcatcggctacagaaacagcctaagtttacaggactttttagagtcttacatatttgtgcaccaaacttgaagatgaaccagaaaacagacttaaacaaaatatacaatgcaaatgtaattttttgttgtttaaggccttgccttgatggtcacagttatcccaatggacactaagttagagcacaacaaaacctgattctggtcttctttaccaatataatcataatgtaaataataatttgtatattgtgttgcagatgaaagtattccaggaacagtgaatggtagaagacacaagaacatttgtttgtttgtcttctgatgttttttcttaaaatagtaatttctcctacttttcttttctactgttgtcttaactacaggtgattggaatgccaaacactcttaagtttattttcttttttcgttttataaattcagtgtgccaaatgaaacttttttcctaagtaactgtaataggaaaaagtttattttgagagtttcttcttcataaatctacagacattaaacaattgttgtgttctttttaccttttatttttctattaccttgctaccaaacagtttagatagcaatataatagcaaaaaagcaaatatggtaaaatagagaaggtttgaaggtttgagttactctgtcatataacatgtagatcagtcttcatgtgacctgcagtatttttttttctaatgtatttgtcagaaatctgttgtagactgttaacttcttcctgatggaatttattttctgcaagaattattctgatatttaagagagccaattttaactgctgtgaaaatgtttccagtgcaagagaagggaaatactaggaactaagacatttctaatttattgcttattactttcttaattttacaggataattataagcaagtggaactaccatcttttattcttaataattattaatcccttcaatgaaactttaaaaaaactgaatttttatacatggcatacatttttctagttccttctgcttgctttattaactcaaaagttctagttctagtctgttgatctgccttttgttctcccaaaatgtacagtaattccatttgtttgtataaatatgcctggattttcattataaaaatgtcattgtagggagtagagactcatatcatggccttttaaatattgtaataaaggcaaatagatatttgcccttagtttactggttaaaagtttgtttacagaacttttctctggtgcttaaatgatgctatgtaaaatgtcatgagtggaaagaatatttgtagtagtaacaagaatttttcatttaggaaagatttcttaggttttgaaagaatacattaaaataaaaaacttgcccctactaggtaagaactttataatgaagacatacattcttcttaattttactcttgctcttgttaaagatttgtttgaatatagaagatgcatgatttctggggtttttttttttttttgagacagagtttcgctcttgttgcccaggctggagtgcaatggcgcaatctcgactcaccacaacctccgcctcccaggttcaagcaattctcctgcctcagcctcccgagtagctgggattacaggcatgcgccactaccccagctaattttgtatttttagtagagatggggtttctccatgttggtcaggctggtcttgaactcctgacctcaggtgatccgcctgcctcggcctcccaaagtgctgggattacaggcataagccactgcgcccagccagaagatgcatgatttcttaggatcatatgctgtttgtagccataaggtaaatcatgtctcttccaatcatgactttggaactccctgaataataaaaatgagagttgagataaataggggaaaaaaaatttttttcaagccagagctatgcatatgttaggtgatgggtagtatccctttaaggtctctaacattacaacatcaattatgaaatactgataacgaaaggtagtaatgaaatatatatgatgaaaagaattgagaagttctaaattaagacatttcagttaagctcataaaatttcattgttttcatttaaaaggagattaacgttattgatacttggataactggctaatcatattaaaggactatgtggttccagctcaacttttaatatattgtctcctttaaaactatcatggttataattctattgggaaagacttttagataacaaagatttcaaatgttaaaagagataaaagtcaggttaatactatcttaaacactgagtcagaaaatcattactgtatagaagttgctttcctgatcaagtctgaacttcagctagtgctagagaactattttctatgacttaactctaaccaagttttattttaagctgtttctttgatagaagggccatgaaaatagagtaatgatatagtaggagataagggattggtttggtctttttcaataaagatagaagttgctgaagttttctgaattaataatgacttagattgtgaccttttagattcggtgttgagctctgtgttgtattacttcctaaaagataatgcttaaacattaagcattagtgtgctcttcatgttaatatggcagagttttgtaaactaaattaaaacttactgatatattggactttgagccaagggaaagaatgagtactatctttccagatatcttaagggtaaaagcttattctaagacagtctgtccattgagaatattagatttctgacttgcaaatatgtttgtactccagaagaattagaggaaaagcagatactagaattctaatttaattacatatacagccgtctttgtttatagtgtagaattctttatattttgtacaaaaactaattcttttggtaaaatgaaccatttacagttcggttttggactctgagtcaaaggattttcctttaaatgcttgtctcaattttagtctggtcttttgtacttttcttcagaagaaatgaattaaagggtacagttgcataaagtgggtttttatcctaatgtattggaaataaatgataaacttta

SEQ ID NO: 316951 - DNA, 3368 bp, Homo sapiens
  misc_feature (3346)..(3346): n is a, c, g, or t
  misc_feature (3360)..(3360): n is a, c, g, or t
  misc_feature (3362)..(3362): n is a, c, g, or t
ggcccgagccaccgactgcaggaggagaaggggttgtgctcctggccgaggaaggagaaaggggcggggccggcgggcagcgtgcggcagtgcggagctcctgagaccggcgggcacacgggggtctgtggcccccgccgtagcagtggctgccgccgtcgcttggttcccgtcggtctgcgggaggcgggttatggcggcggcggcagtgagagctgtgaatgaattctccgggtggacgagggaagaagaaaggctccggcggcgccagcaacccggtgcctcccaggcctccgcccccttgcctggcccccgcccctcccgccgccgggccggcccctccgcccgagtcgccgcataagcggaacctgtactatttctcctacccgctgtttgtaggcttcgcgctgctgcgtttggtcgccttccacctggggctcctcttcgtgtggctctgccagcgcttctcccgcgccctcatggcagccaagaggagctccggggccgcgccagcacctgcctcggcctcggccccggcgccggtgccgggcggcgaggccgagcgcgtccgagtcttccacaaacaggccttcgagtacatctccattgccctgcgcatcgatgaggatgagaaagcaggacagaaggagcaagctgtggaatggtataagaaaggtattgaagaactggaaaaaggaatagctgttatagttacaggacaaggtgaacagtgtgaaagagctagacgccttcaagctaaaatgatgactaatttggttatggccaaggaccgcttacaacttctagagaagatgcaaccagttttgccattttccaagtcacaaacggacgtctataatgacagtactaacttggcatgccgcaatggacatctccagtcagaaagtggagctgttccaaaaagaaaagaccccttaacacacactagtaattcactgcctcgttcaaaaacagttatgaaaactggatctgcaggcctttcaggccaccatagagcacctagttacagtggtttatccatggtttctggagtgaaacagggatctggtcctgctcctaccactcataagggtactccgaaaacaaataggacaaataaaccttctacccctacaactgctactcgtaagaaaaaagacttgaagaattttaggaatgtggacagcaaccttgctaaccttataatgaatgaaattgtggacaatggaacagctgttaaatttgatgatatagctggtcaagacttggcaaaacaagcattgcaagaaattgttattcttccttctctgaggcctgagttgttcacagggcttagagctcctgccagagggctgttactctttggtccacctgggaatgggaagacaatgctggctaaagcagtagctgcagaatcgaatgcaaccttctttaatataagtgctgcaagtttaacttcaaaatacgtgggagaaggagagaaattggtgagggctctttttgctgtggctcgagaacttcaaccttctataatttttatagatgaagttgatagccttttgtgtgaaagaagagaaggggagcacgatgctagtagacgcctaaaaactgaatttctaatagaatttgatggtgtacagtctgctggagatgacagagtacttgtaatgggtgcaactaataggccacaagagcttgatgaggctgttctcaggcgtttcatcaaacgggtatatgtgtctttaccaaatgaggagacaagactacttttgcttaaaaatctgttatgtaaacaaggaagtccattgacccaaaaagaactagcacaacttgctagaatgactgatggatactcaggaagtgacctaacagctttggcaaaagatgcagcactgggtcctatccgagaactaaaaccagaacaggtgaagaatatgtctgccagtgagatgagaaatattcgattatctgacttcactgaatccttgaaaaaaataaaacgcagcgtcagccctcaaactttagaagcgtacatacgttggaacaaggactttggagataccactgtttaaggaaatacctttgtaaacctgcagaacattttacttaaaagaggaaacacaagatcttcaatgaacgtcatcggctacagaaacagcctaagtttacaggactttttagagtcttacatatttgtgcaccaaacttgaagatgaaccagaaaacagacttaaacaaaatatacaatgcaaatgtaattttttgttgtttaaggccttgccttgatggtcacagttatcccaatggacactaagttagagcacaacaaaacctgattctggtcttctttaccaatataatcataatgtaaataataatttgtatattgtgttgcagatgaaagtattccaggaacagtgaatggtagaagacacaagaacatttgtttgtttgtcttctgatgttttttcttaaaatagtaatttctcctacttttcttttctactgttgtcttaactacaggtgattggaatgccaaacactcttaagtttattttcttttttcgttttataaattcagtgtgccaaatgaaacttttttcctaagtaactgtaataggaaaaagtttattttgagagtttcttcttcataaatctacagacattaaacaattgttgtgttctttttaccttttatttttctattaccttgctaccaaacagtttagatagcaatataatagcaaaaaagcaaatatggtaaaatagagaaggtttgaaggtttgagttactctgtcatataacatgtagatcagtcttcatgtgacctgcagtatttttttttctaatgtatttgtcagaaatctgttgtagactgttaacttcttcctgatggaatttattttctgcaagaattattctgatatttaagagagccaattttaactgctgtgaaaatgtttccagtgcaagagaagggaaatactaggaactaagacatttctaatttattgcttattactttcttaattttacaggataattataagcaagtggaactaccatcttttattcttaataattattaatcccttcaatgaaactttaaaaaaactgaatttttatacatggcatacatttttctagttccttctgcttgctttattaactcaaaagttctagttctagtctgttgatctgccttttgttctcccaaaatgtacagtaattccatttgtttgtataaatatgcctggattttcattataaaaatgtcattgtagggagtagagactcatatcatggccttttaaatattgtaataaaggcatggcctcgttggcntcagcggtggagtntncggccg

SEQ ID NO: 316952 - DNA, 1367 bp, Homo sapiens
  misc_feature (1345)..(1345): n is a, c, g, or t
  misc_feature (1359)..(1359): n is a, c, g, or t
  misc_feature (1361)..(1361): n is a, c, g, or t
aaattaaaacacaatactgctgggtgcagtggctcacacctgtaatcccagcactttgggaggccgaggtgggcagatcacctgatgtcaggggttcaagaccagcctgaccaatatggtgaaaccccatctctactaaaaatacaaaaattagctgggcatggtggcgggtgcctgtaatctcagctactcaggaggctgaggcaggagaatcgcttgaacccaggaggcagaggttgcagtgagccaagatcgcgccattgcactccagcctgggggacagagcaagactccgtctcaaaaaattttctataaatgattgtgttttgtttttatattggaaaaatattatgctttcaaatgttaatacctatgaaactaaacacaagtaataaatatattagtatagcatttattaaggtttcttgtgtagcagatcaacatagaaaatatatttaaatggctgacataattttctaagaatacatacacgtatattttttataacattaagaaacagcagcatcattactttaatccatcatttcgttaaccaccatatacctgttgatcatttgtattgtcatgtgctttttaaaaatctagatgagaaatattcgattatctgacttcactgaatccttgaaaaaaataaaacgcagcgtcagccctcaaactttagaagcgtacatacgttggaacaaggactttggagataccactgtttaaggaaatacctttgtaaacctgcagaacattttacttaaaagaggaaacacaagatcttcaatgaacgtcatcggctacagaaacagcctaagtttacaggactttttagagtcttacatatttgtgcaccaaacttgaagatgaaccagaaaacagacttaaacaaaatatacaatgcaaatgtaattttttgttgtttaaggccttgccttgatggtcacagttatcccaatggacactaagttagagcacaacaaaacctgattctggtcttctttaccaatataatcataatgtaaataataatttgtatattgtgttgcagatgaaagtattccaggaacagtgaatggtagaagacacaagaacatttgtttgtttgtcttctgatgttttttcttaaaatagtaatttctcctacttttcttttctactgttgtcttaactacaggtgattggaatgccaaacactcttaagtttattttcttttttcgttttataaattcagtgtgccaaatgaaacttttttcctaagtaactgtaataggaaaaagtttattttgagagtttcttcttcataaatctacagacattaaacaattggcctcgttggcntcagcggtggagtntncggccg

SEQ ID NO: 316953 - DNA, 532 bp, Homo sapiens
taatatatcgagactaatttaatatttgctcttgtgatttttaaaggctaaagcagtagctgcagaatcgaatgcaaccttctttaatataagtgctgcaagtttaacttcaaaatacgtgagtgctctgtttccaatattgtcgtattttaagttactgtctaaatgttactgtgttaactgtaaatggtaatatttcatgaaaatatttttctaggagcttatctattgtatctattatttacatatgatgaatatctatcttcagagtagaaagttatgtacatttgtgttgtcaaatactgtattagtttactggggccatgtaataaaataccgtaaactggctggcttaaacatcagcaatttattgtctcacagttgtggaaggtagaagtctaagatcagtcaaaatgttggcagggttgcttcctcctgagggctgtgagggaaaatgtatgttgtgtgcctctctcctggcttctggtggcttgctggcaatcttttgtattccttggcttgtagatgcatc

SEQ ID NO: 316954 - DNA, 549 bp, Homo sapiens
cgagactaatttaatatttgctcttgtgatttttaaaggctaaagcagtagctgcagaatcgaatgcaaccttctttaatataagtgctgcaagtttaacttcaaaatacgtgagtgctctgtttccaatattgtcgtattttaagttactgtctaaatgttactgtgttaactgtaaatggtaatatttcatgaaaatatttttctaggagcttatctattgtatctattatttacatatgatgaatatctatcttcagagtagaaagttatgtacatttgtgttgtcaaatactgtattagtttactggggccatgtaataaaataccgtaaactggctggcttaaacatcagcaatttattgtctcacagttgtggaaggtagaagtctaagatcagtcaaaatgttggcagggttgcttcctcctgagggctgtgagggaaaatgtatgttgtgtgcctctctcctggcttctggtggcttgctggcaatcttttgtattccttggcttgtagatgcatccctcctatctctgtctttatcttta

SEQ ID NO: 316955 - DNA, 1561 bp, Homo sapiens
aagttattggggttttctctcttgaagggtctcattttaattcccttttccaggccgtatagatcaaatatagtactgtcattactgttggctcttgttttggtcttgacttactaatagtgttaccctgattttcagagggggacagtttatctccagaaaggccaatgtttgtatacacatcagctagacacaaatatagacatcatatgtagtttgtacatgtttcagaaacttgttttttctttgctctgtgtaacctatttcctattgctagttcagttggctttcttattcacttctgtgaccctgaaccagttctcagaccctagagtgtaagagcattgattttctacgctgtgtaatctagctcaatccctctgtcccctccgcctcaccgtcccccagccaccacattgtatagcaaaagcattacattcaatcctagaataaaggtaaatacaacaaatcatctttgcagctggacaactaataatactttgcagcattaagagatcttctgtgttaccagtcactctgttgaaatgaactttccgaatctctttattcaggaaaacatggggttttgaaattcttgggccaagagacataactgaggggttcgcagagctaggcaagggtgcactaggaaagggccacattggtgggtggggggtaacagagaacagatggtgtcaggaagtttctctggagtaaataatgtggatattcttggtttccctctcctccgccagctgaagctgtgttagtgctgttgacactaatataaaatgtttggtccatttgaaatccttgtcattgccttatatgggggaaactcaatcccccagcctgtgttggaaatatcaccaaactgattgtaaatgtgcggctgtacagacattttagtgtggtggtgtgcaccatttcggccctacacctgcagcctggctacttacagttgtgttccgattttgcgtctatgcttggtgtgcctcacttgctgcattttccagcatgcaaccaggagttgacgtaggaaaaagggatgctttcttactttggaagctctcagggaagttggtgtcaatttctcctccactgcctggcctaccctgcactcccaaagattttgtgcagatgggtagttccattttttaaaaattgtgcagatatggaaaattgtgacttacttcatgaccagaactatctagaatatgtgtgggggtataaacatcttgcttaaccaaatatctatgtaggcagaggtaaccaggagagaagcaagacttgctgcctaaaggagcccaccattttacttttcacatttaatctgccacgttgaatcaattggaataaaacctgactcgcaggtgactggacaggaaatcccaaagttccaccatttctatgcttaattttaacgtccccccgcttttttttttgtagaaaataaaaacaagaaaatcgttccaatgtaagatgtttgttatagaaactttaggcaatacaggtgtgtaataaaatgtttaataaacttctaaacacttttgtatttgga

SEQ ID NO: 316956 - DNA, 1247 bp, Homo sapiens
  misc_feature (1026)..(1027): n is a, c, g, or t
  misc_feature (1029)..(1029): n is a, c, g, or t
  misc_feature (1033)..(1033): n is a, c, g, or t
  misc_feature (1036)..(1036): n is a, c, g, or t
  misc_feature (1038)..(1038): n is a, c, g, or t
  misc_feature (1043)..(1043): n is a, c, g, or t
  misc_feature (1055)..(1055): n is a, c, g, or t
  misc_feature (1063)..(1063): n is a, c, g, or t
  misc_feature (1067)..(1067): n is a, c, g, or t
  misc_feature (1086)..(1086): n is a, c, g, or t
  misc_feature (1088)..(1088): n is a, c, g, or t
  misc_feature (1093)..(1093): n is a, c, g, or t
  misc_feature (1096)..(1096): n is a, c, g, or t
  misc_feature (1105)..(1105): n is a, c, g, or t
  misc_feature (1107)..(1107): n is a, c, g, or t
aagttattggggttttctctcttgaagggtctcattttaattcccttttccaggccgtatagatcaaatatagtactgtcattactgttggctcttgttttggtcttgacttactaatagtgttaccctgattttcagagggggacagtttatctccagaaaggccaatgtttgtatacacatcagctagacacaaatatagacatcatatgtagtttgtacatgtttcagaaacttgttttttctttgctctgtgtaacctatttcctattgctagttcagttggctttcttattcacttctgtgaccctgaaccagttctcagaccctagagtgtaagagcattgattttctacgctgtgtaatctagctcaatccctctgtcccctccgcctcaccgtcccccagccaccacattgtatagcaaaagcattacattcaatcctagaataaaggtaaatacaacaaatcatctttgcagctggacaactaataatactttgcagcattaagagatcttctgtgttaccagtcactctgttgaaatgaactttccgaatctctttattcaggaaaacatggggttttgaaattcttgggccaagagacataactgaggggttcgcagagctaggcaagggtgcactaggaaagggccacattggtgggtggggggtaacagagaacagatggtgtcaggaagtttctctggagtaaataatgtggatattcttggtttccctctcctccgccagctgaagctgtgttagtgctgttgacactaatataaaatgtttggtccatttgaaatccttgtcattgccttatatgggggaaactcaatcccccagcctgtgttggaaatatcaccaaactgattgtaaatgtgcggctgtacagacattttagtgtggtggtgtgcaccatttcggccctacacctgcagcctggctacttacagttgtgttccgattttgcgtctatgcttggtgtgcctcacttgctgcattttccagcatgcacagnntncgtnganangatcntctacttgaccntagagtgngcantcccatgctgcactgatcnanattgnaangagtcattnantgcgaagaattcgttctgcgaaaactagaaagtggggggcactcacttggcgggaatcctgcgcttttttccgggtacacaggggaaccattttcctttaaacaggtagggactctaaacagtgggccccctcgttgacg

SEQ ID NO: 316957 - DNA, 1387 bp, Homo sapiens
gacaggcggatcatctgaggtcaggagtttgagaccagcctcgccaacatggtgaaaccccatctcgatgcggccacggcttgggcgggactaaggctgggaacgagccaccgattggtcagagctacgcggcgaatggcggagacgctgaggcgggtgctaaccaggggcggtgcggcctggtccggggaggagaacatgcctgccgccggaccgcctttgctgctgctcggtacaccaggatctggaaaaacagcgctgctatttgctgcggccctagaggcggcgggggagggccaaggcccagtcctcttcctgacacgaaggcctcttcaaagcatgccccgcgggaccggaacgactctagacccaatgcgactccagaagatccgcttccagtacccaccctcaacccgagagcttttccggctcctgtgctctgcccatgaggccccggggccagccccctcccttctgctgctcgacggcctagaagagtacctagcggaagacccagagccccaggaagccgcctacctcattgccttacttctagacacagctgcccacttcagccaccggcttgggcctggccgggattgtgggctcatggtggccctccagacccaggaggaagcaggtagtggggacgtcctgcacctggcactgctccagcggtattttcctgcccagtgctggctgcagccagatgcaccaggtccaggagagcacggcctccgagcctgcctggagccaggcgggctgggccccagaacagagtggtgggtgactttccgatcagatggagaaatgatgatcgctccgtggcccacccaggctggtgaccccagctcaggcaagggttcaagctctggaggccagccctgagctttggtgggtgactacctctctgtgcttcagtttcccatggctggaatacttacctcagggacatatgcagatccaaagacctaaacaatgtaaagtgctttttctcttttaaaagtatagcattatcttgtatatattttacccaatcaatatgttgtttatagtttcattgctttaaactttataaaaagagcttcaggccaggcgtggtggctcacgcctgtaatcccagcactttgggaggctgaggcggtcagatcaccagaggtcaggagttggagaccagcctgcccaacatgatgaaaccctgtatcaactaaaagtacaaaaaaaattagctgggtgtggtggcaggtgcctgtagtctcagctactcaggaggcttaggcaggagaattgcttgaacccaggaagcggaggttgcagtgagccgagattgtgccactacactccagcctgggtgacaaagcgagactccatctcaaaaaaaaaaaaa

SEQ ID NO: 316958 - DNA, 1285 bp, Homo sapiens
agcgggtcaaggatggggtcagaccgagaatgctgggggagggttttccgtggaaaaattgcgctagagatttggccaaaaacaaacaagcaaaaatggcttgccctcaactaatactcggcagtgatgagtgctggaaaaacgggcgaatataagaatatttaacagctctgaactggttcatcctggaaccaaggaaagtatgcaaggaggcagggttacttttaaggagtctggcttcctgtgctgaatccggccctttccttctgtttctccttctagaagatccgcttccagtacccaccctcaacccgagagcttttccggctcctgtgctctgcccatgaggccccggggccagccccctcccttctgctgctcgacggcctagaagagtacctagcggaagacccagagccccaggaagccgcctacctcattgccttacttctagacacagctgcccacttcagccaccggcttgggcctggccgggattgtgggctcatggtggccctccagacccaggaggaagcaggtagtggggacgtcctgcacctggcactgctccagcggtattttcctgcccagtgctggctgcagccagatgcaccaggtccaggagagcacggcctccgagcctgcctggagccaggcgggctgggccccagaacagagtggtgggtgactttccgatcagatggagaaatgatgatcgctccgtggcccacccaggctggtgaccccagctcaggcaagggttcaagctctggaggccagccctgagctttggtgggtgactacctctctgtgcttcagtttcccatggctggaatacttacctcagggacatatgcagatccaaagacctaaacaatgtaaagtgctttttctcttttaaaagtatagcattatcttgtatatattttacccaatcaatatgttgtttatagtttcattgctttaaactttataaaaagagcttcaggccaggcgtggtggctcacgcctgtaatcccagcactttgggaggctgaggcggtcagatcaccagaggtcaggagttggagaccagcctgcccaacatgatgaaaccctgtatcaactaaaagtacaaaaaaaattagctgggtgtggtggcaggtgcctgtagtctcagctactcaggaggcttaggcaggagaattgcttgaacccaggaagcggaggttgcagtgagccgagattgtgccactacactccagcctgggtgacaaagcgagactccatctcaaaaaaaaaaaaa

SEQ ID NO: 316959 - DNA, 1293 bp, Homo sapiens
gacaggcggatcatctgaggtcaggagtttgagaccagcctcgccaacatggtgaaaccccatctcgatgcggccacggcttgggcgggactaaggctgggaacgagccaccgattggtcagagctacgcggcgaatggcggagacgctgaggcgggtgctaaccaggggcggtgcggcctggtccggggaggagaacatgcctgccgccggaccgcctttgctgctgctcggtacaccaggatctggaaaaacagcgctgctatttgctgcggccctagaggcggcgggggagggccaaggcccagtcctcttcctgacacgaaggcctcttcaaagcatgccccgcgggaccggaacgactctagacccaatgcgactccagaagatccgcttccagtacccaccctcaacccgagagcttttccggctcctgtgctctgcccatgaggccccggggccagccccctcccttctgctgctcgacggcctagaagagtacctagcggaagacccagagcccccctccagacccaggaggaagcaggtagtggggacgtcctgcacctggcactgctccagcggtattttcctgcccagtgctggctgcagccagatgcaccaggtccaggagagcacggcctccgagcctgcctggagccaggcgggctgggccccagaacagagtggtgggtgactttccgatcagatggagaaatgatgatcgctccgtggcccacccaggctggtgaccccagctcaggcaagggttcaagctctggaggccagccctgagctttggtgggtgactacctctctgtgcttcagtttcccatggctggaatacttacctcagggacatatgcagatccaaagacctaaacaatgtaaagtgctttttctcttttaaaagtatagcattatcttgtatatattttacccaatcaatatgttgtttatagtttcattgctttaaactttataaaaagagcttcaggccaggcgtggtggctcacgcctgtaatcccagcactttgggaggctgaggcggtcagatcaccagaggtcaggagttggagaccagcctgcccaacatgatgaaaccctgtatcaactaaaagtacaaaaaaaattagctgggtgtggtggcaggtgcctgtagtctcagctactcaggaggcttaggcaggagaattgcttgaacccaggaagcggaggttgcagtgagccgagattgtgccactacactccagcctgggtgacaaagcgagactccatctcaaaaaaaaaaaaa

SEQ ID NO: 316960 - DNA, 287 bp, Homo sapiens
gcgagcagcccactagcatgccttatgagcctgatgatcaaacttctgagcgatcagattcctgaaagagcagtctctccatgacaaaagatggatttggaaatgagaaagcaatttctgtaaaacttctgcacctgtggtagactcagaaacacacacaaggctataaatgtctttatgcacttattaattttccaataaacatactcaacagtacacctaatagggaagttctgtgattaatttttcaaacaataagaaaataaatgatcagaaaggcttacagt

SEQ ID NO: 316961 - DNA, 294 bp, Homo sapiens
agacacacagctcctgtcctgggaagctgattctgagggcgggaccctgcccctaccccagggagcccagagtctgaggggagacgccatctcagccctgccctgttccttccttttggactaatggctgagtgacccaactggatttccttggcttgaacctgagcaagccctctctctctaaagacttgaatgcctactcccttcactgagtggtttcttctgttcctggccaactcagtgagaaagcaatcatctgcaagccgggaagagagccctcatcagaactcaacc

SEQ ID NO: 316962 - DNA, 503 bp, Homo sapiens
agacacacagctcctgtcctgggaagctgattctgagggcgggaccctgcccctaccccagggagcccagagtctgaggggagacgccatctcagccctgccctgttccttccttttggactaatggctgagtgacccaactggatttccttggcttgaacctgagcaagccctctctctctaaagacttgaatgcctactcccttcactgagtggtttcttctgttcctggccaactcagtgagcctgatgatcaaacttctgagcgatcagattcctgaaagagcagtctctccatgacaaaagatggatttggaaatgagaaagcaatttctgtaaaacttctgcacctgtggtagactcagaaacacacacaaggctataaatgtctttatgcacttattaattttccaataaacatactcaacagtacacctaatagggaagttctgtgattaatttttcaaacaataagaaaataaatgatcagaaaggcttacagt

SEQ ID NO: 316963 - DNA, 10411 bp, Homo sapiens
taggagccggaggaggagccgccgccgccgttgacccggccgccggccgggagctgggagagatgcggagcccggccaccggcgtccccctcccaacgccgccgccgccgctgctgctgctgttgctgctgctgctgccgccgccactattgggagaccaagtggggccctgtcgttccttggggtccaggggacgaggctcttcgggggcctgcgcccccatgggctggctctgtccatcctcagcgtcgaacctctggctctacaccagccgctgcagggatgcgggcactgagctgactggccacctggtaccccaccacgatggcctgagggtttggtgtccagaatccgaggcccatattcccctaccaccagctcctgaaggctgcccctggagctgtcgcctcctgggcattggaggccacctttccccacagggcaagctcacactgcccgaggagcacccgtgcttaaaggctccacggctcagatgccagtcctgcaagctggcacaggcccccgggctcagggcaggggaaaggtcaccagaagagtccctgggtgggcgtcggaaaaggaatgtaaatacagccccccagttccagccccccagctaccaggccacagtgccggagaaccagccagcaggcacccctgttgcatccctgagggccatcgacccggacgagggtgaggcaggtcgactggagtacaccatggatgccctctttgatagccgctccaaccagttcttctccctggacccagtcactggtgcagtaaccacagccgaggagctggatcgtgagaccaagagcacccacgtcttcagggtcacggcgcaggaccacggcatgccccgacgaagtgccctggctacactcaccatcttggttactgacaccaatgaccatgaccctgtgttcgagcagcaggagtacaaggagagcctcagggagaacctggaggttggctatgaggtgctcactgtcagggccacggatggtgatgcccctcccaatgccaatattctgtaccgcctgctggaggggtctgggggcagcccctctgaagtctttgagatcgaccctcgctctggggtgatccgaacccgtggccctgtggatcgggaagaggtggaatcctaccagctgacggtagaggcaagtgaccagggtcgggacccgggtcctcggagtaccacagccgctgttttcctttctgtggaggatgacaatgataatgccccccagtttagtgagaagcgctatgtggtccaggtgagggaggatgtgactccaggggccccagtactccgagtcacagcctcggatcgagacaaggggagcaatgccgtggtgcactatagcatcatgagtggcaatgctcggggacagttttatctggatgcccagactggagctctggatgtggtgagccctcttgactatgagacgaccaaggagtacaccctacgggtgcgagcacaggatggtggccgtcccccactctctaatgtctctggcttggtgacagtacaggtcctggatatcaacgacaatgcccccatcttcgtcagcacccctttccaggctactgtcctggagagcgtccccttaggctacctggttctccatgtccaggctatcgacgctgatgctggtgacaatgcccgcctggaataccgccttgctggggtgggacatgacttccccttcaccatcaacaatggcacaggctggatctctgtggctgctgaactggaccgggaggaagttgatttctacagctttggggtagaagctcgagaccatggcactccagcactcactgcctcggccagtgtcagcgtgactgtcctggatgtcaacgacaacaatccaacctttacccaaccagagtacacagtgcggctcaatgaggatgcagctgtgggcaccagcgtggtgacggtgtcagctgtggaccgtgatgctcatagtgtcatcacctaccagatcaccagtggcaatactcgaaaccgcttctccatcaccagccaaagtggtggtgggctggtatcccttgccctgccactggactacaaacttgagcggcagtatgtgttggctgttaccgcctccgatggcactcggcaggacacggcacagattgtggtgaatgtcaccgacgccaacacccatcgtcctgtctttcagagctcccactatacagtgaatgttaatgaggaccggccggcaggcaccacggtggtgctgatcagcgccacggatgaggacacaggtgagaatgcccgcatcacctacttcatggaggacagcatcccccagttccgcatcgatgcagacacgggggctgtcaccacccaggctgagctggactacgaagaccaagtgtcttacaccctggccattactgctcgggacaatggcattccccagaagtccgacaccacctacctggagatcctggtgaacgacgtgaatgacaatgcccctcagttcctgcgagactcctaccagggcagtgtctatgaggatgtgccacccttcactagcgtcctgcagatctcagccactgatcgtgattctggacttaatggcagggtcttctacaccttccaaggaggcgacgatggagacggtgactttattgttgagtccacgtcaggcatcgtgcgaacgctacggaggctggatcgagagaacgtggcccagtatgtcttgcgggcatatgcagtggacaaggggatgcccccagcccgcacacctatggaagtgacagtcactgtgttggatgtgaatgacaatccccctgtctttgagcaggatgagtttgatgtgtttgtggaagagaacagccccattgggctagccgtggcccgggtcacagccactgaccccgatgaaggcaccaatgcccagattatgtaccagattgtggagggcaacatccctgaggtcttccagctggacatcttctccggggagctgacagccctggtagacttagactacgaggaccggcctgagtacgtcctggtcatccaggccacgtcagctcctctggtgagccgggctacagtccacgtccgcctccttgaccgcaatgacaacccaccagtgctgggcaactttgagatccttttcaacaactatgtcaccaatcgctcaagcagcttccctgggggtgccattggccgagtacctgcccatgaccctgatatctcagatagtctgacttacagctttgagcggggaaatgaactcagcctggtcctgctcaatgcctccacgggtgagctgaagctaagccgcgcactggacaacaaccggcctctggaggccatcatgagcgtgctggtgtcagacggcgtacacagcgtgaccgcccagtgcgcgctgcgtgtgaccatcatcaccgatgagatgctcacccacagcatcacgctgcgcctggaggacatgtcacccgagcgcttcctgtcaccactgctaggcctcttcatccaggcggtggccgccacgctggccacgccaccggaccacgtggtggtcttcaacgtacagcgggacaccgacgcccccgggggccacatcctcaacgtgagcctgtcggtgggccagccgccagggcccgggggcgggccgcccttcctgccctctgaggacctgcaggagcgcctatacctcaaccgcagcctgctgacggccatctcggcacagcgcgtgctgcccttcgacgacaacatctgcctgcgggagccctgcgagaactacatgcgctgcgtgtcggtgctgcgcttcgactcctccgcgcccttcatcgcctcctcctccgtgctcttccggcccatccaccccgtcggagggctgcgctgccgctgcccgcccggcttcacgggtgactactgcgagaccgaggtggacctctgctactcgcggccctgtggcccccacgggcgctgccgcagccgcgagggcggctacacctgcctctgtcgtgatggctacacgggtgagcactgtgaggtgagtgctcgctcaggccgttgcaccccgggtgtctgcaagaatgggggcacctgtgtcaacctgctggtgggcggtttcaagtgcgattgcccatctggagacttcgagaagccctactgccaggtgaccacgcgcagcttccccgcccactccttcatcacctttcgcggcctgcgccagcgtttccacttcaccctggccctctcgtttgccacaaaggagcgcgacgggttgctgttgtacaatgggcgtttcaatgagaagcatgactttgtggccctcgaggtgatccaggagcaggtccagctcaccttctctgcaggggagtcaaccaccacggtgtccccattcgtgcccggaggagtcagtgatggccagtggcatacggtgcagctgaaatactacaataagccactgttgggtcagacagggctcccacagggcccatcagagcagaaggtggctgtggtgaccgtggatggctgtgacacaggagtggccttgcgcttcggatctgtcctgggcaactactcctgtgctgcccagggcacccagggtggcagcaagaagtctctggatctgacggggcccctgctactaggcggggtgcctgacctgcccgagagcttcccagtccgaatgcggcagttcgtgggctgcatgcggaacctgcaggtggacagccggcacatagacatggctgacttcattgccaacaatggcaccgtgcctggctgccctgccaagaagaacgtgtgtgacagcaacacttgccacaatgggggcacttgcgtgaaccagtgggacgcgttcagctgcgagtgccccctgggctttgggggcaagagctgcgcccaggaaatggccaatccacagcacttcctgggcagcagcctggtggcctggcatggcctctcgctgcccatctcccaaccctggtacctcagcctcatgttccgcacgcgccaggccgacggtgtcctgctgcaggccatcaccagggggcgcagcaccatcaccctacagctacgagagggccacgtgatgctgagcgtggagggcacagggcttcaggcctcctctctccgtctggagccaggccgggccaatgacggtgactggcaccatgcacagctggcactgggagccagcggggggcctggccatgccattctgtccttcgattatgggcagcagagagcagagggcaacctgggcccccggctgcatggtctgcacctgagcaacataacagtgggcggaatacctgggccagccggcggtgtggcccgtggctttcggggctgtttgcagggtgtgcgggtgagcgatacgccagagggggttaacagcctggatcccagccatggggagagcatcaacgtggagcaaggctgtagcctgcctgacccttgtgactcaaacccgtgtcctgctaacagctattgcagcaacgactgggacagctattcctgcagctgtgatccaggttactatggtgacaactgtactaatgtgtgtgacctgaacccgtgtgagcaccagtctgtgtgtacccgcaagcccagtgccccccatggctatacctgcgagtgtcccccaaattaccttgggccatactgtgagaccaggattgaccagccttgtccccgtggctggtggggacatcccacatgtggcccatgcaactgtgatgtcagcaaaggctttgacccagactgcaacaagacaagcggcgagtgccactgcaaggagaaccactaccggcccccaggcagccccacctgcctcttgtgtgactgctaccccacaggctccttgtccagagtctgtgaccctgaggatggccagtgtccatgcaagccaggtgtcatcgggcgtcagtgtgaccgctgtgacaacccttttgctgaggtcaccaccaatggctgtgaagtgaattatgacagctgcccacgagcgattgaggctgggatctggtggccccgtacccgcttcgggctgcctgctgctgctccctgtcccaaaggctcctttgggactgctgtgcgccactgtgatgagcacagggggtggctccccccaaacctcttcaactgcacgtccatcaccttctcagaactgaagggcttcgctgagcggctacagcggaatgagtcaggcctagactcagggcgctcccagcagctagccctgctcctgcgcaacgccacgcagcacacagctggctacttcggcagcgacgtcaaggtggcctaccagctggccacgcggctgctggcccacgagagcacccagcggggctttgggctgtctgccacacaggacgtgcacttcactgagaatctgctgcgggtgggcagcgccctcctggacacagccaacaagcggcactgggagctgatccagcagacagagggtggcaccgcctggctgctccagcactatgaggcctacgccagtgccctggcccagaacatgcggcacacctacctaagccccttcaccatcgtcacgcccaacattgtcatctccgtagtgcgcttggacaaagggaactttgctggggccaagctgccccgctacgaggccctgcgtggggagcagcccccggaccttgagacaacagtcattctgcctgagtctgtcttcagagagacgccccccgtggtcaggcccgcaggccccggagaggcccaggagccagaggagctggcacggcgacagcgacggcacccggagctgagccagggtgaggctgtggccagcgtcatcatctaccgcaccctggccgggctactgcctcataactatgaccctgacaagcgcagcttgagagtccccaaacgcccgatcatcaacacacccgtggtgagcatcagcgtccatgatgatgaggagcttctgccccgggccctggacaaacccgtcacggtgcagttccgcctgctggagacagaggagcggaccaagcccatctgtgtcttctggaaccattcaatcctggtcagtggcacaggtggctggtcggccagaggctgtgaagtcgtcttccgcaatgagagccacgtcagctgccagtgcaaccacatgacgagcttcgctgtgctcatggacgtttctcggcgggagaatggggagatcctgccactgaagacactgacatacgtggctctaggtgtcaccttggctgcccttctgctcaccttcttcttcctcactctcttgcgtatcctgcgctccaaccaacacggcatccgacgtaacctgacagctgccctgggcctggctcagctggtcttcctcctgggaatcaaccaggctgacctcccttttgcctgcacagtcattgccatcctgctgcacttcctgtacctctgcaccttttcctgggctctgctggaggccttgcacctgtaccgggcactcactgaggtgcgcgatgtcaacaccggccccatgcgcttctactacatgctgggctggggcgtgcctgccttcatcacagggctagccgtgggcctggaccccgagggctacgggaaccctgacttctgctggctctccatctatgacacgctcatctggagttttgctggcccggtggcctttgccgtctcgatgagtgtcttcctgtacatcctggcggcccgggcctcctgtgctgcccagcggcagggctttgagaagaaaggtcctgtctcgggcctgcagccctccttcgccgtcctcctgctgctgagcgccacgtggctgctggcactgctctctgtcaacagcgacaccctcctcttccactacctctttgctacctgcaattgcatccagggccccttcatcttcctctcctatgtggtgcttagcaaggaggtccggaaagcactcaagcttgcctgcagccgcaagcccagccctgaccctgctctgaccaccaagtccaccctgacctcgtcctacaactgccccagcccctacgcagatgggcggctgtaccagccctacggagactcggccggctctctgcacagcaccagtcgctcgggcaagagtcagcccagctacatccccttcttgctgagggaggagtccgcactgaaccctggccaagggccccctggcctgggggatccaggcagcctgttcctggaaggtcaagaccagcagcatgatcctgacacggactccgacagtgacctgtccttagaagacgaccagagtggctcctatgcctctacccactcatcagacagtgaggaggaagaagaggaggaggaagaggaggccgccttccctggagagcagggctgggatagcctgctggggcctggagcagagagactgcccctgcacagtactcccaaggatgggggcccagggcctggcaaggccccctggccaggagactttgggaccacagcaaaagagagtagtggcaacggggcccctgaggagcggctgcgggagaatggagatgccctgtctcgagaggggtccctaggcccccttccaggctcttctgcccagcctcacaaaggcatccttaagaagaagtgtctgcccaccatcagcgagaagagcagcctcctgcggctccccctggagcaatgcacagggtcttcccggggctcctccgctagtgagggcagccggggcggcccccctccccgcccaccgccccggcagagcctccaggagcagctgaacggggtcatgcccatcgccatgagcatcaaggcaggcacggtggatgaggactcgtcaggctccgacagcgacgaaacgtccatctgaggagcctgggccttgccgggaggggtactcaccccacctaaggccatctagtgccaactccccccccaccattcccctcactgcactttggacccctggggccaacatctccaagacaaagtttttcagaaaagaggaaaaaaagaatttaaaaaaggatctccactcttcatgacttcagggattcattttttttatacgctggaaattgactcccctttcccttcccaaagaggataggacctcccaggatgcttcccagcctctcctcagtttcccatctgctgtgcctctgggaggagagggactcctggggggcctgcccctcatacgccatcaccaaaaggaaaggacaaagccacacgcagccagggcttcacacccttcaggctgcacccgggcaggcctcagaacggtgaggggccagggcaaagggtgtgtctcgtcctgcccgcactgcctctcccaggaactggaaaagccctgtccggtgagggggcagaaggactcagcgcccctggacccccaaatgctgcatgaacacattttcaggggagcctgtgcccccaggcgggggtcgggcagccccagcccctctccttttcctggactctggccgtgcgcggcagcccaggtgtttgctcagttgctgacccaaaagtgcttcatttttcgtgcccgccccgcgccccgggcaggccagtcatgtgttaagttgcgcttctttgctgtgatgtgggtgggggaggaagagtaaacacagtgctggctcggctgccctgagggtgctcaatcaagcacaggtttcaagtctgggttctggtgtccactcacccaccccaccccccaaaatcagacaaatgctactttgtctaacctgctgtggcctctgagacatgttctatttttaaccccttcttggaattggctctcttcttcaaaggaccaggtcctgttcctctttctccccgactccaccccagctccctgtgaagagagagttaatatatttgttttatttatttgctttttgcgttgggatgggttcgtgtccagtcccgggggtctgatatggccatcacaggctgggtgttcccagcagccctggcttgggggcttgacgcccttccccttgccccaggccatcatctccccacctctcctcccctctcctcagttttgccgactgcttttcatctgagtcaccatttactccaagcatgtattccagacttgtcactgactttccttctggagcaggtggctagaaaaagaggctgtgggcaggaaagaaaggctcctgtttctcatttgtgaggccagcctctggcttttctgccgtggattctccccctgtcttctcccctcagcaattcctgcaaagggttaaaaatttaactggtttttactactgatgacttgatttaaaaaaaatacaaagatgctggatgctaacttgatactaaccatcagattgtacagtttggttgttgctgtaaatatggtagcgttttgttgttgttgttttttcatgccccatactactgaataaactagttctgtgcgggtacagcaatgtcact

SEQ ID NO: 316964 - DNA, 5003 bp, Homo sapiens
  misc_feature (4)..(5): n is a, c, g, or t
tgcnntgctgcctgcggtcgcttagaggatccccgcattcctgcctttgccatttgggaagccgaggcaggactgcttaagcccaggagttcaagaccaacttgggcaacatggcgaaaccctgtctctacaaaaaatacaaaaagtagacagatgtggtggtatgtgcctatggtcccagctactcaggaggctgaggtgggaggactgcttgagcccaggggattgaggctgcagagagctgtgatcatgccactgcattccaaatcggcaaagtgcaggaattggcgccaattcctgcactttgccgatttggactgtgatgtcagcaaaggctttgacccagactgcaacaagacaagcggcgagtgccactgcaaggagaaccactaccggcccccaggcagccccacctgcctcttgtgtgactgctaccccacaggctccttgtccagagtctgtgaccctgaggatggccagtgtccatgcaagccaggtgtcatcgggcgtcagtgtgaccgctgtgacaacccttttgctgaggtcaccaccaatggctgtgaagtgaattatgacagctgcccacgagcgattgaggctgggatctggtggccccgtacccgcttcgggctgcctgctgctgctccctgtcccaaaggctcctttgggactgctgtgcgccactgtgatgagcacagggggtggctccccccaaacctcttcaactgcacgtccatcaccttctcagaactgaagggcttcgctgagcggctacagcggaatgagtcaggcctagactcagggcgctcccagcagctagccctgctcctgcgcaacgccacgcagcacacagctggctacttcggcagcgacgtcaaggtggcctaccagctggccacgcggctgctggcccacgagagcacccagcggggctttgggctgtctgccacacaggacgtgcacttcactgagaatctgctgcgggtgggcagcgccctcctggacacagccaacaagcggcactgggagctgatccagcagacagagggtggcaccgcctggctgctccagcactatgaggcctacgccagtgccctggcccagaacatgcggcacacctacctaagccccttcaccatcgtcacgcccaacattgtcatctccgtagtgcgcttggacaaagggaactttgctggggccaagctgccccgctacgaggccctgcgtggggagcagcccccggaccttgagacaacagtcattctgcctgagtctgtcttcagagagacgccccccgtggtcaggcccgcaggccccggagaggcccaggagccagaggagctggcacggcgacagcgacggcacccggagctgagccagggtgaggctgtggccagcgtcatcatctaccgcaccctggccgggctactgcctcataactatgaccctgacaagcgcagcttgagagtccccaaacgcccgatcatcaacacacccgtggtgagcatcagcgtccatgatgatgaggagcttctgccccgggccctggacaaacccgtcacggtgcagttccgcctgctggagacagaggagcggaccaagcccatctgtgtcttctggaaccattcaatcctggtcagtggcacaggtggctggtcggccagaggctgtgaagtcgtcttccgcaatgagagccacgtcagctgccagtgcaaccacatgacgagcttcgctgtgctcatggacgtttctcggcgggagaatggggagatcctgccactgaagacactgacatacgtggctctaggtgtcaccttggctgcccttctgctcaccttcttcttcctcactctcttgcgtatcctgcgctccaaccaacacggcatccgacgtaacctgacagctgccctgggcctggctcagctggtcttcctcctgggaatcaaccaggctgacctcccttttgcctgcacagtcattgccatcctgctgcacttcctgtacctctgcaccttttcctgggctctgctggaggccttgcacctgtaccgggcactcactgaggtgcgcgatgtcaacaccggccccatgcgcttctactacatgctgggctggggcgtgcctgccttcatcacagggctagccgtgggcctggaccccgagggctacgggaaccctgacttctgctggctctccatctatgacacgctcatctggagttttgctggcccggtggcctttgccgtctcgatgagtgtcttcctgtacatcctggcggcccgggcctcctgtgctgcccagcggcagggctttgagaagaaaggtcctgtctcgggcctgcagccctccttcgccgtcctcctgctgctgagcgccacgtggctgctggcactgctctctgtcaacagcgacaccctcctcttccactacctctttgctacctgcaattgcatccagggccccttcatcttcctctcctatgtggtgcttagcaaggaggtccggaaagcactcaagcttgcctgcagccgcaagcccagccctgaccctgctctgaccaccaagtccaccctgacctcgtcctacaactgccccagcccctacgcagatgggcggctgtaccagccctacggagactcggccggctctctgcacagcaccagtcgctcgggcaagagtcagcccagctacatccccttcttgctgagggaggagtccgcactgaaccctggccaagggccccctggcctgggggatccaggcagcctgttcctggaaggtcaagaccagcagcatgatcctgacacggactccgacagtgacctgtccttagaagacgaccagagtggctcctatgcctctacccactcatcagacagtgaggaggaagaagaggaggaggaagaggaggccgccttccctggagagcagggctgggatagcctgctggggcctggagcagagagactgcccctgcacagtactcccaaggatgggggcccagggcctggcaaggccccctggccaggagactttgggaccacagcaaaagagagtagtggcaacggggcccctgaggagcggctgcgggagaatggagatgccctgtctcgagaggggtccctaggcccccttccaggctcttctgcccagcctcacaaaggcatccttaagaagaagtgtctgcccaccatcagcgagaagagcagcctcctgcggctccccctggagcaatgcacagggtcttcccggggctcctccgctagtgagggcagccggggcggcccccctccccgcccaccgccccggcagagcctccaggagcagctgaacggggtcatgcccatcgccatgagcatcaaggcaggcacggtggatgaggactcgtcaggctccgacagcgacgaaacgtccatctgaggagcctgggccttgccgggaggggtactcaccccacctaaggccatctagtgccaactccccccccaccattcccctcactgcactttggacccctggggccaacatctccaagacaaagtttttcagaaaagaggaaaaaaagaatttaaaaaaggatctccactcttcatgacttcagggattcattttttttatacgctggaaattgactcccctttcccttcccaaagaggataggacctcccaggatgcttcccagcctctcctcagtttcccatctgctgtgcctctgggaggagagggactcctggggggcctgcccctcatacgccatcaccaaaaggaaaggacaaagccacacgcagccagggcttcacacccttcaggctgcacccgggcaggcctcagaacggtgaggggccagggcaaagggtgtgtctcgtcctgcccgcactgcctctcccaggaactggaaaagccctgtccggtgagggggcagaaggactcagcgcccctggacccccaaatgctgcatgaacacattttcaggggagcctgtgcccccaggcgggggtcgggcagccccagcccctctccttttcctggactctggccgtgcgcggcagcccaggtgtttgctcagttgctgacccaaaagtgcttcatttttcgtgcccgccccgcgccccgggcaggccagtcatgtgttaagttgcgcttctttgctgtgatgtgggtgggggaggaagagtaaacacagtgctggctcggctgccctgagggtgctcaatcaagcacaggtttcaagtctgggttctggtgtccactcacccaccccaccccccaaaatcagacaaatgctactttgtctaacctgctgtggcctctgagacatgttctatttttaaccccttcttggaattggctctcttcttcaaaggaccaggtcctgttcctctttctccccgactccaccccagctccctgtgaagagagagttaatatatttgttttatttatttgctttttgcgttgggatgggttcgtgtccagtcccgggggtctgatatggccatcacaggctgggtgttcccagcagccctggcttgggggcttgacgcccttccccttgccccaggccatcatctccccacctctcctcccctctcctcagttttgccgactgcttttcatctgagtcaccatttactccaagcatgtattccagacttgtcactgactttccttctggagcaggtggctagaaaaagaggctgtgggcaggaaagaaaggctcctgtttctcatttgtgaggccagcctctggcttttctgccgtggattctccccctgtcttctcccctcagcaattcctgcaaagggttaaaaatttaactggtttttactactgatgacttgatttaaaaaaaatacaaagatgctggatgctaacttgatactaaccatcagattgtacagtttggttgttgctgtaaatatggtagcgttttgttgttgttgttttttcatgccccatactactgaataaactagttctgtgcgggtacagcaatgtcact

SEQ ID NO: 316965 - DNA, 4989 bp, Homo sapiens
  misc_feature (9)..(9): n is a, c, g, or t
  misc_feature (19)..(19): n is a, c, g, or t
  misc_feature (30)..(30): n is a, c, g, or t
gctttttgntgccccgctntcgactctagncgatccccgccaattcctgcactttgccgatttgggaatgtgagtgtcctactgtggtaaatggaatttctgaaatgggtccccaaacatgccacacccctgtctctaaagcctcttaaggtgatgagacaccattcctgtgactatgttgttatatgccagttatatgactttaagatggtgaggttaccgcatgaactggatctaatcacatcactccaaatcggcaaagtgcaggaattggcgccaattcctgcactttgccgatttggactgtgatgtcagcaaaggctttgacccagactgcaacaagacaagcggcgagtgccactgcaaggagaaccactaccggcccccaggcagccccacctgcctcttgtgtgactgctaccccacaggctccttgtccagagtctgtgaccctgaggatggccagtgtccatgcaagccaggtgtcatcgggcgtcagtgtgaccgctgtgacaacccttttgctgaggtcaccaccaatggctgtgaagtgaattatgacagctgcccacgagcgattgaggctgggatctggtggccccgtacccgcttcgggctgcctgctgctgctccctgtcccaaaggctcctttgggactgctgtgcgccactgtgatgagcacagggggtggctccccccaaacctcttcaactgcacgtccatcaccttctcagaactgaagggcttcgctgagcggctacagcggaatgagtcaggcctagactcagggcgctcccagcagctagccctgctcctgcgcaacgccacgcagcacacagctggctacttcggcagcgacgtcaaggtggcctaccagctggccacgcggctgctggcccacgagagcacccagcggggctttgggctgtctgccacacaggacgtgcacttcactgagaatctgctgcgggtgggcagcgccctcctggacacagccaacaagcggcactgggagctgatccagcagacagagggtggcaccgcctggctgctccagcactatgaggcctacgccagtgccctggcccagaacatgcggcacacctacctaagccccttcaccatcgtcacgcccaacattgtcatctccgtagtgcgcttggacaaagggaactttgctggggccaagctgccccgctacgaggccctgcgtggggagcagcccccggaccttgagacaacagtcattctgcctgagtctgtcttcagagagacgccccccgtggtcaggcccgcaggccccggagaggcccaggagccagaggagctggcacggcgacagcgacggcacccggagctgagccagggtgaggctgtggccagcgtcatcatctaccgcaccctggccgggctactgcctcataactatgaccctgacaagcgcagcttgagagtccccaaacgcccgatcatcaacacacccgtggtgagcatcagcgtccatgatgatgaggagcttctgccccgggccctggacaaacccgtcacggtgcagttccgcctgctggagacagaggagcggaccaagcccatctgtgtcttctggaaccattcaatcctggtcagtggcacaggtggctggtcggccagaggctgtgaagtcgtcttccgcaatgagagccacgtcagctgccagtgcaaccacatgacgagcttcgctgtgctcatggacgtttctcggcgggagaatggggagatcctgccactgaagacactgacatacgtggctctaggtgtcaccttggctgcccttctgctcaccttcttcttcctcactctcttgcgtatcctgcgctccaaccaacacggcatccgacgtaacctgacagctgccctgggcctggctcagctggtcttcctcctgggaatcaaccaggctgacctcccttttgcctgcacagtcattgccatcctgctgcacttcctgtacctctgcaccttttcctgggctctgctggaggccttgcacctgtaccgggcactcactgaggtgcgcgatgtcaacaccggccccatgcgcttctactacatgctgggctggggcgtgcctgccttcatcacagggctagccgtgggcctggaccccgagggctacgggaaccctgacttctgctggctctccatctatgacacgctcatctggagttttgctggcccggtggcctttgccgtctcgatgagtgtcttcctgtacatcctggcggcccgggcctcctgtgctgcccagcggcagggctttgagaagaaaggtcctgtctcgggcctgcagccctccttcgccgtcctcctgctgctgagcgccacgtggctgctggcactgctctctgtcaacagcgacaccctcctcttccactacctctttgctacctgcaattgcatccagggccccttcatcttcctctcctatgtggtgcttagcaaggaggtccggaaagcactcaagcttgcctgcagccgcaagcccagccctgaccctgctctgaccaccaagtccaccctgacctcgtcctacaactgccccagcccctacgcagatgggcggctgtaccagccctacggagactcggccggctctctgcacagcaccagtcgctcgggcaagagtcagcccagctacatccccttcttgctgagggaggagtccgcactgaaccctggccaagggccccctggcctgggggatccaggcagcctgttcctggaaggtcaagaccagcagcatgatcctgacacggactccgacagtgacctgtccttagaagacgaccagagtggctcctatgcctctacccactcatcagacagtgaggaggaagaagaggaggaggaagaggaggccgccttccctggagagcagggctgggatagcctgctggggcctggagcagagagactgcccctgcacagtactcccaaggatgggggcccagggcctggcaaggccccctggccaggagactttgggaccacagcaaaagagagtagtggcaacggggcccctgaggagcggctgcgggagaatggagatgccctgtctcgagaggggtccctaggcccccttccaggctcttctgcccagcctcacaaaggcatccttaagaagaagtgtctgcccaccatcagcgagaagagcagcctcctgcggctccccctggagcaatgcacagggtcttcccggggctcctccgctagtgagggcagccggggcggcccccctccccgcccaccgccccggcagagcctccaggagcagctgaacggggtcatgcccatcgccatgagcatcaaggcaggcacggtggatgaggactcgtcaggctccgacagcgacgaaacgtccatctgaggagcctgggccttgccgggaggggtactcaccccacctaaggccatctagtgccaactccccccccaccattcccctcactgcactttggacccctggggccaacatctccaagacaaagtttttcagaaaagaggaaaaaaagaatttaaaaaaggatctccactcttcatgacttcagggattcattttttttatacgctggaaattgactcccctttcccttcccaaagaggataggacctcccaggatgcttcccagcctctcctcagtttcccatctgctgtgcctctgggaggagagggactcctggggggcctgcccctcatacgccatcaccaaaaggaaaggacaaagccacacgcagccagggcttcacacccttcaggctgcacccgggcaggcctcagaacggtgaggggccagggcaaagggtgtgtctcgtcctgcccgcactgcctctcccaggaactggaaaagccctgtccggtgagggggcagaaggactcagcgcccctggacccccaaatgctgcatgaacacattttcaggggagcctgtgcccccaggcgggggtcgggcagccccagcccctctccttttcctggactctggccgtgcgcggcagcccaggtgtttgctcagttgctgacccaaaagtgcttcatttttcgtgcccgccccgcgccccgggcaggccagtcatgtgttaagttgcgcttctttgctgtgatgtgggtgggggaggaagagtaaacacagtgctggctcggctgccctgagggtgctcaatcaagcacaggtttcaagtctgggttctggtgtccactcacccaccccaccccccaaaatcagacaaatgctactttgtctaacctgctgtggcctctgagacatgttctatttttaaccccttcttggaattggctctcttcttcaaaggaccaggtcctgttcctctttctccccgactccaccccagctccctgtgaagagagagttaatatatttgttttatttatttgctttttgcgttgggatgggttcgtgtccagtcccgggggtctgatatggccatcacaggctgggtgttcccagcagccctggcttgggggcttgacgcccttccccttgccccaggccatcatctccccacctctcctcccctctcctcagttttgccgactgcttttcatctgagtcaccatttactccaagcatgtattccagacttgtcactgactttccttctggagcaggtggctagaaaaagaggctgtgggcaggaaagaaaggctcctgtttctcatttgtgaggccagcctctggcttttctgccgtggattctccccctgtcttctcccctcagcaattcctgcaaagggttaaaaatttaactggtttttactactgatgacttgatttaaaaaaaatacaaagatgctggatgctaacttgatactaaccatcagattgtacagtttggttgttgctgtaaatatggtagcgttttgttgttgttgttttttcatgccccatactactgaataaactagttctgtgcgggtacagcaatgtcact

SEQ ID NO: 316966 - DNA, 1777 bp, Homo sapiens
cttttctgccactttcctttcctgcctctccagatttctcttctttaacttcctgcattaaccctgggccgtggttcctacgcccgaggctcccttcccttccccagccgcactcatgccctgctcctgtcttgtgctttatcctgccccgctccccatcgcctgcccgcagcagcgacgaaacgtccatctgaggagcctgggccttgccgggaggggtactcaccccacctaaggccatctagtgccaactccccccccaccattcccctcactgcactttggacccctggggccaacatctccaagacaaagtttttcagaaaagaggaaaaaaagaatttaaaaaaggatctccactcttcatgacttcagggattcattttttttatacgctggaaattgactcccctttcccttcccaaagaggataggacctcccaggatgcttcccagcctctcctcagtttcccatctgctgtgcctctgggaggagagggactcctggggggcctgcccctcatacgccatcaccaaaaggaaaggacaaagccacacgcagccagggcttcacacccttcaggctgcacccgggcaggcctcagaacggtgaggggccagggcaaagggtgtgtctcgtcctgcccgcactgcctctcccaggaactggaaaagccctgtccggtgagggggcagaaggactcagcgcccctggacccccaaatgctgcatgaacacattttcaggggagcctgtgcccccaggcgggggtcgggcagccccagcccctctccttttcctggactctggccgtgcgcggcagcccaggtgtttgctcagttgctgacccaaaagtgcttcatttttcgtgcccgccccgcgccccgggcaggccagtcatgtgttaagttgcgcttctttgctgtgatgtgggtgggggaggaagagtaaacacagtgctggctcggctgccctgagggtgctcaatcaagcacaggtttcaagtctgggttctggtgtccactcacccaccccaccccccaaaatcagacaaatgctactttgtctaacctgctgtggcctctgagacatgttctatttttaaccccttcttggaattggctctcttcttcaaaggaccaggtcctgttcctctttctccccgactccaccccagctccctgtgaagagagagttaatatatttgttttatttatttgctttttgcgttgggatgggttcgtgtccagtcccgggggtctgatatggccatcacaggctgggtgttcccagcagccctggcttgggggcttgacgcccttccccttgccccaggccatcatctccccacctctcctcccctctcctcagttttgccgactgcttttcatctgagtcaccatttactccaagcatgtattccagacttgtcactgactttccttctggagcaggtggctagaaaaagaggctgtgggcaggaaagaaaggctcctgtttctcatttgtgaggccagcctctggcttttctgccgtggattctccccctgtcttctcccctcagcaattcctgcaaagggttaaaaatttaactggtttttactactgatgacttgatttaaaaaaaatacaaagatgctggatgctaacttgatactaaccatcagattgtacagtttggttgttgctgtaaatatggtagcgttttgttgttgttgttttttcatgccccatactactgaataaactagttctgtgcgggtacagcaatgtcact

SEQ ID NO: 316967 - DNA, 7613 bp, Homo sapiens
taggagccggaggaggagccgccgccgccgttgacccggccgccggccgggagctgggagagatgcggagcccggccaccggcgtccccctcccaacgccgccgccgccgctgctgctgctgttgctgctgctgctgccgccgccactattgggagaccaagtggggccctgtcgttccttggggtccaggggacgaggctcttcgggggcctgcgcccccatgggctggctctgtccatcctcagcgtcgaacctctggctctacaccagccgctgcagggatgcgggcactgagctgactggccacctggtaccccaccacgatggcctgagggtttggtgtccagaatccgaggcccatattcccctaccaccagctcctgaaggctgcccctggagctgtcgcctcctgggcattggaggccacctttccccacagggcaagctcacactgcccgaggagcacccgtgcttaaaggctccacggctcagatgccagtcctgcaagctggcacaggcccccgggctcagggcaggggaaaggtcaccagaagagtccctgggtgggcgtcggaaaaggaatgtaaatacagccccccagttccagccccccagctaccaggccacagtgccggagaaccagccagcaggcacccctgttgcatccctgagggccatcgacccggacgagggtgaggcaggtcgactggagtacaccatggatgccctctttgatagccgctccaaccagttcttctccctggacccagtcactggtgcagtaaccacagccgaggagctggatcgtgagaccaagagcacccacgtcttcagggtcacggcgcaggaccacggcatgccccgacgaagtgccctggctacactcaccatcttggttactgacaccaatgaccatgaccctgtgttcgagcagcaggagtacaaggagagcctcagggagaacctggaggttggctatgaggtgctcactgtcagggccacggatggtgatgcccctcccaatgccaatattctgtaccgcctgctggaggggtctgggggcagcccctctgaagtctttgagatcgaccctcgctctggggtgatccgaacccgtggccctgtggatcgggaagaggtggaatcctaccagctgacggtagaggcaagtgaccagggtcgggacccgggtcctcggagtaccacagccgctgttttcctttctgtggaggatgacaatgataatgccccccagtttagtgagaagcgctatgtggtccaggtgagggaggatgtgactccaggggccccagtactccgagtcacagcctcggatcgagacaaggggagcaatgccgtggtgcactatagcatcatgagtggcaatgctcggggacagttttatctggatgcccagactggagctctggatgtggtgagccctcttgactatgagacgaccaaggagtacaccctacgggtgcgagcacaggatggtggccgtcccccactctctaatgtctctggcttggtgacagtacaggtcctggatatcaacgacaatgcccccatcttcgtcagcacccctttccaggctactgtcctggagagcgtccccttaggctacctggttctccatgtccaggctatcgacgctgatgctggtgacaatgcccgcctggaataccgccttgctggggtgggacatgacttccccttcaccatcaacaatggcacaggctggatctctgtggctgctgaactggaccgggaggaagttgatttctacagctttggggtagaagctcgagaccatggcactccagcactcactgcctcggccagtgtcagcgtgactgtcctggatgtcaacgacaacaatccaacctttacccaaccagagtacacagtgcggctcaatgaggatgcagctgtgggcaccagcgtggtgacggtgtcagctgtggaccgtgatgctcatagtgtcatcacctaccagatcaccagtggcaatactcgaaaccgcttctccatcaccagccaaagtggtggtgggctggtatcccttgccctgccactggactacaaacttgagcggcagtatgtgttggctgttaccgcctccgatggcactcggcaggacacggcacagattgtggtgaatgtcaccgacgccaacacccatcgtcctgtctttcagagctcccactatacagtgaatgttaatgaggaccggccggcaggcaccacggtggtgctgatcagcgccacggatgaggacacaggtgagaatgcccgcatcacctacttcatggaggacagcatcccccagttccgcatcgatgcagacacgggggctgtcaccacccaggctgagctggactacgaagaccaagtgtcttacaccctggccattactgctcgggacaatggcattccccagaagtccgacaccacctacctggagatcctggtgaacgacgtgaatgacaatgcccctcagttcctgcgagactcctaccagggcagtgtctatgaggatgtgccacccttcactagcgtcctgcagatctcagccactgatcgtgattctggacttaatggcagggtcttctacaccttccaaggaggcgacgatggagacggtgactttattgttgagtccacgtcaggcatcgtgcgaacgctacggaggctggatcgagagaacgtggcccagtatgtcttgcgggcatatgcagtggacaaggggatgcccccagcccgcacacctatggaagtgacagtcactgtgttggatgtgaatgacaatccccctgtctttgagcaggatgagtttgatgtgtttgtggaagagaacagccccattgggctagccgtggcccgggtcacagccactgaccccgatgaaggcaccaatgcccagattatgtaccagattgtggagggcaacatccctgaggtcttccagctggacatcttctccggggagctgacagccctggtagacttagactacgaggaccggcctgagtacgtcctggtcatccaggccacgtcagctcctctggtgagccgggctacagtccacgtccgcctccttgaccgcaatgacaacccaccagtgctgggcaactttgagatccttttcaacaactatgtcaccaatcgctcaagcagcttccctgggggtgccattggccgagtacctgcccatgaccctgatatctcagatagtctgacttacagctttgagcggggaaatgaactcagcctggtcctgctcaatgcctccacgggtgagctgaagctaagccgcgcactggacaacaaccggcctctggaggccatcatgagcgtgctggtgtcagacggcgtacacagcgtgaccgcccagtgcgcgctgcgtgtgaccatcatcaccgatgagatgctcacccacagcatcacgctgcgcctggaggacatgtcacccgagcgcttcctgtcaccactgctaggcctcttcatccaggcggtggccgccacgctggccacgccaccggaccacgtggtggtcttcaacgtacagcgggacaccgacgcccccgggggccacatcctcaacgtgagcctgtcggtgggccagccgccagggcccgggggcgggccgcccttcctgccctctgaggacctgcaggagcgcctatacctcaaccgcagcctgctgacggccatctcggcacagcgcgtgctgcccttcgacgacaacatctgcctgcgggagccctgcgagaactacatgcgctgcgtgtcggtgctgcgcttcgactcctccgcgcccttcatcgcctcctcctccgtgctcttccggcccatccaccccgtcggagggctgcgctgccgctgcccgcccggcttcacgggtgactactgcgagaccgaggtggacctctgctactcgcggccctgtggcccccacgggcgctgccgcagccgcgagggcggctacacctgcctctgtcgtgatggctacacgggtgagcactgtgaggtgagtgctcgctcaggccgttgcaccccgggtgtctgcaagaatgggggcacctgtgtcaacctgctggtgggcggtttcaagtgcgattgcccatctggagacttcgagaagccctactgccaggtgaccacgcgcagcttccccgcccactccttcatcacctttcgcggcctgcgccagcgtttccacttcaccctggccctctcgtttgccacaaaggagcgcgacgggttgctgttgtacaatgggcgtttcaatgagaagcatgactttgtggccctcgaggtgatccaggagcaggtccagctcaccttctctgcaggggagtcaaccaccacggtgtccccattcgtgcccggaggagtcagtgatggccagtggcatacggtgcagctgaaatactacaataagccactgttgggtcagacagggctcccacagggcccatcagagcagaaggtggctgtggtgaccgtggatggctgtgacacaggagtggccttgcgcttcggatctgtcctgggcaactactcctgtgctgcccagggcacccagggtggcagcaagaagtctctggatctgacggggcccctgctactaggcggggtgcctgacctgcccgagagcttcccagtccgaatgcggcagttcgtgggctgcatgcggaacctgcaggtggacagccggcacatagacatggctgacttcattgccaacaatggcaccgtgcctggctgccctgccaagaagaacgtgtgtgacagcaacacttgccacaatgggggcacttgcgtgaaccagtgggacgcgttcagctgcgagtgccccctgggctttgggggcaagagctgcgcccaggaaatggccaatccacagcacttcctgggcagcagcctggtggcctggcatggcctctcgctgcccatctcccaaccctggtacctcagcctcatgttccgcacgcgccaggccgacggtgtcctgctgcaggccatcaccagggggcgcagcaccatcaccctacagctacgagagggccacgtgatgctgagcgtggagggcacagggcttcaggcctcctctctccgtctggagccaggccgggccaatgacggtgactggcaccatgcacagctggcactgggagccagcggggggcctggccatgccattctgtccttcgattatgggcagcagagagcagagggcaacctgggcccccggctgcatggtctgcacctgagcaacataacagtgggcggaatacctgggccagccggcggtgtggcccgtggctttcggggctgtttgcagggtgtgcgggtgagcgatacgccagagggggttaacagcctggatcccagccatggggagagcatcaacgtggagcaaggctgtagcctgcctgacccttgtgactcaaacccgtgtcctgctaacagctattgcagcaacgactgggacagctattcctgcagctgtgatccaggttactatggtgacaactgtactaatgtgtgtgacctgaacccgtgtgagcaccagtctgtgtgtacccgcaagcccagtgccccccatggctatacctgcgagtgtcccccaaattaccttgggccatactgtgagaccaggattgaccagccttgtccccgtggctggtggggacatcccacatgtggcccatgcaactgtgatgtcagcaaaggctttgacccagactgcaacaagacaagcggcgagtgccactgcaaggagaaccactaccggcccccaggcagccccacctgcctcttgtgtgactgctaccccacaggctccttgtccagagtctgtgaccctgaggatggccagtgtccatgcaagccaggtgtcatcgggcgtcagtgtgaccgctgtgacaacccttttgctgaggtcaccaccaatggctgtgaagtgaattatgacagctgcccacgagcgattgaggctgggatctggtggccccgtacccgcttcgggctgcctgctgctgctccctgtcccaaaggctcctttgggactgctgtgcgccactgtgatgagcacagggggtggctccccccaaacctcttcaactgcacgtccatcaccttctcagaactgaagggcttcgctgagcggctacagcggaatgagtcaggcctagactcagggcgctcccagcagctagccctgctcctgcgcaacgccacgcagcacacagctggctacttcggcagcgacgtcaaggtggcctaccagctggccacgcggctgctggcccacgagagcacccagcggggctttgggctgtctgccacacaggacgtgcacttcactgagaatctgctgcgggtgggcagcgccctcctggacacagccaacaagcggcactgggagctgatccagcagacagagggtggcaccgcctggctgctccagcactatgaggcctacgccagtgccctggcccagaacatgcggcacacctacctaagccccttcaccatcgtcacgcccaacattgtcatctccgtagtgcgcttggacaaagggaactttgctggggccaagctgccccgctacgaggccctgcgtggggagcagcccccggaccttgagacaacagtcattctgcctgagtctgtcttcagagagacgccccccgtggtcaggcccgcaggccccggagaggcccaggagccagaggagctggcacggcgacagcgacggcacccggagctgagccagggtgaggctgtggccagcgtcatcatctaccgcaccctggccgggctactgcctcataactatgaccctgacaagcgcagcttgagagtccccaaacgcccgatcatcaacacacccgtggtgagcatcagcgtccatgatgatgaggagcttctgccccgggccctggacaaacccgtcacggtgcagttccgcctgctggagacagaggagcggaccaagcccatctgtgtcttctggaaccattcaatcctggtcagtggcacaggtggctggtcggccagaggctgtgaagtcgtcttccgcaatgagagccacgtcagctgccagtgcaaccacatgacgagcttcgctgtgctcatggacgtttctcggcgggagaatggggagatcctgccactgaagacactgacatacgtggctctaggtgtcaccttggctgcccttctgctcaccttcttcttcctcactctcttgcgtatcctgcgctccaaccaacacggcatccgacgtaacctgtgaagtcgtcttccgcaatgagagccacgtcagctgccagtgcaaccacatgacgagcttcgctgtgcttctccccctgtcttctcccctcagcaattcctgcaaagggttaaaaatttaactggtttttactactgatgacttgatttaaaaaaaatacaaagatgctggatgctaacttgatactaaccatcagattgtacagtttggttgttgctgtaaatatggtagcgttttgttgttgttgttttttcatgccccatactactgaataaactagttctgtgcgggtacagcaatgtcact

SEQ ID NO: 316968 - DNA, 591 bp, Homo sapiens
aggaaggttatggtaacataaaataacaacttggtgacgtgtaactctgcataggatatatttcttttttttgaggcagagtcaaattggaggccccaaatgtacacaatactttttttgggtggctaaataactaatctgccttggcactaaaatatgtatctgaaataatttcaccaagttttaaaaagaaaaattataaaaagtatactttcattttaagttatattcgattttagtctccccctaccccctagaaaaaaacctgcacatctcacacacggagctgaaacttttgaggacttgtgtgtgtctgggagtgggtgagaggctgatgggagcaagatgcgcgcatctccccctgtcttctcccctcagcaattcctgcaaagggttaaaaatttaactggtttttactactgatgacttgatttaaaaaaaatacaaagatgctggatgctaacttgatactaaccatcagattgtacagtttggttgttgctgtaaatatggtagcgttttgttgttgttgttttttcatgccccatactactgaataaactagttctgtgcgggtacagcaatgtcact

SEQ ID NO: 316969 - DNA, 312 bp, Homo sapiens
gcctagggagggctggggagcctgggcaggacagcagagggagagctgctcctgggtgaccatgtgctcttccccgcagtgaattatgacagctgcccacgagcgattgaggctgggatctggtggccccgtacccgcttcgggctgcctgctgctgctccctgtcccaaaggctcctttggtaggtgttggaggccccgatgtgatgtcgaggacatggcctctgctgttagtgggatgagggcaggaagctcctggctgaagatccggggaccccactttctggcctccaggtcctgggatttcatttcc

SEQ ID NO: 316970 - DNA, 440 bp, Homo sapiens
gtgagtggggcacccccagctgccgagctcccctagtcagcagcctcatacctcacattctcctgtggccgcacctcacagccccgccccggcccacaggcatccttaagaagaagtgtctgcccaccatcagcgagaagagcagcctcctgcggctccccctggagcaatgcacagggtcttcccggggctcctccgctagtgagggcagccggggcggcccccctccccgcccaccgccccggcagagcctccaggagcagctgaacggggtcatgcccatcgccatgagcatcaaggcaggcacggtggatgaggactcgtcaggctccgagtgagtgtggccgggtgggcgggacggggtgcagcccctcggaggcctcacctgggcccagagctgcctccgggcctccccaggtgactctggatggcatttggag

SEQ ID NO: 316971 - DNA, 10550 bp, Homo sapiens
taggagccggaggaggagccgccgccgccgttgacccggccgccggccgggagctgggagagatgcggagcccggccaccggcgtccccctcccaacgccgccgccgccgctgctgctgctgttgctgctgctgctgccgccgccactattgggagaccaagtggggccctgtcgttccttggggtccaggggacgaggctcttcgggggcctgcgcccccatgggctggctctgtccatcctcagcgtcgaacctctggctctacaccagccgctgcagggatgcgggcactgagctgactggccacctggtaccccaccacgatggcctgagggtttggtgtccagaatccgaggcccatattcccctaccaccagctcctgaaggctgcccctggagctgtcgcctcctgggcattggaggccacctttccccacagggcaagctcacactgcccgaggagcacccgtgcttaaaggctccacggctcagatgccagtcctgcaagctggcacaggcccccgggctcagggcaggggaaaggtcaccagaagagtccctgggtgggcgtcggaaaaggaatgtaaatacagccccccagttccagccccccagctaccaggccacagtgccggagaaccagccagcaggcacccctgttgcatccctgagggccatcgacccggacgagggtgaggcaggtcgactggagtacaccatggatgccctctttgatagccgctccaaccagttcttctccctggacccagtcactggtgcagtaaccacagccgaggagctggatcgtgagaccaagagcacccacgtcttcagggtcacggcgcaggaccacggcatgccccgacgaagtgccctggctacactcaccatcttggttactgacaccaatgaccatgaccctgtgttcgagcagcaggagtacaaggagagcctcagggagaacctggaggttggctatgaggtgctcactgtcagggccacggatggtgatgcccctcccaatgccaatattctgtaccgcctgctggaggggtctgggggcagcccctctgaagtctttgagatcgaccctcgctctggggtgatccgaacccgtggccctgtggatcgggaagaggtggaatcctaccagctgacggtagaggcaagtgaccagggtcgggacccgggtcctcggagtaccacagccgctgttttcctttctgtggaggatgacaatgataatgccccccagtttagtgagaagcgctatgtggtccaggtgagggaggatgtgactccaggggccccagtactccgagtcacagcctcggatcgagacaaggggagcaatgccgtggtgcactatagcatcatgagtggcaatgctcggggacagttttatctggatgcccagactggagctctggatgtggtgagccctcttgactatgagacgaccaaggagtacaccctacgggtgcgagcacaggatggtggccgtcccccactctctaatgtctctggcttggtgacagtacaggtcctggatatcaacgacaatgcccccatcttcgtcagcacccctttccaggctactgtcctggagagcgtccccttaggctacctggttctccatgtccaggctatcgacgctgatgctggtgacaatgcccgcctggaataccgccttgctggggtgggacatgacttccccttcaccatcaacaatggcacaggctggatctctgtggctgctgaactggaccgggaggaagttgatttctacagctttggggtagaagctcgagaccatggcactccagcactcactgcctcggccagtgtcagcgtgactgtcctggatgtcaacgacaacaatccaacctttacccaaccagagtacacagtgcggctcaatgaggatgcagctgtgggcaccagcgtggtgacggtgtcagctgtggaccgtgatgctcatagtgtcatcacctaccagatcaccagtggcaatactcgaaaccgcttctccatcaccagccaaagtggtggtgggctggtatcccttgccctgccactggactacaaacttgagcggcagtatgtgttggctgttaccgcctccgatggcactcggcaggacacggcacagattgtggtgaatgtcaccgacgccaacacccatcgtcctgtctttcagagctcccactatacagtgaatgttaatgaggaccggccggcaggcaccacggtggtgctgatcagcgccacggatgaggacacaggtgagaatgcccgcatcacctacttcatggaggacagcatcccccagttccgcatcgatgcagacacgggggctgtcaccacccaggctgagctggactacgaagaccaagtgtcttacaccctggccattactgctcgggacaatggcattccccagaagtccgacaccacctacctggagatcctggtgaacgacgtgaatgacaatgcccctcagttcctgcgagactcctaccagggcagtgtctatgaggatgtgccacccttcactagcgtcctgcagatctcagccactgatcgtgattctggacttaatggcagggtcttctacaccttccaaggaggcgacgatggagacggtgactttattgttgagtccacgtcaggcatcgtgcgaacgctacggaggctggatcgagagaacgtggcccagtatgtcttgcgggcatatgcagtggacaaggggatgcccccagcccgcacacctatggaagtgacagtcactgtgttggatgtgaatgacaatccccctgtctttgagcaggatgagtttgatgtgtttgtggaagagaacagccccattgggctagccgtggcccgggtcacagccactgaccccgatgaaggcaccaatgcccagattatgtaccagattgtggagggcaacatccctgaggtcttccagctggacatcttctccggggagctgacagccctggtagacttagactacgaggaccggcctgagtacgtcctggtcatccaggccacgtcagctcctctggtgagccgggctacagtccacgtccgcctccttgaccgcaatgacaacccaccagtgctgggcaactttgagatccttttcaacaactatgtcaccaatcgctcaagcagcttccctgggggtgccattggccgagtacctgcccatgaccctgatatctcagatagtctgacttacagctttgagcggggaaatgaactcagcctggtcctgctcaatgcctccacgggtgagctgaagctaagccgcgcactggacaacaaccggcctctggaggccatcatgagcgtgctggtgtcagacggcgtacacagcgtgaccgcccagtgcgcgctgcgtgtgaccatcatcaccgatgagatgctcacccacagcatcacgctgcgcctggaggacatgtcacccgagcgcttcctgtcaccactgctaggcctcttcatccaggcggtggccgccacgctggccacgccaccggaccacgtggtggtcttcaacgtacagcgggacaccgacgcccccgggggccacatcctcaacgtgagcctgtcggtgggccagccgccagggcccgggggcgggccgcccttcctgccctctgaggacctgcaggagcgcctatacctcaaccgcagcctgctgacggccatctcggcacagcgcgtgctgcccttcgacgacaacatctgcctgcgggagccctgcgagaactacatgcgctgcgtgtcggtgctgcgcttcgactcctccgcgcccttcatcgcctcctcctccgtgctcttccggcccatccaccccgtcggagggctgcgctgccgctgcccgcccggcttcacgggtgactactgcgagaccgaggtggacctctgctactcgcggccctgtggcccccacgggcgctgccgcagccgcgagggcggctacacctgcctctgtcgtgatggctacacgggtgagcactgtgaggtgagtgctcgctcaggccgttgcaccccgggtgtctgcaagaatgggggcacctgtgtcaacctgctggtgggcggtttcaagtgcgattgcccatctggagacttcgagaagccctactgccaggtgaccacgcgcagcttccccgcccactccttcatcacctttcgcggcctgcgccagcgtttccacttcaccctggccctctcgtttgccacaaaggagcgcgacgggttgctgttgtacaatgggcgtttcaatgagaagcatgactttgtggccctcgaggtgatccaggagcaggtccagctcaccttctctgcaggggagtcaaccaccacggtgtccccattcgtgcccggaggagtcagtgatggccagtggcatacggtgcagctgaaatactacaataagccactgttgggtcagacagggctcccacagggcccatcagagcagaaggtggctgtggtgaccgtggatggctgtgacacaggagtggccttgcgcttcggatctgtcctgggcaactactcctgtgctgcccagggcacccagggtggcagcaagaagtctctggatctgacggggcccctgctactaggcggggtgcctgacctgcccgagagcttcccagtccgaatgcggcagttcgtgggctgcatgcggaacctgcaggtggacagccggcacatagacatggctgacttcattgccaacaatggcaccgtgcctggctgccctgccaagaagaacgtgtgtgacagcaacacttgccacaatgggggcacttgcgtgaaccagtgggacgcgttcagctgcgagtgccccctgggctttgggggcaagagctgcgcccaggaaatggccaatccacagcacttcctgggcagcagcctggtggcctggcatggcctctcgctgcccatctcccaaccctggtacctcagcctcatgttccgcacgcgccaggccgacggtgtcctgctgcaggccatcaccagggggcgcagcaccatcaccctacagctacgagagggccacgtgatgctgagcgtggagggcacagggcttcaggcctcctctctccgtctggagccaggccgggccaatgacggtgactggcaccatgcacagctggcactgggagccagcggggggcctggccatgccattctgtccttcgattatgggcagcagagagcagagggcaacctgggcccccggctgcatggtctgcacctgagcaacataacagtgggcggaatacctgggccagccggcggtgtggcccgtggctttcggggctgtttgcagggtgtgcgggtgagcgatacgccagagggggttaacagcctggatcccagccatggggagagcatcaacgtggagcaaggctgtagcctgcctgacccttgtgactcaaacccgtgtcctgctaacagctattgcagcaacgactgggacagctattcctgcagctgtgatccaggttactatggtgacaactgtactaatgtgtgtgacctgaacccgtgtgagcaccagtctgtgtgtacccgcaagcccagtgccccccatggctatacctgcgagtgtcccccaaattaccttgggccatactgtgagaccaggattgaccagccttgtccccgtggctggtggggacatcccacatgtggcccatgcaactgtgatgtcagcaaaggctttgacccagactgcaacaagacaagcggcgagtgccactgcaaggagaaccactaccggcccccaggcagccccacctgcctcttgtgtgactgctaccccacaggctccttgtccagagtctgtgaccctgaggatggccagtgtccatgcaagccaggtgtcatcgggcgtcagtgtgaccgctgtgacaacccttttgctgaggtcaccaccaatggctgtgaagtgaattatgacagctgcccacgagcgattgaggctgggatctggtggccccgtacccgcttcgggctgcctgctgctgctccctgtcccaaaggctcctttgggactgctgtgcgccactgtgatgagcacagggggtggctccccccaaacctcttcaactgcacgtccatcaccttctcagaactgaagggcttcgctgagcggctacagcggaatgagtcaggcctagactcagggcgctcccagcagctagccctgctcctgcgcaacgccacgcagcacacagctggctacttcggcagcgacgtcaaggtggcctaccagctggccacgcggctgctggcccacgagagcacccagcggggctttgggctgtctgccacacaggacgtgcacttcactgagaatctgctgcgggtgggcagcgccctcctggacacagccaacaagcggcactgggagctgatccagcagacagagggtggcaccgcctggctgctccagcactatgaggcctacgccagtgccctggcccagaacatgcggcacacctacctaagccccttcaccatcgtcacgcccaacattgtcatctccgtagtgcgcttggacaaagggaactttgctggggccaagctgccccgctacgaggccctgcgtggggagcagcccccggaccttgagacaacagtcattctgcctgagtctgtcttcagagagacgccccccgtggtcaggcccgcaggccccggagaggcccaggagccagaggagctggcacggcgacagcgacggcacccggagctgagccagggtgaggctgtggccagcgtcatcatctaccgcaccctggccgggctactgcctcataactatgaccctgacaagcgcagcttgagagtccccaaacgcccgatcatcaacacacccgtggtgagcatcagcgtccatgatgatgaggagcttctgccccgggccctggacaaacccgtcacggtgcagttccgcctgctggagacagaggagcggaccaagcccatctgtgtcttctggaaccattcaatcctggtcagtggcacaggtggctggtcggccagaggctgtgaagtcgtcttccgcaatgagagccacgtcagctgccagtgcaaccacatgacgagcttcgctgtgctcatggacgtttctcggcgggagaatggggagatcctgccactgaagacactgacatacgtggctctaggtgtcaccttggctgcccttctgctcaccttcttcttcctcactctcttgcgtatcctgcgctccaaccaacacggcatccgacgtaacctgacagctgccctgggcctggctcagctggtcttcctcctgggaatcaaccaggctgacctcccttttgcctgcacagtcattgccatcctgctgcacttcctgtacctctgcaccttttcctgggctctgctggaggccttgcacctgtaccgggcactcactgaggtgcgcgatgtcaacaccggccccatgcgcttctactacatgctgggctggggcgtgcctgccttcatcacagggctagccgtgggcctggaccccgagggctacgggaaccctgacttctgctggctctccatctatgacacgctcatctggagttttgctggcccggtggcctttgccgtctcgatgagtgtcttcctgtacatcctggcggcccgggcctcctgtgctgcccagcggcagggctttgagaagaaaggtcctgtctcgggcctgcagccctccttcgccgtcctcctgctgctgagcgccacgtggctgctggcactgctctctgtcaacagcgacaccctcctcttccactacctctttgctacctgcaattgcatccagggccccttcatcttcctctcctatgtggtgcttagcaaggaggtccggaaagcactcaagcttgcctgcagccgcaagcccagccctgaccctgctctgaccaccaagtccaccctgacctcgtcctacaactgccccagcccctacgcagatgggcggctgtaccagccctacggagactcggccggctctctgcacagcaccagtcgctcgggcaagagtcagcccagctacatccccttcttgctgagggaggagtccgcactgaaccctggccaagggccccctggcctgggggatccaggcagcctgttcctggaaggtcaagaccagcagcatgatcctgacacggactccgacagtgacctgtccttagaagacgaccagagtggctcctatgcctctacccactcatcagacagtgaggaggaagaagaggaggaggaagaggaggccgccttccctggagagcagggctgggatagcctgctggggcctggagcagagagactgcccctgcacagtactcccaaggatgggggcccagggcctggcaaggccccctggccaggagactttgggaccacagcaaaagagagtagtggcaacggggcccctgaggagcggctgcgggagaatggagatgccctgtctcgagaggggtccctaggcccccttccaggctcttctgcccagcctcacaaaggcatccttaagaagaagtgtctgcccaccatcagcgagaagagcagcctcctgcggctccccctggagcaatgcacagggtcttcccggggctcctccgctagtgagggcagccggggcggcccccctccccgcccaccgccccggcagagcctccaggagcagctgaacggggtcatgcccatcgccatgagcatcaaggcaggcacggtggatgaggactcgtcaggctccgaatttctcttctttaacttcctgcattaaccctgggccgtggttcctacgcccgaggctcccttcccttccccagccgcactcatgccctgctcctgtcttgtgctttatcctgccccgctccccatcgcctgcccgcagcagcgacgaaacgtccatctgaggagcctgggccttgccgggaggggtactcaccccacctaaggccatctagtgccaactccccccccaccattcccctcactgcactttggacccctggggccaacatctccaagacaaagtttttcagaaaagaggaaaaaaagaatttaaaaaaggatctccactcttcatgacttcagggattcattttttttatacgctggaaattgactcccctttcccttcccaaagaggataggacctcccaggatgcttcccagcctctcctcagtttcccatctgctgtgcctctgggaggagagggactcctggggggcctgcccctcatacgccatcaccaaaaggaaaggacaaagccacacgcagccagggcttcacacccttcaggctgcacccgggcaggcctcagaacggtgaggggccagggcaaagggtgtgtctcgtcctgcccgcactgcctctcccaggaactggaaaagccctgtccggtgagggggcagaaggactcagcgcccctggacccccaaatgctgcatgaacacattttcaggggagcctgtgcccccaggcgggggtcgggcagccccagcccctctccttttcctggactctggccgtgcgcggcagcccaggtgtttgctcagttgctgacccaaaagtgcttcatttttcgtgcccgccccgcgccccgggcaggccagtcatgtgttaagttgcgcttctttgctgtgatgtgggtgggggaggaagagtaaacacagtgctggctcggctgccctgagggtgctcaatcaagcacaggtttcaagtctgggttctggtgtccactcacccaccccaccccccaaaatcagacaaatgctactttgtctaacctgctgtggcctctgagacatgttctatttttaaccccttcttggaattggctctcttcttcaaaggaccaggtcctgttcctctttctccccgactccaccccagctccctgtgaagagagagttaatatatttgttttatttatttgctttttgcgttgggatgggttcgtgtccagtcccgggggtctgatatggccatcacaggctgggtgttcccagcagccctggcttgggggcttgacgcccttccccttgccccaggccatcatctccccacctctcctcccctctcctcagttttgccgactgcttttcatctgagtcaccatttactccaagcatgtattccagacttgtcactgactttccttctggagcaggtggctagaaaaagaggctgtgggcaggaaagaaaggctcctgtttctcatttgtgaggccagcctctggcttttctgccgtggattctccccctgtcttctcccctcagcaattcctgcaaagggttaaaaatttaactggtttttactactgatgacttgatttaaaaaaaatacaaagatgctggatgctaacttgatactaaccatcagattgtacagtttggttgttgctgtaaatatggtagcgttttgttgttgttgttttttcatgccccatactactgaataaactagttctgtgcgggtacagcaatgtcact

SEQ ID NO: 316972 - DNA, 7686 bp, Homo sapiens
gctgggggcatccccttgtccactgcatatgcccccagcccgcacacctatggaagtgacagtcactgtgttggatgtgaatgacaatccccctgtctttgagcaggatgagtttgatgtgtttgtggaagagaacagccccattgggctagccgtggcccgggtcacagccactgaccccgatgaaggcaccaatgcccagattatgtaccagattgtggagggcaacatccctgaggtcttccagctggacatcttctccggggagctgacagccctggtagacttagactacgaggaccggcctgagtacgtcctggtcatccaggccacgtcagctcctctggtgagccgggctacagtccacgtccgcctccttgaccgcaatgacaacccaccagtgctgggcaactttgagatccttttcaacaactatgtcaccaatcgctcaagcagcttccctgggggtgccattggccgagtacctgcccatgaccctgatatctcagatagtctgacttacagctttgagcggggaaatgaactcagcctggtcctgctcaatgcctccacgggtgagctgaagctaagccgcgcactggacaacaaccggcctctggaggccatcatgagcgtgctggtgtcagacggcgtacacagcgtgaccgcccagtgcgcgctgcgtgtgaccatcatcaccgatgagatgctcacccacagcatcacgctgcgcctggaggacatgtcacccgagcgcttcctgtcaccactgctaggcctcttcatccaggcggtggccgccacgctggccacgccaccggaccacgtggtggtcttcaacgtacagcgggacaccgacgcccccgggggccacatcctcaacgtgagcctgtcggtgggccagccgccagggcccgggggcgggccgcccttcctgccctctgaggacctgcaggagcgcctatacctcaaccgcagcctgctgacggccatctcggcacagcgcgtgctgcccttcgacgacaacatctgcctgcgggagccctgcgagaactacatgcgctgcgtgtcggtgctgcgcttcgactcctccgcgcccttcatcgcctcctcctccgtgctcttccggcccatccaccccgtcggagggctgcgctgccgctgcccgcccggcttcacgggtgactactgcgagaccgaggtggacctctgctactcgcggccctgtggcccccacgggcgctgccgcagccgcgagggcggctacacctgcctctgtcgtgatggctacacgggtgagcactgtgaggtgagtgctcgctcaggccgttgcaccccgggtgtctgcaagaatgggggcacctgtgtcaacctgctggtgggcggtttcaagtgcgattgcccatctggagacttcgagaagccctactgccaggtgaccacgcgcagcttccccgcccactccttcatcacctttcgcggcctgcgccagcgtttccacttcaccctggccctctcgtttgccacaaaggagcgcgacgggttgctgttgtacaatgggcgtttcaatgagaagcatgactttgtggccctcgaggtgatccaggagcaggtccagctcaccttctctgcaggggagtcaaccaccacggtgtccccattcgtgcccggaggagtcagtgatggccagtggcatacggtgcagctgaaatactacaataagccactgttgggtcagacagggctcccacagggcccatcagagcagaaggtggctgtggtgaccgtggatggctgtgacacaggagtggccttgcgcttcggatctgtcctgggcaactactcctgtgctgcccagggcacccagggtggcagcaagaagtctctggatctgacggggcccctgctactaggcggggtgcctgacctgcccgagagcttcccagtccgaatgcggcagttcgtgggctgcatgcggaacctgcaggtggacagccggcacatagacatggctgacttcattgccaacaatggcaccgtgcctggctgccctgccaagaagaacgtgtgtgacagcaacacttgccacaatgggggcacttgcgtgaaccagtgggacgcgttcagctgcgagtgccccctgggctttgggggcaagagctgcgcccaggaaatggccaatccacagcacttcctgggcagcagcctggtggcctggcatggcctctcgctgcccatctcccaaccctggtacctcagcctcatgttccgcacgcgccaggccgacggtgtcctgctgcaggccatcaccagggggcgcagcaccatcaccctacagctacgagagggccacgtgatgctgagcgtggagggcacagggcttcaggcctcctctctccgtctggagccaggccgggccaatgacggtgactggcaccatgcacagctggcactgggagccagcggggggcctggccatgccattctgtccttcgattatgggcagcagagagcagagggcaacctgggcccccggctgcatggtctgcacctgagcaacataacagtgggcggaatacctgggccagccggcggtgtggcccgtggctttcggggctgtttgcagggtgtgcgggtgagcgatacgccagagggggttaacagcctggatcccagccatggggagagcatcaacgtggagcaaggctgtagcctgcctgacccttgtgactcaaacccgtgtcctgctaacagctattgcagcaacgactgggacagctattcctgcagctgtgatccaggttactatggtgacaactgtactaatgtgtgtgacctgaacccgtgtgagcaccagtctgtgtgtacccgcaagcccagtgccccccatggctatacctgcgagtgtcccccaaattaccttgggccatactgtgagaccaggattgaccagccttgtccccgtggctggtggggacatcccacatgtggcccatgcaactgtgatgtcagcaaaggctttgacccagactgcaacaagacaagcggcgagtgccactgcaaggagaaccactaccggcccccaggcagccccacctgcctcttgtgtgactgctaccccacaggctccttgtccagagtctgtgaccctgaggatggccagtgtccatgcaagccaggtgtcatcgggcgtcagtgtgaccgctgtgacaacccttttgctgaggtcaccaccaatggctgtgaagtgaattatgacagctgcccacgagcgattgaggctgggatctggtggccccgtacccgcttcgggctgcctgctgctgctccctgtcccaaaggctcctttgggactgctgtgcgccactgtgatgagcacagggggtggctccccccaaacctcttcaactgcacgtccatcaccttctcagaactgaagggcttcgctgagcggctacagcggaatgagtcaggcctagactcagggcgctcccagcagctagccctgctcctgcgcaacgccacgcagcacacagctggctacttcggcagcgacgtcaaggtggcctaccagctggccacgcggctgctggcccacgagagcacccagcggggctttgggctgtctgccacacaggacgtgcacttcactgagaatctgctgcgggtgggcagcgccctcctggacacagccaacaagcggcactgggagctgatccagcagacagagggtggcaccgcctggctgctccagcactatgaggcctacgccagtgccctggcccagaacatgcggcacacctacctaagccccttcaccatcgtcacgcccaacattgtcatctccgtagtgcgcttggacaaagggaactttgctggggccaagctgccccgctacgaggccctgcgtggggagcagcccccggaccttgagacaacagtcattctgcctgagtctgtcttcagagagacgccccccgtggtcaggcccgcaggccccggagaggcccaggagccagaggagctggcacggcgacagcgacggcacccggagctgagccagggtgaggctgtggccagcgtcatcatctaccgcaccctggccgggctactgcctcataactatgaccctgacaagcgcagcttgagagtccccaaacgcccgatcatcaacacacccgtggtgagcatcagcgtccatgatgatgaggagcttctgccccgggccctggacaaacccgtcacggtgcagttccgcctgctggagacagaggagcggaccaagcccatctgtgtcttctggaaccattcaatcctggtcagtggcacaggtggctggtcggccagaggctgtgaagtcgtcttccgcaatgagagccacgtcagctgccagtgcaaccacatgacgagcttcgctgtgctcatggacgtttctcggcgggagaatggggagatcctgccactgaagacactgacatacgtggctctaggtgtcaccttggctgcccttctgctcaccttcttcttcctcactctcttgcgtatcctgcgctccaaccaacacggcatccgacgtaacctgacagctgccctgggcctggctcagctggtcttcctcctgggaatcaaccaggctgacctcccttttgcctgcacagtcattgccatcctgctgcacttcctgtacctctgcaccttttcctgggctctgctggaggccttgcacctgtaccgggcactcactgaggtgcgcgatgtcaacaccggccccatgcgcttctactacatgctgggctggggcgtgcctgccttcatcacagggctagccgtgggcctggaccccgagggctacgggaaccctgacttctgctggctctccatctatgacacgctcatctggagttttgctggcccggtggcctttgccgtctcgatgagtgtcttcctgtacatcctggcggcccgggcctcctgtgctgcccagcggcagggctttgagaagaaaggtcctgtctcgggcctgcagccctccttcgccgtcctcctgctgctgagcgccacgtggctgctggcactgctctctgtcaacagcgacaccctcctcttccactacctctttgctacctgcaattgcatccagggccccttcatcttcctctcctatgtggtgcttagcaaggaggtccggaaagcactcaagcttgcctgcagccgcaagcccagccctgaccctgctctgaccaccaagtccaccctgacctcgtcctacaactgccccagcccctacgcagatgggcggctgtaccagccctacggagactcggccggctctctgcacagcaccagtcgctcgggcaagagtcagcccagctacatccccttcttgctgagggaggagtccgcactgaaccctggccaagggccccctggcctgggggatccaggcagcctgttcctggaaggtcaagaccagcagcatgatcctgacacggactccgacagtgacctgtccttagaagacgaccagagtggctcctatgcctctacccactcatcagacagtgaggaggaagaagaggaggaggaagaggaggccgccttccctggagagcagggctgggatagcctgctggggcctggagcagagagactgcccctgcacagtactcccaaggatgggggcccagggcctggcaaggccccctggccaggagactttgggaccacagcaaaagagagtagtggcaacggggcccctgaggagcggctgcgggagaatggagatgccctgtctcgagaggggtccctaggcccccttccaggctcttctgcccagcctcacaaaggcatccttaagaagaagtgtctgcccaccatcagcgagaagagcagcctcctgcggctccccctggagcaatgcacagggtcttcccggggctcctccgctagtgagggcagccggggcggcccccctccccgcccaccgccccggcagagcctccaggagcagctgaacggggtcatgcccatcgccatgagcatcaaggcaggcacggtggatgaggactcgtcaggctccgacagcgacgaaacgtccatctgaggagcctgggccttgccgggaggggtactcaccccacctaaggccatctagtgccaactccccccccaccattcccctcactgcactttggacccctggggccaacatctccaagacaaagtttttcagaaaagaggaaaaaaagaatttaaaaaaggatctccactcttcatgacttcagggattcattttttttatacgctggaaattgactcccctttcccttcccaaagaggataggacctcccaggatgcttcccagcctctcctcagtttcccatctgctgtgcctctgggaggagagggactcctggggggcctgcccctcatacgccatcaccaaaaggaaaggacaaagccacacgcagccagggcttcacacccttcaggctgcacccgggcaggcctcagaacggtgaggggccagggcaaagggtgtgtctcgtcctgcccgcactgcctctcccaggaactggaaaagccctgtccggtgagggggcagaaggactcagcgcccctggacccccaaatgctgcatgaacacattttcaggggagcctgtgcccccaggcgggggtcgggcagccccagcccctctccttttcctggactctggccgtgcgcggcagcccaggtgtttgctcagttgctgacccaaaagtgcttcatttttcgtgcccgccccgcgccccgggcaggccagtcatgtgttaagttgcgcttctttgctgtgatgtgggtgggggaggaagagtaaacacagtgctggctcggctgccctgagggtgctcaatcaagcacaggtttcaagtctgggttctggtgtccactcacccaccccaccccccaaaatcagacaaatgctactttgtctaacctgctgtggcctctgagacatgttctatttttaaccccttcttggaattggctctcttcttcaaaggaccaggtcctgttcctctttctccccgactccaccccagctccctgtgaagagagagttaatatatttgttttatttatttgctttttgcgttgggatgggttcgtgtccagtcccgggggtctgatatggccatcacaggctgggtgttcccagcagccctggcttgggggcttgacgcccttccccttgccccaggccatcatctccccacctctcctcccctctcctcagttttgccgactgcttttcatctgagtcaccatttactccaagcatgtattccagacttgtcactgactttccttctggagcaggtggctagaaaaagaggctgtgggcaggaaagaaaggctcctgtttctcatttgtgaggccagcctctggcttttctgccgtggattctccccctgtcttctcccctcagcaattcctgcaaagggttaaaaatttaactggtttttactactgatgacttgatttaaaaaaaatacaaagatgctggatgctaacttgatactaaccatcagattgtacagtttggttgttgctgtaaatatggtagcgttttgttgttgttgttttttcatgccccatactactgaataaactagttctgtgcgggtacagcaatgtcact

SEQ ID NO: 316973 - DNA, 9110 bp, Homo sapiens
taggagccggaggaggagccgccgccgccgttgacccggccgccggccgggagctgggagagatgcggagcccggccaccggcgtccccctcccaacgccgccgccgccgctgctgctgctgttgctgctgctgctgccgccgccactattgggagaccaagtggggccctgtcgttccttggggtccaggggacgaggctcttcgggggcctgcgcccccatgggctggctctgtccatcctcagcgtcgaacctctggctctacaccagccgctgcagggatgcgggcactgagctgactggccacctggtaccccaccacgatggcctgagggtttggtgtccagaatccgaggcccatattcccctaccaccagctcctgaaggctgcccctggagctgtcgcctcctgggcattggaggccacctttccccacagggcaagctcacactgcccgaggagcacccgtgcttaaaggctccacggctcagatgccagtcctgcaagctggcacaggcccccgggctcagggcaggggaaaggtcaccagaagagtccctgggtgggcgtcggaaaaggaatgtaaatacagccccccagttccagccccccagctaccaggccacagtgccggagaaccagccagcaggcacccctgttgcatccctgagggccatcgacccggacgagggtgaggcaggtcgactggagtacaccatggatgccctctttgatagccgctccaaccagttcttctccctggacccagtcactggtgcagtaaccacagccgaggagctggatcgtgagaccaagagcacccacgtcttcagggtcacggcgcaggaccacggcatgccccgacgaagtgccctggctacactcaccatcttggttactgacaccaatgaccatgaccctgtgttcgagcagcaggagtacaaggagagcctcagggagaacctggaggttggctatgaggtgctcactgtcagggccacggatggtgatgcccctcccaatgccaatattctgtaccgcctgctggaggggtctgggggcagcccctctgaagtctttgagatcgaccctcgctctggggtgatccgaacccgtggccctgtggatcgggaagaggtggaatcctaccagctgacggtagaggcaagtgaccagggtcgggacccgggtcctcggagtaccacagccgctgttttcctttctgtggaggatgacaatgataatgccccccagtttagtgagaagcgctatgtggtccaggtgagggaggatgtgactccaggggccccagtactccgagtcacagcctcggatcgagacaaggggagcaatgccgtggtgcactatagcatcatgagtggcaatgctcggggacagttttatctggatgcccagactggagctctggatgtggtgagccctcttgactatgagacgaccaaggagtacaccctacgggtgcgagcacaggatggtggccgtcccccactctctaatgtctctggcttggtgacagtacaggtcctggatatcaacgacaatgcccccatcttcgtcagcacccctttccaggctactgtcctggagagcgtccccttaggctacctggttctccatgtccaggctatcgacgctgatgctggtgacaatgcccgcctggaataccgccttgctggggtgggacatgacttccccttcaccatcaacaatggcacaggctggatctctgtggctgctgaactggaccgggaggaagttgatttctacagctttggggtagaagctcgagaccatggcactccagcactcactgcctcggccagtgtcagcgtgactgtcctggatgtcaacgacaacaatccaacctttacccaaccagagtacacagtgcggctcaatgaggatgcagctgtgggcaccagcgtggtgacggtgtcagctgtggaccgtgatgctcatagtgtcatcacctaccagatcaccagtggcaatactcgaaaccgcttctccatcaccagccaaagtggtggtgggctggtatcccttgccctgccactggactacaaacttgagcggcagtatgtgttggctgttaccgcctccgatggcactcggcaggacacggcacagattgtggtgaatgtcaccgacgccaacacccatcgtcctgtctttcagagctcccactatacagtgaatgttaatgaggaccggccggcaggcaccacggtggtgctgatcagcgccacggatgaggacacaggtgagaatgcccgcatcacctacttcatggaggacagcatcccccagttccgcatcgatgcagacacgggggctgtcaccacccaggctgagctggactacgaagaccaagtgtcttacaccctggccattactgctcgggacaatggcattccccagaagtccgacaccacctacctggagatcctggtgaacgacgtgaatgacaatgcccctcagttcctgcgagactcctaccagggcagtgtctatgaggatgtgccacccttcactagcgtcctgcagatctcagccactgatcgtgattctggacttaatggcagggtcttctacaccttccaaggaggcgacgatggagacggtgactttattgttgagtccacgtcaggcatcgtgcgaacgctacggaggctggatcgagagaacgtggcccagtatgtcttgcgggcatatgcagtggacaaggggatgcccccagcccgcacacctatggaagtgacagtcactgtgttggatgtgaatgacaatccccctgtctttgagcaggatgagtttgatgtgtttgtggaagagaacagccccattgggctagccgtggcccgggtcacagccactgaccccgatgaaggcaccaatgcccagattatgtaccagattgtggagggcaacatccctgaggtcttccagctggacatcttctccggggagctgacagccctggtagacttagactacgaggaccggcctgagtacgtcctggtcatccaggccacgtcagctcctctggtgagccgggctacagtccacgtccgcctccttgaccgcaatgacaacccaccagtgctgggcaactttgagatccttttcaacaactatgtcaccaatcgctcaagcagcttccctgggggtgccattggccgagtacctgcccatgaccctgatatctcagatagtctgacttacagctttgagcggggaaatgaactcagcctggtcctgctcaatgcctccacgggtgagctgaagctaagccgcgcactggacaacaaccggcctctggaggccatcatgagcgtgctggtgtcagacggcgtacacagcgtgaccgcccagtgcgcgctgcgtgtgaccatcatcaccgatgagatgctcacccacagcatcacgctgcgcctggaggacatgtcacccgagcgcttcctgtcaccactgctaggcctcttcatccaggcggtggccgccacgctggccacgccaccggaccacgtggtggtcttcaacgtacagcgggacaccgacgcccccgggggccacatcctcaacgtgagcctgtcggtgggccagccgccagggcccgggggcgggccgcccttcctgccctctgaggacctgcaggagcgcctatacctcaaccgcagcctgctgacggccatctcggcacagcgcgtgctgcccttcgacgacaacatctgcctgcgggagccctgcgagaactacatgcgctgcgtgtcggtgctgcgcttcgactcctccgcgcccttcatcgcctcctcctccgtgctcttccggcccatccaccccgtcggagggctgcgctgccgctgcccgcccggcttcacgggtgactactgcgagaccgaggtggacctctgctactcgcggccctgtggcccccacgggcgctgccgcagccgcgagggcggctacacctgcctctgtcgtgatggctacacgggtgagcactgtgaggtgagtgctcgctcaggccgttgcaccccgggtgtctgcaagaatgggggcacctgtgtcaacctgctggtgggcggtttcaagtgcgattgcccatctggagacttcgagaagccctactgccaggtgaccacgcgcagcttccccgcccactccttcatcacctttcgcggcctgcgccagcgtttccacttcaccctggccctctcgtttgccacaaaggagcgcgacgggttgctgttgtacaatgggcgtttcaatgagaagcatgactttgtggccctcgaggtgatccaggagcaggtccagctcaccttctctgcaggggagtcaaccaccacggtgtccccattcgtgcccggaggagtcagtgatggccagtggcatacggtgcagctgaaatactacaataagccactgttgggtcagacagggctcccacagggcccatcagagcagaaggtggctgtggtgaccgtggatggctgtgacacaggagtggccttgcgcttcggatctgtcctgggcaactactcctgtgctgcccagggcacccagggtggcagcaagaagtctctggatctgacggggcccctgctactaggcggggtgcctgacctgcccgagagcttcccagtccgaatgcggcagttcgtgggctgcatgcggaacctgcaggtggacagccggcacatagacatggctgacttcattgccaacaatggcaccgtgcctggctgccctgccaagaagaacgtgtgtgacagcaacacttgccacaatgggggcacttgcgtgaaccagtgggacgcgttcagctgcgagtgccccctgggctttgggggcaagagctgcgcccaggaaatggccaatccacagcacttcctgggcagcagcctggtggcctggcatggcctctcgctgcccatctcccaaccctggtacctcagcctcatgttccgcacgcgccaggccgacggtgtcctgctgcaggccatcaccagggggcgcagcaccatcaccctacagctacgagagggccacgtgatgctgagcgtggagggcacagggcttcaggcctcctctctccgtctggagccaggccgggccaatgacggtgactggcaccatgcacagctggcactgggagccagcggggggcctggccatgccattctgtccttcgattatgggcagcagagagcagagggcaacctgggcccccggctgcatggtctgcacctgagcaacataacagtgggcggaatacctgggccagccggcggtgtggcccgtggctttcggggctgtttgcagggtgtgcgggtgagcgatacgccagagggggttaacagcctggatcccagccatggggagagcatcaacgtggagcaaggctgtagcctgcctgacccttgtgactcaaacccgtgtcctgctaacagctattgcagcaacgactgggacagctattcctgcagctgtgatccaggttactatggtgacaactgtactaatgtgtgtgacctgaacccgtgtgagcaccagtctgtgtgtacccgcaagcccagtgccccccatggctatacctgcgagtgtcccccaaattaccttgggccatactgtgagaccaggattgaccagccttgtccccgtggctggtggggacatcccacatgtggcccatgcaactgtgatgtcagcaaaggctttgacccagactgcaacaagacaagcggcgagtgccactgcaaggagaaccactaccggcccccaggcagccccacctgcctcttgtgtgactgctaccccacaggctccttgtccagagtctgtgaccctgaggatggccagtgtccatgcaagccaggtgtcatcgggcgtcagtgtgaccgctgtgacaacccttttgctgaggtcaccaccaatggctgtgaagtgaattatgacagctgcccacgagcgattgaggctgggatctggtggccccgtacccgcttcgggctgcctgctgctgctccctgtcccaaaggctcctttgggactgctgtgcgccactgtgatgagcacagggggtggctccccccaaacctcttcaactgcacgtccatcaccttctcagaactgaagggcttcgctgagcggctacagcggaatgagtcaggcctagactcagggcgctcccagcagctagccctgctcctgcgcaacgccacgcagcacacagctggctacttcggcagcgacgtcaaggtggcctaccagctggccacgcggctgctggcccacgagagcacccagcggggctttgggctgtctgccacacaggacgtgcacttcactgagaatctgctgcgggtgggcagcgccctcctggacacagccaacaagcggcactgggagctgatccagcagacagagggtggcaccgcctggctgctccagcactatgaggcctacgccagtgccctggcccagaacatgcggcacacctacctaagccccttcaccatcgtcacgcccaacattgtcatctccgtagtgcgcttggacaaagggaactttgctggggccaagctgccccgctacgaggccctgcgtggggagcagcccccggaccttgagacaacagtcattctgcctgagtctgtcttcagagagacgccccccgtggtcaggcccgcaggccccggagaggcccaggagccagaggagctggcacggcgacagcgacggcacccggagctgagccagggtgaggctgtggccagcgtcatcatctaccgcaccctggccgggctactgcctcataactatgaccctgacaagcgcagcttgagagtccccaaacgcccgatcatcaacacacccgtggtgagcatcagcgtccatgatgatgaggagcttctgccccgggccctggacaaacccgtcacggtgcagttccgcctgctggagacagaggagcggaccaagcccatctgtgtcttctggaaccattcaatcctggtcagtggcacaggtggctggtcggccagaggctgtgaagtcgtcttccgcaatgagagccacgtcagctgccagtgcaaccacatgacgagcttcgctgtgctcatggacgtttctcggcgggagaatggggagatcctgccactgaagacactgacatacgtggctctaggtgtcaccttggctgcccttctgctcaccttcttcttcctcactctcttgcgtatcctgcgctccaaccaacacggcatccgacgtaacctgacagctgccctgggcctggctcagctggtcttcctcctgggaatcaaccaggctgacctccctgtaagatgctcctactgcccagaaactgtccccaccttctcaggccgcctccccagcccccactggcaacccctgctcctgcaccatgaactctaataaggtgcctagtgcagcacctggcccagggtttcctcttctgtggctcccccgggatcccccagcacctgccttgccgggaggggtactcaccccacctaaggccatctagtgccaactccccccccaccattcccctcactgcactttggacccctggggccaacatctccaagacaaagtttttcagaaaagaggaaaaaaagaatttaaaaaaggatctccactcttcatgacttcagggattcattttttttatacgctggaaattgactcccctttcccttcccaaagaggataggacctcccaggatgcttcccagcctctcctcagtttcccatctgctgtgcctctgggaggagagggactcctggggggcctgcccctcatacgccatcaccaaaaggaaaggacaaagccacacgcagccagggcttcacacccttcaggctgcacccgggcaggcctcagaacggtgaggggccagggcaaagggtgtgtctcgtcctgcccgcactgcctctcccaggaactggaaaagccctgtccggtgagggggcagaaggactcagcgcccctggacccccaaatgctgcatgaacacattttcaggggagcctgtgcccccaggcgggggtcgggcagccccagcccctctccttttcctggactctggccgtgcgcggcagcccaggtgtttgctcagttgctgacccaaaagtgcttcatttttcgtgcccgccccgcgccccgggcaggccagtcatgtgttaagttgcgcttctttgctgtgatgtgggtgggggaggaagagtaaacacagtgctggctcggctgccctgagggtgctcaatcaagcacaggtttcaagtctgggttctggtgtccactcacccaccccaccccccaaaatcagacaaatgctactttgtctaacctgctgtggcctctgagacatgttctatttttaaccccttcttggaattggctctcttcttcaaaggaccaggtcctgttcctctttctccccgactccaccccagctccctgtgaagagagagttaatatatttgttttatttatttgctttttgcgttgggatgggttcgtgtccagtcccgggggtctgatatggccatcacaggctgggtgttcccagcagccctggcttgggggcttgacgcccttccccttgccccaggccatcatctccccacctctcctcccctctcctcagttttgccgactgcttttcatctgagtcaccatttactccaagcatgtattccagacttgtcactgactttccttctggagcaggtggctagaaaaagaggctgtgggcaggaaagaaaggctcctgtttctcatttgtgaggccagcctctggcttttctgccgtggattctccccctgtcttctcccctcagcaattcctgcaaagggttaaaaatttaactggtttttactactgatgacttgatttaaaaaaaatacaaagatgctggatgctaacttgatactaaccatcagattgtacagtttggttgttgctgtaaatatggtagcgttttgttgttgttgttttttcatgccccatactactgaataaactagttctgtgcgggtacagcaatgtcact

SEQ ID NO: 316974 - DNA, 549 bp, Homo sapiens
cacggcatccgacgtaacctgacagctgccctgggcctggctcagctggtcttcctcctgggaatcaaccaggctgacctccctgtaagatgctcctactgcccagaaactgtccccaccttctcaggccgcctccccagcccccactggcaacccctgctcctgcaccatgaactctaataaggtgcctagtgcagcacctggcccagggtttcctcttctgtggctcccccgggatcccccagcacctgcctctggcccaggcttccctggaagcagttcccaacacccaggccctcctccatgcctgacccgaagcagagcctgtgctctgggcgggccccggtcgctgacctgccctggcctgggccctcagtttgcctgcacagtcattgccatcctgctgcacttcctgtacctctgcaccttttcctgggctctgctggaggccttgcacctgtaccgggcactcactgaggtgcgcgatgtcaacaccggccccatgcgcttctactacatgctgggctggggcgtgcctgccttcatcac

SEQ ID NO: 316975 - DNA, 810 bp, Homo sapiens
cggctgtacgggccggaattatgggatctgtacttgccgccgtcccggctcacctggcggtgcccgaggagtagtcgctggagtccgcgcctccctgggactgcaatgtgccgatcttagctgctgcctgagaggatgtctggggtgtccgagcccctgagtcgagtaaagttgggcacgttacgccggcctgaaggccctgcagagcccatggtggtggtaccagtagatgtggaaaaggaggacgtgcgtatcctcaaggtctgcttctatagcaacagcttcaatcctgggaaaaacttcaaactggtcaaatgcactgtccagacggagatccgggagatcatcacctccatcctgctgagcgggcggatcgggcccaacatccggttggctgagtgctatgggctgaggctgaagcacatgaagtccgatgagatccactggctgcacccacagatgacggtgggtgaggtgcaggacaagtatgagtgtctgcacgtggaagccgagtggaggtatgaccttcaaatccgctacttgccagaagacttcatggagagcctgaaggaggacaggaccacgctgctctatttttaccaacagctccggaacgactacatgcagcgctacgccagcaaggtcagcgagggcatggccctgcagctgggctgcctggagctcaggcggttcttcaaggatatgccccacaatgcacttgacaagaagtccaacttcgagctcctagaaaaggaagtggggctgggcttgtaaaaccctcagcagacgtgcaaacagggattctctata

SEQ ID NO: 316976 - DNA, 607 bp, Homo sapiens
tgcccgcagttcccgcctcctcaggtccgggcgggtccctggccggggtagcacggaagggtctcccaggcggcgtagtagggcttccgtgttactggaaacctacttccggctgcaaatgggaaaaggagcctctaccttaaccaatccccgggaacctcaggcccgcggatgggagaaaccagagatgccaacttcctgcttccgaagtagtggctgggtcttaaagcaccgatgtttctgcattgaatagccctggaagacagaattcttgtctctccaaagatctggcagacttattcccaattataagagatccttgcaaaggaggtgtcttgcttcaccttcaccttccactgtgattgtaagttttctgaggcctcgccagccatgcagaactgaataggactcgcaacttcatagacggttgtgaagacaagctagacggcagatgaaagttcttggcacagagtgaacacttgataaactatatggcagggagggctggaacggggcttgtttgaagagcaatatgagccagggttatagacctgagtttggggtaagagtggaacatccaaatggaagagtccagcagctgaaagga

SEQ ID NO: 316977 - DNA, 449 bp, Homo sapiens
ctgcatggcctagtcctggtagtgggatggtctgaagctcccccttcttttcccacagcccacctgcctggccgagttcaagcagatcaggtccatcaggtgcctcccgctggaggagggccaggcagtacttcagctgggcattgaaggtgccccccaggccttgtccatcaaaacctcatccctagcagaggctgagaacatggctgacctcatagacggctactgccggctgcagggtgagcaccaaggctctctcatcatccatcctaggaaagatggtgagaagcggaacagcctgccccagatccccatgctaaacctggaggcccggcggtcccacctctcagagagctgcagcataggtgagctgcccgctgcatcctccaccactcctggttaatttttatttttatagaggcgggtctctctatatacctggcgaccat

SEQ ID NO: 316978 - DNA, 351 bp, Homo sapiens
agtatcttgtctggacagtgcatttgaccagtttgaagttcttcccaggattgaagctgttgctatagaagcagaccttgaggatacgcacgtcctccttttccacatctactggtacccccacccatgcccagccgacctaagtacagaccccctccgcaaaccaacctcctggctccaaagctgcagttccaggttcctgagggtctgtgtgccagctctcctacgctcaccagccctatggagtatccatctcccgttaactcactgcacacgacacatcttcaactggacactagccaaccagctggctactaaatgagcgaggctacgctaccactgactgctagc

SEQ ID NO: 316979 - DNA, 291 bp, Homo sapiens
tgcaagcctgatgcttgacctttctccccaccagctccggaacgactacatgcagcgctacgccagcaaggtcagcgagggcatggccctgcagctgggctgcctggagctcaggcggttcttcaaggatatgccccacaatgcacttgacaagaagtccaacttcgagctcctagaaaaggaagtggggctggacttgtttttcccaaagcagatgcaggagaacttaaagcccaaacagttccggaagatgatccagcaggatgatcaggacagcaggatgatcaggac

SEQ ID NO: 316980 - DNA, 187 bp, Homo sapiens
ttggggtctggacttctctcctgcctgagccactggtagtcctccaccatctgcttctgctgtttgtccaggatttgcccagccgacctaagtacagaccccctccgcaaaccaacctcctggctccaaagctgcagttccaggtaaagatagaaccagaggacgggaacttcaggtctacctctca

SEQ ID NO: 316981 - DNA, 4204 bp, Homo sapiens
aaccacaagtcaaatagaaagaagttaaaagaatgtttatgcaaacacatgagaaaagaagggtgcagatgagaataggggtgtggttaacaactcagaggaggagggagaatctaacctgtcagcccttttactcagccacagcctccggagccgttgcacacctacctgcccggccgacttacctgtacttgccgccgtcccggctcacctggcggtgcccgaggagtagtcgctggagtccgcgcctccctgggactgcaatgtgccgatcttagctgctgcctgagaggatgtctggggtgtccgagcccctgagtcgagtaaagttgggcacgttacgccggcctgaaggccctgcagagcccatggtggtggtaccagtagatgtggaaaaggaggacgtgcgtatcctcaaggtctgcttctatagcaacagcttcaatcctgggaaaaacttcaaactggtcaaatgcactgtccagacggagatccgggagatcatcacctccatcctgctgagcgggcggatcgggcccaacatccggttggctgagtgctatgggctgaggctgaagcacatgaagtccgatgagatccactggctgcacccacagatgacggtgggtgaggtgcaggacaagtatgagtgtctgcacgtggaagccgagtggaggtatgaccttcaaatccgctacttgccagaagacttcatggagagcctgaaggaggacaggaccacgctgctctatttttaccaacagctccggaacgactacatgcagcgctacgccagcaaggtcagcgagggcatggccctgcagctgggctgcctggagctcaggcggttcttcaaggatatgccccacaatgcacttgacaagaagtccaacttcgagctcctagaaaaggaagtggggctggacttgtttttcccaaagcagatgcaggagaacttaaagcccaaacagttccggaagatgatccagcagaccttccagcagtacgcctcgctcagggaggaggagtgcgtcatgaagttcttcaacactctcgccggcttcgccaacatcgaccaggagacctaccgctgtgaactcattcaaggatggaacattactgtggacctggtcattggccctaaagggatccgccagctgactagtcaggacgcaaagcccacctgcctggccgagttcaagcagatcaggtccatcaggtgcctcccgctggaggagggccaggcagtacttcagctgggcattgaaggtgccccccaggccttgtccatcaaaacctcatccctagcagaggctgagaacatggctgacctcatagacggctactgccggctgcagggtgagcaccaaggctctctcatcatccatcctaggaaagatggtgagaagcggaacagcctgccccagatccccatgctaaacctggaggcccggcggtcccacctctcagagagctgcagcatagagtcagacatctacgcagagattcccgacgaaaccctgcgaaggcccggaggtccacagtatggcattgcccgtgaagatgtggtcctgaatcgtattcttggggaaggcttttttggggaggtctatgaaggtgtctacacaaatcacaaaggggagaaaatcaatgtagctgtcaagacctgcaagaaagactgcactctggacaacaaggagaagttcatgagcgaggcagtgatcatgaagaacctcgaccacccgcacatcgtgaagctgatcggcatcattgaagaggagcccacctggatcatcatggaattgtatccctatggggagctgggccactacctggagcggaacaagaactccctgaaggtgctcaccctcgtgctgtactcactgcagatatgcaaagccatggcctacctggagagcatcaactgcgtgcacagggacattgctgtccggaacatcctggtggcctcccctgagtgtgtgaagctgggggactttggtctttcccggtacattgaggacgaggactattacaaagcctctgtgactcgtctccccatcaaatggatgtccccagagtccattaacttccgacgcttcacgacagccagtgacgtctggatgttcgccgtgtgcatgtgggagatcctgagctttgggaagcagcccttcttctggctggagaacaaggatgtcatcggggtgctggagaaaggagaccggctgcccaagcctgatctctgtccaccggtcctttataccctcatgacccgctgctgggactacgaccccagtgaccggccccgcttcaccgagctggtgtgcagcctcagtgacgtttatcagatggagaaggacattgccatggagcaagagaggaatgctcgctaccgaacccccaaaatcttggagcccacagccttccaggaacccccacccaagcccagccgacctaagtacagaccccctccgcaaaccaacctcctggctccaaagctgcagttccaggttcctgagggtctgtgtgccagctctcctacgctcaccagccctatggagtatccatctcccgttaactcactgcacaccccacctctccaccggcacaatgtcttcaaacgccacagcatgcgggaggaggacttcatccaacccagcagccgagaagaggcccagcagctgtgggaggctgaaaaggtcaaaatgcggcaaatcctggacaaacagcagaagcagatggtggaggactaccagtggctcaggcaggaggagaagtccctggaccccatggtttatatgaatgataagtccccattgacgccagagaaggaggtcggctacctggagttcacagggcccccacagaagcccccgaggctgggcgcacagtccatccagcccacagctaacctggaccggaccgatgacctggtgtacctcaatgtcatggagctggtgcgggccgtgctggagctcaagaatgagctctgtcagctgccccccgagggctacgtggtggtggtgaagaatgtggggctgaccctgcggaagctcatcgggagcgtggatgatctcctgccttccttgccgtcatcttcacggacagagatcgagggcacccagaaactgctcaacaaagacctggcagagctcatcaacaagatgcggctggcgcagcagaacgccgtgacctccctgagtgaggagtgcaagaggcagatgctgacggcttcacacaccctggctgtggacgccaagaacctgctcgacgctgtggaccaggccaaggttctggccaatctggcccacccacctgcagagtgacggagggtgggggccacctgcctgcgtcttccgcccctgcctgccatgtacctcccctgccttgctgttggtcatgtgggtcttccagggagaaggccaaggggagtcaccttcccttgccactttgcacgacgccctctccccacccctacccctggctgtactgctcaggctgcagctggacagaggggactctgggctatggacacagggtgacggtgacaaagatggctcagagggggactgctgctgcctggccactgctccctaagccagcctggtccatgcagggggctcctgggggtggggaggtgtcacatggtgcccctagctttatatatggacatggcaggccgatttgggaaccaagctattcctttcccttcctcttcggccctcagatgtcccttgatgcacagagaagctggggaggagctttgttttgggggtcaggcagccagtgagatgagggatgggcctggcattcttgtacagtgtatattgaaatttatttaatgtgagtttggtctggactgacagcatgtgccctcctgagggaggacctggggcacagtccaggaacaagctaattgggagtccaggcacaggatgctgtgttgtcaacaaaccaagcatcagggggaagaagcagagagatgcggccaagataggaccttgggccaaatccgctctcttcctgcccctctttctctttcttcctttactttcccttgcttttccctcttttcttactcctcctctttctctccccaacccccattctcatctgcacccttcttttctcatgtgtttgcataaacattcttttaacttctttctatttgacttgtggttgaattaaaattgtcccatttgctttg

SEQ ID NO: 316982 - DNA, 4018 bp, Homo sapiens
cggtacaggtaagtcggccgggcaggtaggggtgcccgaggagtagtcgctggagtccgcgcctccctgggactgcaatgtgccgatcttagctgctgcctgagaggatgtctggggtgtccgagcccctgagtcgagtaaagttgggcacgttacgccggcctgaaggccctgcagagcccatggtggtggtaccagtagatgtggaaaaggaggacgtgcgtatcctcaaggtctgcttctatagcaacagcttcaatcctgggaaaaacttcaaactggtcaaatgcactgtccagacggagatccgggagatcatcacctccatcctgctgagcgggcggatcgggcccaacatccggttggctgagtgctatgggctgaggctgaagcacatgaagtccgatgagatccactggctgcacccacagatgacggtgggtgaggtgcaggacaagtatgagtgtctgcacgtggaagccgagtggaggtatgaccttcaaatccgctacttgccagaagacttcatggagagcctgaaggaggacaggaccacgctgctctatttttaccaacagctccggaacgactacatgcagcgctacgccagcaaggtcagcgagggcatggccctgcagctgggctgcctggagctcaggcggttcttcaaggatatgccccacaatgcacttgacaagaagtccaacttcgagctcctagaaaaggaagtggggctggacttgtttttcccaaagcagatgcaggagaacttaaagcccaaacagttccggaagatgatccagcagaccttccagcagtacgcctcgctcagggaggaggagtgcgtcatgaagttcttcaacactctcgccggcttcgccaacatcgaccaggagacctaccgctgtgaactcattcaaggatggaacattactgtggacctggtcattggccctaaagggatccgccagctgactagtcaggacgcaaagcccacctgcctggccgagttcaagcagatcaggtccatcaggtgcctcccgctggaggagggccaggcagtacttcagctgggcattgaaggtgccccccaggccttgtccatcaaaacctcatccctagcagaggctgagaacatggctgacctcatagacggctactgccggctgcagggtgagcaccaaggctctctcatcatccatcctaggaaagatggtgagaagcggaacagcctgccccagatccccatgctaaacctggaggcccggcggtcccacctctcagagagctgcagcatagagtcagacatctacgcagagattcccgacgaaaccctgcgaaggcccggaggtccacagtatggcattgcccgtgaagatgtggtcctgaatcgtattcttggggaaggcttttttggggaggtctatgaaggtgtctacacaaatcacaaaggggagaaaatcaatgtagctgtcaagacctgcaagaaagactgcactctggacaacaaggagaagttcatgagcgaggcagtgatcatgaagaacctcgaccacccgcacatcgtgaagctgatcggcatcattgaagaggagcccacctggatcatcatggaattgtatccctatggggagctgggccactacctggagcggaacaagaactccctgaaggtgctcaccctcgtgctgtactcactgcagatatgcaaagccatggcctacctggagagcatcaactgcgtgcacagggacattgctgtccggaacatcctggtggcctcccctgagtgtgtgaagctgggggactttggtctttcccggtacattgaggacgaggactattacaaagcctctgtgactcgtctccccatcaaatggatgtccccagagtccattaacttccgacgcttcacgacagccagtgacgtctggatgttcgccgtgtgcatgtgggagatcctgagctttgggaagcagcccttcttctggctggagaacaaggatgtcatcggggtgctggagaaaggagaccggctgcccaagcctgatctctgtccaccggtcctttataccctcatgacccgctgctgggactacgaccccagtgaccggccccgcttcaccgagctggtgtgcagcctcagtgacgtttatcagatggagaaggacattgccatggagcaagagaggaatgctcgctaccgaacccccaaaatcttggagcccacagccttccaggaacccccacccaagcccagccgacctaagtacagaccccctccgcaaaccaacctcctggctccaaagctgcagttccaggttcctgagggtctgtgtgccagctctcctacgctcaccagccctatggagtatccatctcccgttaactcactgcacaccccacctctccaccggcacaatgtcttcaaacgccacagcatgcgggaggaggacttcatccaacccagcagccgagaagaggcccagcagctgtgggaggctgaaaaggtcaaaatgcggcaaatcctggacaaacagcagaagcagatggtggaggactaccagtggctcaggcaggaggagaagtccctggaccccatggtttatatgaatgataagtccccattgacgccagagaaggaggtcggctacctggagttcacagggcccccacagaagcccccgaggctgggcgcacagtccatccagcccacagctaacctggaccggaccgatgacctggtgtacctcaatgtcatggagctggtgcgggccgtgctggagctcaagaatgagctctgtcagctgccccccgagggctacgtggtggtggtgaagaatgtggggctgaccctgcggaagctcatcgggagcgtggatgatctcctgccttccttgccgtcatcttcacggacagagatcgagggcacccagaaactgctcaacaaagacctggcagagctcatcaacaagatgcggctggcgcagcagaacgccgtgacctccctgagtgaggagtgcaagaggcagatgctgacggcttcacacaccctggctgtggacgccaagaacctgctcgacgctgtggaccaggccaaggttctggccaatctggcccacccacctgcagagtgacggagggtgggggccacctgcctgcgtcttccgcccctgcctgccatgtacctcccctgccttgctgttggtcatgtgggtcttccagggagaaggccaaggggagtcaccttcccttgccactttgcacgacgccctctccccacccctacccctggctgtactgctcaggctgcagctggacagaggggactctgggctatggacacagggtgacggtgacaaagatggctcagagggggactgctgctgcctggccactgctccctaagccagcctggtccatgcagggggctcctgggggtggggaggtgtcacatggtgcccctagctttatatatggacatggcaggccgatttgggaaccaagctattcctttcccttcctcttcggccctcagatgtcccttgatgcacagagaagctggggaggagctttgttttgggggtcaggcagccagtgagatgagggatgggcctggcattcttgtacagtgtatattgaaatttatttaatgtgagtttggtctggactgacagcatgtgccctcctgagggaggacctggggcacagtccaggaacaagctaattgggagtccaggcacaggatgctgtgttgtcaacaaaccaagcatcagggggaagaagcagagagatgcggccaagataggaccttgggccaaatccgctctcttcctgcccctctttctctttcttcctttactttcccttgcttttccctcttttcttactcctcctctttctctccccaacccccattctcatctgcacccttcttttctcatgtgtttgcataaacattcttttaacttctttctatttgacttgtggttgaattaaaattgtcccatttgctttg

SEQ ID NO: 316983 - DNA, 4564 bp, Homo sapiens
tgcccgcagttcccgcctcctcaggtccgggcgggtccctggccggggtagcacggaagggtctcccaggcggcgtagtagggcttccgtgttactggaaacctacttccggctgcaaatgggaaaaggagcctctaccttaaccaatccccgggaacctcaggcccgcggatgggagaaaccagagatgccaacttcctgcttccgaagtagtggctgggtcttaaagcaccgatgtttctgcattgaatagccctggaagacagaattcttgtctctccaaagatctggcagacttattcccaattataagagatccttgcaaaggaggtgtcttgcttcaccttcaccttccactgtgattgtaagttttctgaggcctcgccagccatgcagaactgaataggactcgcaacttcatagacggttgtgaagacaagctagacggcagatgaaagttcttggcacagagtgaacacttgataaactatatggcagccacagcctccggagccgttgcacacctacctgcccggccgacttacctgtacttgccgccgtcccggctcacctggcggtgcccgaggagtagtcgctggagtccgcgcctccctgggactgcaatgtgccgatcttagctgctgcctgagaggatgtctggggtgtccgagcccctgagtcgagtaaagttgggcacgttacgccggcctgaaggccctgcagagcccatggtggtggtaccagtagatgtggaaaaggaggacgtgcgtatcctcaaggtctgcttctatagcaacagcttcaatcctgggaaaaacttcaaactggtcaaatgcactgtccagacggagatccgggagatcatcacctccatcctgctgagcgggcggatcgggcccaacatccggttggctgagtgctatgggctgaggctgaagcacatgaagtccgatgagatccactggctgcacccacagatgacggtgggtgaggtgcaggacaagtatgagtgtctgcacgtggaagccgagtggaggtatgaccttcaaatccgctacttgccagaagacttcatggagagcctgaaggaggacaggaccacgctgctctatttttaccaacagctccggaacgactacatgcagcgctacgccagcaaggtcagcgagggcatggccctgcagctgggctgcctggagctcaggcggttcttcaaggatatgccccacaatgcacttgacaagaagtccaacttcgagctcctagaaaaggaagtggggctggacttgtttttcccaaagcagatgcaggagaacttaaagcccaaacagttccggaagatgatccagcagaccttccagcagtacgcctcgctcagggaggaggagtgcgtcatgaagttcttcaacactctcgccggcttcgccaacatcgaccaggagacctaccgctgtgaactcattcaaggatggaacattactgtggacctggtcattggccctaaagggatccgccagctgactagtcaggacgcaaagcccacctgcctggccgagttcaagcagatcaggtccatcaggtgcctcccgctggaggagggccaggcagtacttcagctgggcattgaaggtgccccccaggccttgtccatcaaaacctcatccctagcagaggctgagaacatggctgacctcatagacggctactgccggctgcagggtgagcaccaaggctctctcatcatccatcctaggaaagatggtgagaagcggaacagcctgccccagatccccatgctaaacctggaggcccggcggtcccacctctcagagagctgcagcatagagtcagacatctacgcagagattcccgacgaaaccctgcgaaggcccggaggtccacagtatggcattgcccgtgaagatgtggtcctgaatcgtattcttggggaaggcttttttggggaggtctatgaaggtgtctacacaaatcacaaaggggagaaaatcaatgtagctgtcaagacctgcaagaaagactgcactctggacaacaaggagaagttcatgagcgaggcagtgatcatgaagaacctcgaccacccgcacatcgtgaagctgatcggcatcattgaagaggagcccacctggatcatcatggaattgtatccctatggggagctgggccactacctggagcggaacaagaactccctgaaggtgctcaccctcgtgctgtactcactgcagatatgcaaagccatggcctacctggagagcatcaactgcgtgcacagggacattgctgtccggaacatcctggtggcctcccctgagtgtgtgaagctgggggactttggtctttcccggtacattgaggacgaggactattacaaagcctctgtgactcgtctccccatcaaatggatgtccccagagtccattaacttccgacgcttcacgacagccagtgacgtctggatgttcgccgtgtgcatgtgggagatcctgagctttgggaagcagcccttcttctggctggagaacaaggatgtcatcggggtgctggagaaaggagaccggctgcccaagcctgatctctgtccaccggtcctttataccctcatgacccgctgctgggactacgaccccagtgaccggccccgcttcaccgagctggtgtgcagcctcagtgacgtttatcagatggagaaggacattgccatggagcaagagaggaatgctcgctaccgaacccccaaaatcttggagcccacagccttccaggaacccccacccaagcccagccgacctaagtacagaccccctccgcaaaccaacctcctggctccaaagctgcagttccaggttcctgagggtctgtgtgccagctctcctacgctcaccagccctatggagtatccatctcccgttaactcactgcacaccccacctctccaccggcacaatgtcttcaaacgccacagcatgcgggaggaggacttcatccaacccagcagccgagaagaggcccagcagctgtgggaggctgaaaaggtcaaaatgcggcaaatcctggacaaacagcagaagcagatggtggaggactaccagtggctcaggcaggaggagaagtccctggaccccatggtttatatgaatgataagtccccattgacgccagagaaggaggtcggctacctggagttcacagggcccccacagaagcccccgaggctgggcgcacagtccatccagcccacagctaacctggaccggaccgatgacctggtgtacctcaatgtcatggagctggtgcgggccgtgctggagctcaagaatgagctctgtcagctgccccccgagggctacgtggtggtggtgaagaatgtggggctgaccctgcggaagctcatcgggagcgtggatgatctcctgccttccttgccgtcatcttcacggacagagatcgagggcacccagaaactgctcaacaaagacctggcagagctcatcaacaagatgcggctggcgcagcagaacgccgtgacctccctgagtgaggagtgcaagaggcagatgctgacggcttcacacaccctggctgtggacgccaagaacctgctcgacgctgtggaccaggccaaggttctggccaatctggcccacccacctgcagagtgacggagggtgggggccacctgcctgcgtcttccgcccctgcctgccatgtacctcccctgccttgctgttggtcatgtgggtcttccagggagaaggccaaggggagtcaccttcccttgccactttgcacgacgccctctccccacccctacccctggctgtactgctcaggctgcagctggacagaggggactctgggctatggacacagggtgacggtgacaaagatggctcagagggggactgctgctgcctggccactgctccctaagccagcctggtccatgcagggggctcctgggggtggggaggtgtcacatggtgcccctagctttatatatggacatggcaggccgatttgggaaccaagctattcctttcccttcctcttcggccctcagatgtcccttgatgcacagagaagctggggaggagctttgttttgggggtcaggcagccagtgagatgagggatgggcctggcattcttgtacagtgtatattgaaatttatttaatgtgagtttggtctggactgacagcatgtgccctcctgagggaggacctggggcacagtccaggaacaagctaattgggagtccaggcacaggatgctgtgttgtcaacaaaccaagcatcagggggaagaagcagagagatgcggccaagataggaccttgggccaaatccgctctcttcctgcccctctttctctttcttcctttactttcccttgcttttccctcttttcttactcctcctctttctctccccaacccccattctcatctgcacccttcttttctcatgtgtttgcataaacattcttttaacttctttctatttgacttgtggttgaattaaaattgtcccatttgctttg

SEQ ID NO: 316984 - DNA, 4113 bp, Homo sapiens
  misc_feature (4057)..(4057): n is a, c, g, or t
  misc_feature (4068)..(4068): n is a, c, g, or t
  misc_feature (4073)..(4073): n is a, c, g, or t
  misc_feature (4076)..(4076): n is a, c, g, or t
  misc_feature (4080)..(4080): n is a, c, g, or t
  misc_feature (4095)..(4095): n is a, c, g, or t
  misc_feature (4097)..(4097): n is a, c, g, or t
  misc_feature (4100)..(4101): n is a, c, g, or t
cggtacaggtaagtcggccgggcaggtaggggtgcccgaggagtagtcgctggagtccgcgcctccctgggactgcaatgtgccgatcttagctgctgcctgagaggatgtctggggtgtccgagcccctgagtcgagtaaagttgggcacgttacgccggcctgaaggccctgcagagcccatggtggtggtaccagtagatgtggaaaaggaggacgtgcgtatcctcaaggtctgcttctatagcaacagcttcaatcctgggaaaaacttcaaactggtcaaatgcactgtccagacggagatccgggagatcatcacctccatcctgctgagcgggcggatcgggcccaacatccggttggctgagtgctatgggctgaggctgaagcacatgaagtccgatgagatccactggctgcacccacagatgacggtgggtgaggtgcaggacaagtatgagtgtctgcacgtggaagccgagtggaggtatgaccttcaaatccgctacttgccagaagacttcatggagagcctgaaggaggacaggaccacgctgctctatttttaccaacagctccggaacgactacatgcagcgctacgccagcaaggtcagcgagggcatggccctgcagctgggctgcctggagctcaggcggttcttcaaggatatgccccacaatgcacttgacaagaagtccaacttcgagctcctagaaaaggaagtggggctggacttgtttttcccaaagcagatgcaggagaacttaaagcccaaacagttccggaagatgatccagcagaccttccagcagtacgcctcgctcagggaggaggagtgcgtcatgaagttcttcaacactctcgccggcttcgccaacatcgaccaggagacctaccgctgtgaactcattcaaggatggaacattactgtggacctggtcattggccctaaagggatccgccagctgactagtcaggacgcaaagcccacctgcctggccgagttcaagcagatcaggtccatcaggtgcctcccgctggaggagggccaggcagtacttcagctgggcattgaaggtgccccccaggccttgtccatcaaaacctcatccctagcagaggctgagaacatggctgacctcatagacggctactgccggctgcagggtgagcaccaaggctctctcatcatccatcctaggaaagatggtgagaagcggaacagcctgccccagatccccatgctaaacctggaggcccggcggtcccacctctcagagagctgcagcatagagtcagacatctacgcagagattcccgacgaaaccctgcgaaggcccggaggtccacagtatggcattgcccgtgaagatgtggtcctgaatcgtattcttggggaaggcttttttggggaggtctatgaaggtgtctacacaaatcacaaaggggagaaaatcaatgtagctgtcaagacctgcaagaaagactgcactctggacaacaaggagaagttcatgagcgaggcagtgatcatgaagaacctcgaccacccgcacatcgtgaagctgatcggcatcattgaagaggagcccacctggatcatcatggaattgtatccctatggggagctgggccactacctggagcggaacaagaactccctgaaggtgctcaccctcgtgctgtactcactgcagatatgcaaagccatggcctacctggagagcatcaactgcgtgcacagggacattgctgtccggaacatcctggtggcctcccctgagtgtgtgaagctgggggactttggtctttcccggtacattgaggacgaggactattacaaagcctctgtgactcgtctccccatcaaatggatgtccccagagtccattaacttccgacgcttcacgacagccagtgacgtctggatgttcgccgtgtgcatgtgggagatcctgagctttgggaagcagcccttcttctggctggagaacaaggatgtcatcggggtgctggagaaaggagaccggctgcccaagcctgatctctgtccaccggtcctttataccctcatgacccgctgctgggactacgaccccagtgaccggccccgcttcaccgagctggtgtgcagcctcagtgacgtttatcagatggagaaggacattgccatggagcaagagaggaatgctcgctaccgaacccccaaaatcttggagcccacagccttccaggaacccccacccaagcccagccgacctaagtacagaccccctccgcaaaccaacctcctggctccaaagctgcagttccaggttcctgagggtctgtgtgccagctctcctacgctcaccagccctatggagtatccatctcccgttaactcactgcacaccccacctctccaccggcacaatgtcttcaaacgccacagcatgcgggaggaggacttcatccaacccagcagccgagaagaggcccagcagctgtgggaggctgaaaaggtcaaaatgcggcaaatcctggacaaacagcagaagcagatggtggaggactaccagtggctcaggcaggaggagaagtccctggaccccatggtttatatgaatgataagtccccattgacgccagagaaggaggtcggctacctggagttcacagggcccccacagaagcccccgaggctgggcgcacagtccatccagcccacagctaacctggaccggaccgatgacctggtgtacctcaatgtcatggagctggtgcgggccgtgctggagctcaagaatgagctctgtcagctgccccccgagggctacgtggtggtggtgaagaatgtggggctgaccctgcggaagctcatcgggagcgtggatgatctcctgccttccttgccgtcatcttcacggacagagatcgagggcacccagaaactgctcaacaaagacctggcagagctcatcaacaagatgcggctggcgcagcagaacgccgtgacctccctgagtgaggagtgcaagaggcagatgctgacggcttcacacaccctggctgtggacgccaagaacctgctcgacgctgtggaccaggccaaggttctggccaatctggcccacccacctgcagagtgacggagggtgggggccacctgcctgcgtcttccgcccctgcctgccatgtacctcccctgccttgctgttggtcatgtgggtcttccagggagaaggccaaggggagtcaccttcccttgccactttgcacgacgccctctccccacccctacccctggctgtactgctcaggctgcagctggacagaggggactctgggctatggacacagggtgacggtgacaaagatggctcagagggggactgctgctgcctggccactgctccctaagccagcctggtccatgcagggggctcctgggggtggggaggtgtcacatggtgcccctagctttatatatggacatggcaggccgatttgggaaccaagctattcctttcccttcctcttcggccctcagatgtcccttgatgcacagagaagctggggaggagctttgttttgggggtcaggcagccagtgagatgagggatgggcctggcattcttgtacagtgtatattgaaatttatttaatgtgagtttggtctggactgacagcatgtgccctcctgagggaggacctggggcacagtccaggaacaagctaattgggagtccaggcacaggatgctgtgttgtcaacaaaccaagcatcagggggaagaagcagagagatgcggccaagataggaccttgggccaaatccgctctcttcctgcccctctttctctttcttcctttactttcccttgcttttccctcttttcttactcctcctctttctctccccaacccccattctcatctgcacccttcttttctcatgtgtttgcataaacattcttttaacttctttctatttgacttgtggttgaattaaaattgtcccatttgctttgaaaaaaaaaaaaaaaaaaaaaaaaaaaaaaaaaaactgngggggaatatntttgnggngggnggagaaaaagagagngnaannagaagaggggcc

SEQ ID NO: 316985 - DNA, 4074 bp, Homo sapiens
tttgagacttgtcactccctgagatccatcgtggcaccaaatgtttgccgagctccgccctgggagggaggcctgcagcctgggaactgggagacctgggtcccagtggagaggcctcaccatgtagactgcaatgtgccgatcttagctgctgcctgagaggatgtctggggtgtccgagcccctgagtcgagtaaagttgggcacgttacgccggcctgaaggccctgcagagcccatggtggtggtaccagtagatgtggaaaaggaggacgtgcgtatcctcaaggtctgcttctatagcaacagcttcaatcctgggaaaaacttcaaactggtcaaatgcactgtccagacggagatccgggagatcatcacctccatcctgctgagcgggcggatcgggcccaacatccggttggctgagtgctatgggctgaggctgaagcacatgaagtccgatgagatccactggctgcacccacagatgacggtgggtgaggtgcaggacaagtatgagtgtctgcacgtggaagccgagtggaggtatgaccttcaaatccgctacttgccagaagacttcatggagagcctgaaggaggacaggaccacgctgctctatttttaccaacagctccggaacgactacatgcagcgctacgccagcaaggtcagcgagggcatggccctgcagctgggctgcctggagctcaggcggttcttcaaggatatgccccacaatgcacttgacaagaagtccaacttcgagctcctagaaaaggaagtggggctggacttgtttttcccaaagcagatgcaggagaacttaaagcccaaacagttccggaagatgatccagcagaccttccagcagtacgcctcgctcagggaggaggagtgcgtcatgaagttcttcaacactctcgccggcttcgccaacatcgaccaggagacctaccgctgtgaactcattcaaggatggaacattactgtggacctggtcattggccctaaagggatccgccagctgactagtcaggacgcaaagcccacctgcctggccgagttcaagcagatcaggtccatcaggtgcctcccgctggaggagggccaggcagtacttcagctgggcattgaaggtgccccccaggccttgtccatcaaaacctcatccctagcagaggctgagaacatggctgacctcatagacggctactgccggctgcagggtgagcaccaaggctctctcatcatccatcctaggaaagatggtgagaagcggaacagcctgccccagatccccatgctaaacctggaggcccggcggtcccacctctcagagagctgcagcatagagtcagacatctacgcagagattcccgacgaaaccctgcgaaggcccggaggtccacagtatggcattgcccgtgaagatgtggtcctgaatcgtattcttggggaaggcttttttggggaggtctatgaaggtgtctacacaaatcacaaaggggagaaaatcaatgtagctgtcaagacctgcaagaaagactgcactctggacaacaaggagaagttcatgagcgaggcagtgatcatgaagaacctcgaccacccgcacatcgtgaagctgatcggcatcattgaagaggagcccacctggatcatcatggaattgtatccctatggggagctgggccactacctggagcggaacaagaactccctgaaggtgctcaccctcgtgctgtactcactgcagatatgcaaagccatggcctacctggagagcatcaactgcgtgcacagggacattgctgtccggaacatcctggtggcctcccctgagtgtgtgaagctgggggactttggtctttcccggtacattgaggacgaggactattacaaagcctctgtgactcgtctccccatcaaatggatgtccccagagtccattaacttccgacgcttcacgacagccagtgacgtctggatgttcgccgtgtgcatgtgggagatcctgagctttgggaagcagcccttcttctggctggagaacaaggatgtcatcggggtgctggagaaaggagaccggctgcccaagcctgatctctgtccaccggtcctttataccctcatgacccgctgctgggactacgaccccagtgaccggccccgcttcaccgagctggtgtgcagcctcagtgacgtttatcagatggagaaggacattgccatggagcaagagaggaatgctcgctaccgaacccccaaaatcttggagcccacagccttccaggaacccccacccaagcccagccgacctaagtacagaccccctccgcaaaccaacctcctggctccaaagctgcagttccaggttcctgagggtctgtgtgccagctctcctacgctcaccagccctatggagtatccatctcccgttaactcactgcacaccccacctctccaccggcacaatgtcttcaaacgccacagcatgcgggaggaggacttcatccaacccagcagccgagaagaggcccagcagctgtgggaggctgaaaaggtcaaaatgcggcaaatcctggacaaacagcagaagcagatggtggaggactaccagtggctcaggcaggaggagaagtccctggaccccatggtttatatgaatgataagtccccattgacgccagagaaggaggtcggctacctggagttcacagggcccccacagaagcccccgaggctgggcgcacagtccatccagcccacagctaacctggaccggaccgatgacctggtgtacctcaatgtcatggagctggtgcgggccgtgctggagctcaagaatgagctctgtcagctgccccccgagggctacgtggtggtggtgaagaatgtggggctgaccctgcggaagctcatcgggagcgtggatgatctcctgccttccttgccgtcatcttcacggacagagatcgagggcacccagaaactgctcaacaaagacctggcagagctcatcaacaagatgcggctggcgcagcagaacgccgtgacctccctgagtgaggagtgcaagaggcagatgctgacggcttcacacaccctggctgtggacgccaagaacctgctcgacgctgtggaccaggccaaggttctggccaatctggcccacccacctgcagagtgacggagggtgggggccacctgcctgcgtcttccgcccctgcctgccatgtacctcccctgccttgctgttggtcatgtgggtcttccagggagaaggccaaggggagtcaccttcccttgccactttgcacgacgccctctccccacccctacccctggctgtactgctcaggctgcagctggacagaggggactctgggctatggacacagggtgacggtgacaaagatggctcagagggggactgctgctgcctggccactgctccctaagccagcctggtccatgcagggggctcctgggggtggggaggtgtcacatggtgcccctagctttatatatggacatggcaggccgatttgggaaccaagctattcctttcccttcctcttcggccctcagatgtcccttgatgcacagagaagctggggaggagctttgttttgggggtcaggcagccagtgagatgagggatgggcctggcattcttgtacagtgtatattgaaatttatttaatgtgagtttggtctggactgacagcatgtgccctcctgagggaggacctggggcacagtccaggaacaagctaattgggagtccaggcacaggatgctgtgttgtcaacaaaccaagcatcagggggaagaagcagagagatgcggccaagataggaccttgggccaaatccgctctcttcctgcccctctttctctttcttcctttactttcccttgcttttccctcttttcttactcctcctctttctctccccaacccccattctcatctgcacccttcttttctcatgtgtttgcataaacattcttttaacttctttctatttgacttgtggttgaattaaaattgtcccatttgctttg

SEQ ID NO: 316986 - DNA, 3010 bp, Homo sapiens
gctagacttagacagtggcaaacctgagatgccttggatttgaaactgagatttttttttctctccctatactgattgccttttgtgtgcccatggagctgtgcggggattctagtaacgtggacctgggacctagccttcagagggagcagggtgatggctcttccctgggtctgagacagtggaacattctagacccccatttccccagcccagtccctggatcttggctgaggtgttatagatctggtgacgcctggctttagagcctgcagacactcaggttccctaggggataccaccgatctctgtgatctgcgactgttttctctgtctgtgcaggtccacagtatggcattgcccgtgaagatgtggtcctgaatcgtattcttggggaaggcttttttggggaggtctatgaaggtgtctacacaaatcacaaaggggagaaaatcaatgtagctgtcaagacctgcaagaaagactgcactctggacaacaaggagaagttcatgagcgaggcagtgatcatgaagaacctcgaccacccgcacatcgtgaagctgatcggcatcattgaagaggagcccacctggatcatcatggaattgtatccctatggggagctgggccactacctggagcggaacaagaactccctgaaggtgctcaccctcgtgctgtactcactgcagatatgcaaagccatggcctacctggagagcatcaactgcgtgcacagggacattgctgtccggaacatcctggtggcctcccctgagtgtgtgaagctgggggactttggtctttcccggtacattgaggacgaggactattacaaagcctctgtgactcgtctccccatcaaatggatgtccccagagtccattaacttccgacgcttcacgacagccagtgacgtctggatgttcgccgtgtgcatgtgggagatcctgagctttgggaagcagcccttcttctggctggagaacaaggatgtcatcggggtgctggagaaaggagaccggctgcccaagcctgatctctgtccaccggtcctttataccctcatgacccgctgctgggactacgaccccagtgaccggccccgcttcaccgagctggtgtgcagcctcagtgacgtttatcagatggagaaggacattgccatggagcaagagaggaatgctcgctaccgaacccccaaaatcttggagcccacagccttccaggaacccccacccaagcccagccgacctaagtacagaccccctccgcaaaccaacctcctggctccaaagctgcagttccaggttcctgagggtctgtgtgccagctctcctacgctcaccagccctatggagtatccatctcccgttaactcactgcacaccccacctctccaccggcacaatgtcttcaaacgccacagcatgcgggaggaggacttcatccaacccagcagccgagaagaggcccagcagctgtgggaggctgaaaaggtcaaaatgcggcaaatcctggacaaacagcagaagcagatggtggaggactaccagtggctcaggcaggaggagaagtccctggaccccatggtttatatgaatgataagtccccattgacgccagagaaggaggtcggctacctggagttcacagggcccccacagaagcccccgaggctgggcgcacagtccatccagcccacagctaacctggaccggaccgatgacctggtgtacctcaatgtcatggagctggtgcgggccgtgctggagctcaagaatgagctctgtcagctgccccccgagggctacgtggtggtggtgaagaatgtggggctgaccctgcggaagctcatcgggagcgtggatgatctcctgccttccttgccgtcatcttcacggacagagatcgagggcacccagaaactgctcaacaaagacctggcagagctcatcaacaagatgcggctggcgcagcagaacgccgtgacctccctgagtgaggagtgcaagaggcagatgctgacggcttcacacaccctggctgtggacgccaagaacctgctcgacgctgtggaccaggccaaggttctggccaatctggcccacccacctgcagagtgacggagggtgggggccacctgcctgcgtcttccgcccctgcctgccatgtacctcccctgccttgctgttggtcatgtgggtcttccagggagaaggccaaggggagtcaccttcccttgccactttgcacgacgccctctccccacccctacccctggctgtactgctcaggctgcagctggacagaggggactctgggctatggacacagggtgacggtgacaaagatggctcagagggggactgctgctgcctggccactgctccctaagccagcctggtccatgcagggggctcctgggggtggggaggtgtcacatggtgcccctagctttatatatggacatggcaggccgatttgggaaccaagctattcctttcccttcctcttcggccctcagatgtcccttgatgcacagagaagctggggaggagctttgttttgggggtcaggcagccagtgagatgagggatgggcctggcattcttgtacagtgtatattgaaatttatttaatgtgagtttggtctggactgacagcatgtgccctcctgagggaggacctggggcacagtccaggaacaagctaattgggagtccaggcacaggatgctgtgttgtcaacaaaccaagcatcagggggaagaagcagagagatgcggccaagataggaccttgggccaaatccgctctcttcctgcccctctttctctttcttcctttactttcccttgcttttccctcttttcttactcctcctctttctctccccaacccccattctcatctgcacccttcttttctcatgtgtttgcataaacattcttttaacttctttctatttgacttgtggttgaattaaaattgtcccatttgctttg

SEQ ID NO: 316987 - DNA, 1760 bp, Homo sapiens
gctggaactgcagctttggagccaggaggttggtttgcggagggggtctgtacttaggtccaggttcctgagggtctgtgtgccagctctcctacgctcaccagccctatggagtatccatctcccgttaactcactgcacaccccacctctccaccggcacaatgtcttcaaacgccacagcatgcgggaggaggacttcatccaacccagcagccgagaagaggcccagcagctgtgggaggctgaaaaggtcaaaatgcggcaaatcctggacaaacagcagaagcagatggtggaggactaccagtggctcaggcaggaggagaagtccctggaccccatggtttatatgaatgataagtccccattgacgccagagaaggaggtcggctacctggagttcacagggcccccacagaagcccccgaggctgggcgcacagtccatccagcccacagctaacctggaccggaccgatgacctggtgtacctcaatgtcatggagctggtgcgggccgtgctggagctcaagaatgagctctgtcagctgccccccgagggctacgtggtggtggtgaagaatgtggggctgaccctgcggaagctcatcgggagcgtggatgatctcctgccttccttgccgtcatcttcacggacagagatcgagggcacccagaaactgctcaacaaagacctggcagagctcatcaacaagatgcggctggcgcagcagaacgccgtgacctccctgagtgaggagtgcaagaggcagatgctgacggcttcacacaccctggctgtggacgccaagaacctgctcgacgctgtggaccaggccaaggttctggccaatctggcccacccacctgcagagtgacggagggtgggggccacctgcctgcgtcttccgcccctgcctgccatgtacctcccctgccttgctgttggtcatgtgggtcttccagggagaaggccaaggggagtcaccttcccttgccactttgcacgacgccctctccccacccctacccctggctgtactgctcaggctgcagctggacagaggggactctgggctatggacacagggtgacggtgacaaagatggctcagagggggactgctgctgcctggccactgctccctaagccagcctggtccatgcagggggctcctgggggtggggaggtgtcacatggtgcccctagctttatatatggacatggcaggccgatttgggaaccaagctattcctttcccttcctcttcggccctcagatgtcccttgatgcacagagaagctggggaggagctttgttttgggggtcaggcagccagtgagatgagggatgggcctggcattcttgtacagtgtatattgaaatttatttaatgtgagtttggtctggactgacagcatgtgccctcctgagggaggacctggggcacagtccaggaacaagctaattgggagtccaggcacaggatgctgtgttgtcaacaaaccaagcatcagggggaagaagcagagagatgcggccaagataggaccttgggccaaatccgctctcttcctgcccctctttctctttcttcctttactttcccttgcttttccctcttttcttactcctcctctttctctccccaacccccattctcatctgcacccttcttttctcatgtgtttgcataaacattcttttaacttctttctatttgacttgtggttgaattaaaattgtcccatttgctttg

SEQ ID NO: 316988 - DNA, 2033 bp, Homo sapiens
taaccacatcagtcagtctgtaatgcaactgaaacaactattttttgaagagtcctgaaggaagagccctggtctcagtgggtccgtaaccagcatggaccccactgtgtgcagagcatcttgggggaatgttggatgaatgagaggctgcgctgctccaccatctctctcggagcaatggaaggcccacgttttgttctttattaactcctggagagcaagccccattccctgtggtgctcatgcatagtttctttgtgctcgtgtttgtagcagctaattgtctaccttctcgctttgtcccgtgccttgtgcttctttgcttttcctgaataggttcctgagggtctgtgtgccagctctcctacgctcaccagccctatggagtatccatctcccgttaactcactgcacaccccacctctccaccggcacaatgtcttcaaacgccacagcatgcgggaggaggacttcatccaacccagcagccgagaagaggcccagcagctgtgggaggctgaaaaggtcaaaatgcggcaaatcctggacaaacagcagaagcagatggtggaggactaccagtggctcaggcaggaggagaagtccctggaccccatggtttatatgaatgataagtccccattgacgccagagaaggaggtcggctacctggagttcacagggcccccacagaagcccccgaggctgggcgcacagtccatccagcccacagctaacctggaccggaccgatgacctggtgtacctcaatgtcatggagctggtgcgggccgtgctggagctcaagaatgagctctgtcagctgccccccgagggctacgtggtggtggtgaagaatgtggggctgaccctgcggaagctcatcgggagcgtggatgatctcctgccttccttgccgtcatcttcacggacagagatcgagggcacccagaaactgctcaacaaagacctggcagagctcatcaacaagatgcggctggcgcagcagaacgccgtgacctccctgagtgaggagtgcaagaggcagatgctgacggcttcacacaccctggctgtggacgccaagaacctgctcgacgctgtggaccaggccaaggttctggccaatctggcccacccacctgcagagtgacggagggtgggggccacctgcctgcgtcttccgcccctgcctgccatgtacctcccctgccttgctgttggtcatgtgggtcttccagggagaaggccaaggggagtcaccttcccttgccactttgcacgacgccctctccccacccctacccctggctgtactgctcaggctgcagctggacagaggggactctgggctatggacacagggtgacggtgacaaagatggctcagagggggactgctgctgcctggccactgctccctaagccagcctggtccatgcagggggctcctgggggtggggaggtgtcacatggtgcccctagctttatatatggacatggcaggccgatttgggaaccaagctattcctttcccttcctcttcggccctcagatgtcccttgatgcacagagaagctggggaggagctttgttttgggggtcaggcagccagtgagatgagggatgggcctggcattcttgtacagtgtatattgaaatttatttaatgtgagtttggtctggactgacagcatgtgccctcctgagggaggacctggggcacagtccaggaacaagctaattgggagtccaggcacaggatgctgtgttgtcaacaaaccaagcatcagggggaagaagcagagagatgcggccaagataggaccttgggccaaatccgctctcttcctgcccctctttctctttcttcctttactttcccttgcttttccctcttttcttactcctcctctttctctccccaacccccattctcatctgcacccttcttttctcatgtgtttgcataaacattcttttaacttctttctatttgacttgtggttgaattaaaattgtcccatttgctttg

SEQ ID NO: 316989 - DNA, 1629 bp, Homo sapiens
agagctggggcaccactgcaatccccccatcttgctgggactttgcctttttcttcctataaaagggacaacagtgctgtccctgactactgcaaaaccagggagaccaggaggttccttcccctgcccgcttcctggattcagagttaatttccctgaagtctcctggtggtagaggggaaggggctcatttgatgtcagcaggtacgaagggaagggttggagtgctgagaactgccccccacttgctgttctttttattgcagtggagttcacagggcccccacagaagcccccgaggctgggcgcacagtccatccagcccacagctaacctggaccggaccgatgacctggtgtacctcaatgtcatggagctggtgcgggccgtgctggagctcaagaatgagctctgtcagctgccccccgagggctacgtggtggtggtgaagaatgtggggctgaccctgcggaagctcatcgggagcgtggatgatctcctgccttccttgccgtcatcttcacggacagagatcgagggcacccagaaactgctcaacaaagacctggcagagctcatcaacaagatgcggctggcgcagcagaacgccgtgacctccctgagtgaggagtgcaagaggcagatgctgacggcttcacacaccctggctgtggacgccaagaacctgctcgacgctgtggaccaggccaaggttctggccaatctggcccacccacctgcagagtgacggagggtgggggccacctgcctgcgtcttccgcccctgcctgccatgtacctcccctgccttgctgttggtcatgtgggtcttccagggagaaggccaaggggagtcaccttcccttgccactttgcacgacgccctctccccacccctacccctggctgtactgctcaggctgcagctggacagaggggactctgggctatggacacagggtgacggtgacaaagatggctcagagggggactgctgctgcctggccactgctccctaagccagcctggtccatgcagggggctcctgggggtggggaggtgtcacatggtgcccctagctttatatatggacatggcaggccgatttgggaaccaagctattcctttcccttcctcttcggccctcagatgtcccttgatgcacagagaagctggggaggagctttgttttgggggtcaggcagccagtgagatgagggatgggcctggcattcttgtacagtgtatattgaaatttatttaatgtgagtttggtctggactgacagcatgtgccctcctgagggaggacctggggcacagtccaggaacaagctaattgggagtccaggcacaggatgctgtgttgtcaacaaaccaagcatcagggggaagaagcagagagatgcggccaagataggaccttgggccaaatccgctctcttcctgcccctctttctctttcttcctttactttcccttgcttttccctcttttcttactcctcctctttctctccccaacccccattctcatctgcacccttcttttctcatgtgtttgcataaacattcttttaacttctttctatttgacttgtggttgaattaaaattgtcccatttgctttg

SEQ ID NO: 316990 - DNA, 1447 bp, Homo sapiens
gagtatctaagatcccggaggaggtctcgtcctggaacccatgtgtttatatgaatgatacgtcccattgacgcagagaagaagtccgtaattgagttaagggcccaaagaagcccgaggtgggggcacagtccatccagcccacagctaacctggaccggaccgatgacctggtgtacctcaatgtcatggagctggtgcgggccgtgctggagctcaagaatgagctctgtcagctgccccccgagggctacgtggtggtggtgaagaatgtggggctgaccctgcggaagctcatcgggagcgtggatgatctcctgccttccttgccgtcatcttcacggacagagatcgagggcacccagaaactgctcaacaaagacctggcagagctcatcaacaagatgcggctggcgcagcagaacgccgtgacctccctgagtgaggagtgcaagaggcagatgctgacggcttcacacaccctggctgtggacgccaagaacctgctcgacgctgtggaccaggccaaggttctggccaatctggcccacccacctgcagagtgacggagggtgggggccacctgcctgcgtcttccgcccctgcctgccatgtacctcccctgccttgctgttggtcatgtgggtcttccagggagaaggccaaggggagtcaccttcccttgccactttgcacgacgccctctccccacccctacccctggctgtactgctcaggctgcagctggacagaggggactctgggctatggacacagggtgacggtgacaaagatggctcagagggggactgctgctgcctggccactgctccctaagccagcctggtccatgcagggggctcctgggggtggggaggtgtcacatggtgcccctagctttatatatggacatggcaggccgatttgggaaccaagctattcctttcccttcctcttcggccctcagatgtcccttgatgcacagagaagctggggaggagctttgttttgggggtcaggcagccagtgagatgagggatgggcctggcattcttgtacagtgtatattgaaatttatttaatgtgagtttggtctggactgacagcatgtgccctcctgagggaggacctggggcacagtccaggaacaagctaattgggagtccaggcacaggatgctgtgttgtcaacaaaccaagcatcagggggaagaagcagagagatgcggccaagataggaccttgggccaaatccgctctcttcctgcccctctttctctttcttcctttactttcccttgcttttccctcttttcttactcctcctctttctctccccaacccccattctcatctgcacccttcttttctcatgtgtttgcataaacattcttttaacttctttctatttgacttgtggttgaattaaaattgtcccatttgctttg

SEQ ID NO: 316991 - DNA, 1158 bp, Homo sapiens
gggctaggtacgaggcctgggtgttgatcctgccttcctgccgtcatcttcacggacagagatcgagggcacccagaaactgctcaacaaagacctggcagagctcatcaacaagatgcggctggcgcagcagaacgccgtgacctccctgagtgaggagtgcaagaggcagatgctgacggcttcacacaccctggctgtggacgccaagaacctgctcgacgctgtggaccaggccaaggttctggccaatctggcccacccacctgcagagtgacggagggtgggggccacctgcctgcgtcttccgcccctgcctgccatgtacctcccctgccttgctgttggtcatgtgggtcttccagggagaaggccaaggggagtcaccttcccttgccactttgcacgacgccctctccccacccctacccctggctgtactgctcaggctgcagctggacagaggggactctgggctatggacacagggtgacggtgacaaagatggctcagagggggactgctgctgcctggccactgctccctaagccagcctggtccatgcagggggctcctgggggtggggaggtgtcacatggtgcccctagctttatatatggacatggcaggccgatttgggaaccaagctattcctttcccttcctcttcggccctcagatgtcccttgatgcacagagaagctggggaggagctttgttttgggggtcaggcagccagtgagatgagggatgggcctggcattcttgtacagtgtatattgaaatttatttaatgtgagtttggtctggactgacagcatgtgccctcctgagggaggacctggggcacagtccaggaacaagctaattgggagtccaggcacaggatgctgtgttgtcaacaaaccaagcatcagggggaagaagcagagagatgcggccaagataggaccttgggccaaatccgctctcttcctgcccctctttctctttcttcctttactttcccttgcttttccctcttttcttactcctcctctttctctccccaacccccattctcatctgcacccttcttttctcatgtgtttgcataaacattcttttaacttctttctatttgacttgtggttgaattaaaattgtcccatttgctttg

SEQ ID NO: 316992 - DNA, 3543 bp, Homo sapiens
tgcccgcagttcccgcctcctcaggtccgggcgggtccctggccggggtagcacggaagggtctcccaggcggcgtagtagggcttccgtgttactggaaacctacttccggctgcaaatgggaaaaggagcctctaccttaaccaatccccgggaacctcaggcccgcggatgggagaaaccagagatgccaacttcctgcttccgaagtagtggctgggtcttaaagcaccgatgtttctgcattgaatagccctggaagacagaattcttgtctctccaaagatctggcagacttattcccaattataagagatccttgcaaaggaggtgtcttgcttcaccttcaccttccactgtgattgtaagttttctgaggcctcgccagccatgcagaactgaataggactcgcaacttcatagacggttgtgaagacaagctagacggcagatgaaagttcttggcacagagtgaacacttgataaactatatggcagccacagcctccggagccgttgcacacctacctgcccggccgacttacctgtacttgccgccgtcccggctcacctggcggtgcccgaggagtagtcgctggagtccgcgcctccctgggactgcaatgtgccgatcttagctgctgcctgagaggatgtctggggtgtccgagcccctgagtcgagtaaagttgggcacgttacgccggcctgaaggccctgcagagcccatggtggtggtaccagtagatgtggaaaaggaggacgtgcgtatcctcaaggtctgcttctatagcaacagcttcaatcctgggaaaaacttcaaactggtcaaatgcactgtccagacggagatccgggagatcatcacctccatcctgctgagcgggcggatcgggcccaacatccggttggctgagtgctatgggctgaggctgaagcacatgaagtccgatgagatccactggctgcacccacagatgacggtgggtgaggtgcaggacaagtatgagtgtctgcacgtggaagccgagtggaggtatgaccttcaaatccgctacttgccagaagacttcatggagagcctgaaggaggacaggaccacgctgctctatttttaccaacagctccggaacgactacatgcagcgctacgccagcaaggtcagcgagggcatggccctgcagctgggctgcctggagctcaggcggttcttcaaggatatgccccacaatgcacttgacaagaagtccaacttcgagctcctagaaaaggaagtggggctggacttgtttttcccaaagcagatgcaggagaacttaaagcccaaacagttccggaagatgatccagcagaccttccagcagtacgcctcgctcagggaggaggagtgcgtcatgaagttcttcaacactctcgccggcttcgccaacatcgaccaggagacctaccgctgtgaactcattcaaggatggaacattactgtggacctggtcattggccctaaagggatccgccagctgactagtcaggacgcaaagcccacctgcctggccgagttcaagcagatcaggtccatcaggtgcctcccgctggaggagggccaggcagtacttcagctgggcattgaaggtgccccccaggccttgtccatcaaaacctcatccctagcagaggctgagaacatggctgacctcatagacggctactgccggctgcagggtgagcaccaaggctctctcatcatccatcctaggaaagatggtgagaagcggaacagcctgccccagatccccatgctaaacctggaggcccggcggtcccacctctcagagagctgcagcatagagtcagacatctacgcagagattcccgacgaaaccctgcgaaggcccggaggtccacagtatggcattgcccgtgaagatgtggtcctgaatcgtattcttggggaaggcttttttggggaggtctatgaaggtgtctacacaaatcacaaaggggagaaaatcaatgtagctgtcaagacctgcaagaaagactgcactctggacaacaaggagaagttcatgagcgaggcagtgatcatgaagaacctcgaccacccgcacatcgtgaagctgatcggcatcattgaagaggagcccacctggatcatcatggaattgtatccctatggggagctgggccactacctggagcggaacaagaactccctgaaggtgctcaccctcgtgctgtactcactgcagatatgcaaagccatggcctacctggagagcatcaactgcgtgcacagggacattgctgtccggaacatcctggtggcctcccctgagtgtgtgaagctgggggactttggtctttcccggtacattgaggacgaggactattacaaagcctctgtgactcgtctccccatcaaatggatgtccccagagtccattaacttccgacgcttcacgacagccagtgacgtctggatgttcgccgtgtgcatgtgggagatcctgagctttgggaagcagcccttcttctggctggagaacaaggatgtcatcggggtgctggagaaaggagaccggctgcccaagcctgatctctgtccaccggtcctttataccctcatgacccgctgctgggactacgaccccagtgaccggccccgcttcaccgagctggtgtgcagcctcagtgacgtttatcagatggagaaggacattgccatggagcaagagaggaatgctcgctaccgaacccccaaaatcttggagcccacagccttccaggaacccccacccaagcccagccgacctaagtacagaccccctccgcaaaccaacctcctggctccaaagctgcagttccaggttcctgagggtctgtgtgccagctctcctacgctcaccagccctatggagtatccatctcccgttaactcactgcacaccccacctctccaccggcacaatgtcttcaaacgccacagcatgcgggaggaggacttcatccaacccagcagccgagaagaggcccagcagctgtgggaggctgaaaaggtcaaaatgcggcaaatcctggacaaacagcagaagcagatggtggaggactaccagtggctcaggcaggaggagaagtccctggaccccatggtttatatgaatgataagtccccattgacgccagagaaggaggtcggctaccgtgagtgttcccgcccttcttcggggggtttcctcttggcaccttgtgcagagccaccatccttgcccaccgcccagggcagggagcagcggagtctgtctgcattccctgcagcatcggccatgatttaattcagagcatgtggggcaggccagcttcccctccgctccctccaccccattcctctccctgcctagcaccctgcccttctctctctcagtggccacatccttaggcccctcctcagatcatccccctcctgcattagtttggaggagctggaaattctctcttcctcatttcctgctctgttggaagctcccgtgggaaaagttaagcagt

SEQ ID NO: 316993 - DNA, 2408 bp, Homo sapiens
tgcccgcagttcccgcctcctcaggtccgggcgggtccctggccggggtagcacggaagggtctcccaggcggcgtagtagggcttccgtgttactggaaacctacttccggctgcaaatgggaaaaggagcctctaccttaaccaatccccgggaacctcaggcccgcggatgggagaaaccagagatgccaacttcctgcttccgaagtagtggctgggtcttaaagcaccgatgtttctgcattgaatagccctggaagacagaattcttgtctctccaaagatctggcagacttattcccaattataagagatccttgcaaaggaggtgtcttgcttcaccttcaccttccactgtgattgtaagttttctgaggcctcgccagccatgcagaactgaataggactcgcaacttcatagacggttgtgaagacaagctagacggcagatgaaagttcttggcacagagtgaacacttgataaactatatggcagccacagcctccggagccgttgcacacctacctgcccggccgacttacctgtacttgccgccgtcccggctcacctggcggtgcccgaggagtagtcgctggagtccgcgcctccctgggactgcaatgtgccgatcttagctgctgcctgagaggatgtctggggtgtccgagcccctgagtcgagtaaagttgggcacgttacgccggcctgaaggccctgcagagcccatggtggtggtaccagtagatgtggaaaaggaggacgtgcgtatcctcaaggtctgcttctatagcaacagcttcaatcctgggaaaaacttcaaactggtcaaatgcactgtccagacggagatccgggagatcatcacctccatcctgctgagcgggcggatcgggcccaacatccggttggctgagtgctatgggctgaggctgaagcacatgaagtccgatgagatccactggctgcacccacagatgacggtgggtgaggtgcaggacaagtatgagtgtctgcacgtggaagccgagtggaggtatgaccttcaaatccgctacttgccagaagacttcatggagagcctgaaggaggacaggaccacgctgctctatttttaccaacagctccggaacgactacatgcagcgctacgccagcaaggtcagcgagggcatggccctgcagctgggctgcctggagctcaggcggttcttcaaggatatgccccacaatgcacttgacaagaagtccaacttcgagctcctagaaaaggaagtggggctggacttgtttttcccaaagcagatgcaggagaacttaaagcccaaacagttccggaagatgatccagcagaccttccagcagtacgcctcgctcagggaggaggagtgcgtcatgaagttcttcaacactctcgccggcttcgccaacatcgaccaggagacctaccgctgtgaactcattcaaggatggaacattactgtggacctggtcattggccctaaagggatccgccagctgactagtcaggacgcaaagcccacctgcctggccgagttcaagcagatcaggtccatcaggtgcctcccgctggaggagggccaggcagtacttcagctgggcattgaaggtgccccccaggccttgtccatcaaaacctcatccctagcagaggctgagaacatggctgacctcatagacggctactgccggctgcagggtgagcaccaaggctctctcatcatccatcctaggaaagatggtgagaagcggaacagcctgccccagatccccatgctaaacctggaggcccggcggtcccacctctcagagagctgcagcatagagtcagacatctacgcagagattcccgacgaaaccctgcgaaggcccggaggtccacagtatggcattgcccgtgaagatgtggtcctgaatcgtattcttggggaaggcttttttggggaggtctatgaaggtgtctacacaaatcacaaaggggagaaaatcaatgtagctgtcaagacctgcaagaaagactgcactctggacaacaaggagaagttcatgagcgaggcagtgatcatgaagaacctcgaccacccgcacatcgtgaagctgatcggcatcattgaagaggagcccacctggatcatcatggaattgtatccctatggggagctgggccactacctggagcggaacaagaactccctgaaggtgctcaccctcgtgctgtactcactgcagatatgcaaagccatggcctacctggagagcatcaactgcgtgcacaggtaggggtggagggagtggccagcggtatggaagccaggccttcaccagatcctcaaggcctctgggtagaagcagggcttgtgggtgacacagagcagtgttggaatccca

SEQ ID NO: 316994 - DNA, 2335 bp, Homo sapiens
  misc_feature (1913)..(1913): n is a, c, g, or t
  misc_feature (1919)..(1919): n is a, c, g, or t
tgcccgcagttcccgcctcctcaggtccgggcgggtccctggccggggtagcacggaagggtctcccaggcggcgtagtagggcttccgtgttactggaaacctacttccggctgcaaatgggaaaaggagcctctaccttaaccaatccccgggaacctcaggcccgcggatgggagaaaccagagatgccaacttcctgcttccgaagtagtggctgggtcttaaagcaccgatgtttctgcattgaatagccctggaagacagaattcttgtctctccaaagatctggcagacttattcccaattataagagatccttgcaaaggaggtgtcttgcttcaccttcaccttccactgtgattgtaagttttctgaggcctcgccagccatgcagaactgaataggactcgcaacttcatagacggttgtgaagacaagctagacggcagatgaaagttcttggcacagagtgaacacttgataaactatatggcagccacagcctccggagccgttgcacacctacctgcccggccgacttacctgtacttgccgccgtcccggctcacctggcggtgcccgaggagtagtcgctggagtccgcgcctccctgggactgcaatgtgccgatcttagctgctgcctgagaggatgtctggggtgtccgagcccctgagtcgagtaaagttgggcacgttacgccggcctgaaggccctgcagagcccatggtggtggtaccagtagatgtggaaaaggaggacgtgcgtatcctcaaggtctgcttctatagcaacagcttcaatcctgggaaaaacttcaaactggtcaaatgcactgtccagacggagatccgggagatcatcacctccatcctgctgagcgggcggatcgggcccaacatccggttggctgagtgctatgggctgaggctgaagcacatgaagtccgatgagatccactggctgcacccacagatgacggtgggtgaggtgcaggacaagtatgagtgtctgcacgtggaagccgagtggaggtatgaccttcaaatccgctacttgccagaagacttcatggagagcctgaaggaggacaggaccacgctgctctatttttaccaacagctccggaacgactacatgcagcgctacgccagcaaggtcagcgagggcatggccctgcagctgggctgcctggagctcaggcggttcttcaaggatatgccccacaatgcacttgacaagaagtccaacttcgagctcctagaaaaggaagtggggctggacttgtttttcccaaagcagatgcaggagaacttaaagcccaaacagttccggaagatgatccagcagaccttccagcagtacgcctcgctcagggaggaggagtgcgtcatgaagttcttcaacactctcgccggcttcgccaacatcgaccaggagacctaccgctgtgaactcattcaaggatggaacattactgtggacctggtcattggccctaaagggatccgccagctgactagtcaggacgcaaagcccacctgcctggccgagttcaagcagatcaggtccatcaggtgcctcccgctggaggagggccaggcagtacttcagctgggcattgaaggtgccccccaggccttgtccatcaaaacctcatccctagcagaggctgagaacatggctgacctcatagacggctactgccggctgcagggtgagcaccaaggctctctcatcatccatcctaggaaagatggtgagaagcggaacagcctgccccagatccccatgctaaacctggaggcccggcggtcccacctctcagagagctgcagcatagagtcagacatctacgcagagattcccgacgaaaccctgcgaaggcccggaggtccacagtatgcattncccgtnaagatgtggccccacccaatcaagggaagaaggaggaatgctggactggaggcccctggagccagatggcaagagggtgacagcttcctttcctgtgtgtactctgtccagttcctttagaaaaaatggatgcccagaggactcccaaccctggcttggggtcaagaaacagccagcaagagttaggggccttagggcactgggctgttgttccattgaagccgactcgtgccctggcccttacttgcttctctagctctctaggcctctccagtttgcacctgtccccaccctccactcagctgtcctgcagcaaacactccaccctccaccttccattttcccccactactgcagcacctccaggcctgttgctatagagcctacctgtatgtcaataaacaacagctgaagca

SEQ ID NO: 316995 - DNA, 1328 bp, Homo sapiens
tgcccgcagttcccgcctcctcaggtccgggcgggtccctggccggggtagcacggaagggtctcccaggcggcgtagtagggcttccgtgttactggaaacctacttccggctgcaaatgggaaaaggagcctctaccttaaccaatccccgggaacctcaggcccgcggatgggagaaaccagagatgccaacttcctgcttccgaagtagtggctgggtcttaaagcaccgatgtttctgcattgaatagccctggaagacagaattcttgtctctccaaagatctggcagacttattcccaattataagagatccttgcaaaggaggtgtcttgcttcaccttcaccttccactgtgattgtaagttttctgaggcctcgccagccatgcagaactgaataggactcgcaacttcatagacggttgtgaagacaagctagacggcagatgaaagttcttggcacagagtgaacacttgataaactatatggcagccacagcctccggagccgttgcacacctacctgcccggccgacttacctgtacttgccgccgtcccggctcacctggcggtgcccgaggagtagtcgctggagtccgcgcctccctgggactgcaatgtgccgatcttagctgctgcctgagaggatgtctggggtgtccgagcccctgagtcgagtaaagttgggcacgttacgccggcctgaaggccctgcagagcccatggtggtggtaccagtagatgtggaaaaggaggacgtgcgtatcctcaaggtctgcttctatagcaacagcttcaatcctgggaaaaacttcaaactggtcaaatgcactgtccagacggagatccgggagatcatcacctccatcctgctgagcgggcggatcgggcccaacatccggttggctgagtgctatgggctgaggctgaagcacatgaagtccgatgagatccactggctgcacccacagatgacggtgggtgaggtgcaggacaagtatgagtgtctgcacgtggaagccgagtggaggtatgaccttcaaatccgctacttgccagaagacttcatggagagcctgaaggaggacaggaccacgctgctctatttttaccaacagctccggaacgactacatgcagcgctacgccagcaaggtcagcgagggcatggccctgcagctgggctgcctggagctcaggcggttcttcaaggatatgccccacaatgcacttgacaagaagtccaacttcgagctcctagaaaaggaagtggggctgggcttgtaaaaccctcagcagacgtgcaaacagggattctctata

SEQ ID NO: 316996 - DNA, 905 bp, Homo sapiens
aaccacaagtcaaatagaaagaagttaaaagaatgtttatgcaaacacatgagaaaagaagggtgcagatgagaataggggtgtggttaacaactcagaggaggagggagaatctaacctgtcagcccttttactcagccacagcctccggagccgttgcacacctacctgcccggccgacttacctgtacttgccgccgtcccggctcacctggcggtgcccgaggagtagtcgctggagtccgcgcctccctgggactgcaatgtgccgatcttagctgctgcctgagaggatgtctggggtgtccgagcccctgagtcgagtaaagttgggcacgttacgccggcctgaaggccctgcagagcccatggtggtggtaccagtagatgtggaaaaggaggacgtgcgtatcctcaaggtctgcttctatagcaacagcttcaatcctgggaaaaacttcaaactggtcaaatgcactgtccagacggagatccgggcaaaatgccacctgcttattgcaaatagctgagggtttaaagccacttagacttctagccaagtcctgctccatccttactggttgtgtggcctgggacctaatgattaactgatctgggcttcagtctcttcacccggggatcatgctgtaaggattggagatggtggaggagaagcacaaagcacacagcagtgcccataactggaggctattgactgtgtgggtattaggttattacccagctcaggaatctccaagggcctctaattgcccagagaataaagtgcaaattgtcttcttttggtgtctatccaggtatctgtcttattttcaaataaagaagtaatatgatcagatttgtgttctaaaacaacaacatggtgttctgcaagatgttaagaagtg

SEQ ID NO: 316997 - DNA, 302 bp, Homo sapiens
aaaaagcaattcaaacctaattcttctctttcttcctcctctccacaccatactcgtctcttctcttgtgagacgagatgcggccaagataggaccttgggccaaatccgctctcttcctgcccctctttctctttcttcctttactttcccttgcttttccctcttttcttactcctcctctttctctccccaacccccattctcatctgcacccttcttttctcatgtgtttgcataaacattcttttaacttctttctatttgacttgtggttgaattaaaattgtcccatttgctttg

SEQ ID NO: 316998 - DNA, 399 bp, Homo sapiens
gcagctgtgggaggctgaaaaggtcaaaatgcggcaaatcctggacaaacagcagaagcagatggtggaggactaccagtggctcaggcaggaggagaagtccctggtgagcaccccaggaaggatgtcggtgccctgcacccatctgtgtcctcttccacctccccaggtggctggggcaagggtcccctgcattcttggtgctttcagctccagaattcttagtccttcgctcttgtttcttcctctgcaggaccccatggtttatatgaatgataagtccccattggtgagttgccaggagaggccgcctcctccatgccaaggcctgggaaggcctcgcccaccataggaccccccgcccaacttgctcctacccccaggcctgcccagctcctc

SEQ ID NO: 316999 - DNA, 512 bp, Homo sapiens
atatttttaagcaggggcaagatattcctggagttgtatgatataccctgctgggtgtttaagggatgaaagtaacacaacaggcctatggagaaggcaatgagacccaggcttaagaagaatggctttgaggcattatctggggtcggtggggaacagaggtggagaacagaagtgactgacttccaggaatatgtccaagccttctgatttttcctgcttccaatgtctcctgcaggcaaaatgccacctgcttattgcaaatagctgagggtttaaagccacttagacttctagccaagtcctgctccatccttactggttgtgtggcctgggacctaatgattaactgatctgggcttcagtctcttcacccggggatcatgctgtaaggattggagatggtggaggagaagcacaaagcacacagcagtgcccataactggaggctattgactgtgtgggtattaggttattacccagctcaggaatctccaagggcctctaattgc

SEQ ID NO: 317000 - DNA, 749 bp, Homo sapiens
gccaagctggatctataaggaattgcatatgagatggcacacatattcatgctgtctgaagattcagtcacgttaccatatcaagctgaaaatgtcaccactatctggagagttggacatgttttattgagaatgtattttttttctctggatctgttatgaacacctttgttggcttggttcagtaataaatatgtgagacttttcatttaaaaaaaaaaaaaaaaaaaaaaaaaaaaaaaaaaaaaaaaaaaaaaaaaaaaaaaaaaaaaaaaaaaaaaaaaaaaaaaaaaaaaaaaaaaaaaaagagaccccataaaccaaaaaaaatcttaaaaacccggggggccttttttggcccccgcatttttaacctacttgccctttttccccgtaccgaattcgggctaatttggccagtccccccttttaaggggttcttaaaggaaaaacgcggggggtttcaaaattagtggcttgggaaaaacctcggttttcccaattttgcgcttttggaaaaaaacccctttttgagcgctgtttcaaaaagggggagccctcaaagtgaacggttttccaagaagggccacacctttggggcacacgcggatacatgcggcaaaaattctgtaaattttcgccatagctttggtataaccaaatcttttattaccaaagggcgcaacccgtaaaatctcttttttctccacaatttctccctaatacgtttttttgttcctccctctttc

SEQ ID NO: 317001 - DNA, 1353 bp, Homo sapiens
gccaagctggatctataaggaattgcatatgagatggcacacatattcatgctgtctgaagattcagtcacgttaccatatcaagctgaaaatgtcaccactatctggagagttggacatgttttattgagaatgtattttttttctctggatctgttatgaacacctttgttggcttggttcagtaataaatatgtgagacttttcatttaaaaaaagtcaaatgacttaattctgtattttaaattctgttttgtttgttttgtttttttgagatggagtcttctgaaaattttctcatcttctctaacccggttcatgacagacccttggactttactgttgtggaaaaatctatataaaacagtatcagtgtgtcaaagcattatggctgtcacaagcttgtgaaaggaaaataaaaattactaagccaaagagaaaagtcaatctgggaactgcgtcagacaaacctgccttccattttattcctaaacaagatagttacaaagattttttaaaaagctacatatgcccctcccaaaccgggaacctcaagatctccaccctaaaatagttctgttgaatttcaccctggcgatgtaaactgagagcttatcttcacagatgtgggaaagagcccatccctctgcacacctgagtcaaatgtctatctgattgcttcccttgccctatttatgtaaaaatacagggtccctgagccagcctaaggcataagtgacttatccctcctccctgctcacatataaattgtgtatttagtgaaaggctgatcaaagattcaaagaatgttatttgttatctacctgtgacccagaagttccccaattccagttattccacctttccagaccggaccaatgtatatatgtactgattgctgtctcgtgtgtctgtaaaatgtgtgaaaccaaactgcagcctcaacaccatggacacacgtcatcaggacctcctgaggttcgtgttaattggccttagactctccctgtccccagacccaggacgcatgtgtttcctttttcttcatttctattaaagatgggtctcattctgttggccaggcatgagagcggtgacaggatcagccctcactgaagcttcaatctcctgggttcaagggatcctcccacctcagcctccaaagttgctaggaccatagccaggtgccaccgcaccgggcaaatttttgtgttcctagtagagatgggctttcaccatgttgcccgagctggtcttgaattccagggctcaagcgatccagccgtattggcctcccaaggtgctgggattacagccatgagccaccatgaccaacgtgtttcttaatttaaa

SEQ ID NO: 317002 - DNA, 687 bp, Homo sapiens
  misc_feature (58)..(59): n is a, c, g, or t
  misc_feature (62)..(62): n is a, c, g, or t
  misc_feature (67)..(67): n is a, c, g, or t
  misc_feature (72)..(72): n is a, c, g, or t
  misc_feature (75)..(75): n is a, c, g, or t
  misc_feature (651)..(651): n is a, c, g, or t
  misc_feature (657)..(657): n is a, c, g, or t
tgtcctaccactaatttaatcgatggaaaggagagttctagtctgaacgactctcttnnttnaccancgctncangatgagatgaacacttttaacaagagaacaggactctatataaatcgctgtgggctcaccacctctaaggaggagcactgactgaagacagaaaaattgatgaactgaagaagacatggtccattatgccttacaaacttacacagtgctttgggaattccaaagtactcagtggagagaggtgtttcaggagccgtagagccagatcgtcatcatgtctgcattgtggctgctgctgggcctccttgccctgatggacttgtctgaaagcagcaactggggatgctatggaaacatccaaagcctggacacccctggagcatcttgtgggattggaagacgtcacggcctgaactactgtggagttcgtgcttctgaaaggctggctgaaatagacatgccatacctcctgaaatatcaacccatgatgcaaaccattggccaaaagtactgcatggatcctgccgtgatcgctggtgtcttgtccaggaagtctcccggtgacaaaattctggtcaacatgggcgataggactagcatggtgcaggaccctggctctcaagctggaggagaaanccaccnttcaaaccaaaaaaaaaaggttttcccgta

SEQ ID NO: 317003 - DNA, 996 bp, Homo sapiens
ataatttatgagatgtcataaatctctccaaaataggatgagatgaacacttttaacaagagaacaggactctatataaatcgctgtgggctcaccacctctaaggaggagcactgactgaagacagaaaaattgatgaactgaagaagacatggtccattatgccttacaaacttacacagtgctttgggaattccaaagtactcagtggagagaggtgtttcaggagccgtagagccagatcgtcatcatgtctgcattgtggctgctgctgggcctccttgccctgatggacttgtctgaaagcagcaactggggatgctatggaaacatccaaagcctggacacccctggagcatcttgtgggattggaagacgtcacggcctgaactactgtggagttcgtgcttctgaaaggctggctgaaatagacatgccatacctcctgaaatatcaacccatgatgcaaaccattggccaaaagtactgcatggatcctgccgtgatcgctggtgtcttgtccaggaagtctcccggtgacaaaattctggtcaacatgggcgataggactagcatggtgcaggaccctggctctcaagctcccacatcctggattagtgagtctcaggtttcccagacaactgaagttctgactactagaatcaaagaaatccagaggaggtttccaacctggacccctgaccagtacctgagaggtggactctgtgcctacagtgggggtgctggctatgtccgaagcagccaggacctgagctgtgacttctgcaatgatgtccttgcacgagccaagtacctcaagagacatggcttctaacatctcagatgaaacccaagaccatgatcacatatgcagcctcaaatgttacacagataaaactagccaagggcacctgtaactgggaatctgagtttgacctaaaagtcattaaaataacatgaatcacattaaaggaagaattttgacctgcaaaataa

SEQ ID NO: 317004 - DNA, 1035 bp, Homo sapiens
  misc_feature (58)..(59): n is a, c, g, or t
  misc_feature (62)..(62): n is a, c, g, or t
  misc_feature (67)..(67): n is a, c, g, or t
  misc_feature (72)..(72): n is a, c, g, or t
  misc_feature (75)..(75): n is a, c, g, or t
tgtcctaccactaatttaatcgatggaaaggagagttctagtctgaacgactctcttnnttnaccancgctncangatgagatgaacacttttaacaagagaacaggactctatataaatcgctgtgggctcaccacctctaaggaggagcactgactgaagacagaaaaattgatgaactgaagaagacatggtccattatgccttacaaacttacacagtgctttgggaattccaaagtactcagtggagagaggtgtttcaggagccgtagagccagatcgtcatcatgtctgcattgtggctgctgctgggcctccttgccctgatggacttgtctgaaagcagcaactggggatgctatggaaacatccaaagcctggacacccctggagcatcttgtgggattggaagacgtcacggcctgaactactgtggagttcgtgcttctgaaaggctggctgaaatagacatgccatacctcctgaaatatcaacccatgatgcaaaccattggccaaaagtactgcatggatcctgccgtgatcgctggtgtcttgtccaggaagtctcccggtgacaaaattctggtcaacatgggcgataggactagcatggtgcaggaccctggctctcaagctcccacatcctggattagtgagtctcaggtttcccagacaactgaagttctgactactagaatcaaagaaatccagaggaggtttccaacctggacccctgaccagtacctgagaggtggactctgtgcctacagtgggggtgctggctatgtccgaagcagccaggacctgagctgtgacttctgcaatgatgtccttgcacgagccaagtacctcaagagacatggcttctaacatctcagatgaaacccaagaccatgatcacatatgcagcctcaaatgttacacagataaaactagccaagggcacctgtaactgggaatctgagtttgacctaaaagtcattaaaataacatgaatcacattaaaggaagaattttgacctgcaaaataa

SEQ ID NO: 317005 - DNA, 615 bp, Homo sapiens
acacagtgctttgggaattccaaagtactcagtggagagagggtgagtagaggaagatgtccccatcaaagccaccaggaacatgaggtagctcctgagggatgctctggttgtcagtttccagtgtgcctggcaggcctgttgccccagcttgttgacacccccttgctgtttgttactattttgctctctgggaagggagaagagggatgctaccataaacattgtgcttgacatcatgaccactgtgctgccttggtctgacatcttcataatggttttaagcagggagccacaggggaattaacaaatgagtcatagggaactgacagacactctttgagcacacccgagtgatgtctcaacaatctcttctaaacacagagtacttttcgtcacttgtaaagttgggccatagagtttgggttgcttcaatatgctgtatttatggacaaaatgacattgttcatccatttaagaattccaagctaggtgtggtggcttgagcctgtaaccctacctactcaggaagctgaggtggaaggatcacttgaagcctggagttcaagaccagcctgggcaacatagtgagacccatttctacataaaaactaa

SEQ ID NO: 317006 - DNA, 2080 bp, Homo sapiens
tcctgagtagctgggattatgggtgtgtgccaccatgcttggctaatttttctatttttagtagagatggggtttcaccaagttggccaggctaatcttgaactcttgacctcaggtgatctgcctgcctcggcctcccaaagtgttgggattacaggcatgagccgccacaccctgccaaaagacccatctttcaatactgccacatttgggattaagtttcaacatgaagtttggagaggacaaacatcatcatagtgggagatctaaatacacctttctaaggaactgatgaatgaaggaaacatagaagtctataaagacatagaaaatttaccaacaagcttacttaatgaccatatataatataattgtgaaatacagattcttttcaactgcacacatggaatatttatgagagtcttaaagcaagccaacaaattttagattagtaacgtagaaataatcttctttaaccgtaaagcaattaattcaggaatcaatagcgagagataaccagaaaaaccctatactttcaggaattttagaatatactgctagatacattatgagtcaaaaaaagaaaactaatgggagttagataatatttagagctgaatgataacaaaaatactagataccaatatttggaccatgcagctaaaggggtgcttagaaaaaattttgtagcataaatccttacattaagaaaggaaaaggtgacttggcatggtggcttatgcctgtaatcccagcactttgcaaggctgaggtgggaggatcgcttgaggctaggaattcaatactagcctggagaaaagaaaagaaaaagagaaagaaagcaaaagaagaagagaaaaagaaagaaaggaaggagaggtgcaagttaaggagttaattatccaatttaagaagacagaaaaaggggaagacaatacaaagatatgagcaaaaataaatgaagaaaaacaagcatataaaagagagaaggcacagcaaatgatttaggagtaaaaaagagaccacaactatagatgctgcagagattaaaccagcaaaaacaaatattgataaataattataaaaaattggaaaattttgatggaattgatatattccaagaaaaatgtcatcaaaattgaaccaagaaaatatttaaaaatctaagcagtcctttgctcattaaaggataaatcagtagttaacactttttctacaaagaaatggtgtgcctggatggtcgtgtaggtgagttttaccaaggattatggtaacaaatgagtgagacctctatggagaaaatattgaaggacattaaagaagacctcataaatggagagagatatatcattaatggataggaagcctcaatggcataagtatgtcagtttctttcaaaactcacctatggattcaatgtgattccaaaccaaatcccaacaaggtctttcctggaattggaagccagattctgaaatgtatttggaaaagtaaagaggcagggttagctatttcattaacaaagaaggaacatcaggcagggagacttgtgttattattaaggcttattataaattattattgtgatcaagatagtgtatttttggtgtagagatagttaaattggccaatggattgagccaaatttccaaaacagacccacaaataaatgaaactctaatttacaacagagacagtactgcagatcatggggggaaaggatgaactattgagggattggcaaacttttttggtaagggctagacagccttacgtggtgttcacagtgtctgttgtagttagtcacctctgctgtggtattgtaagagcagctatagacaatactgtacgtgaacaaatgatcatggatatgttctaataaaactttatgtgcattgagatttaaatttcatataattttcatgggtcatgagttattagctttctttttgtttttctcagccatttaaaatgcagaaaccattattagctactgggctgtacaaaaacgggcaaaggagaccaggcatggtggttcacacctataatcccaacactttgggaggcagaggcaggagga

SEQ ID NO: 317007 - DNA, 1983 bp, Homo sapiens
aatataaataaaatcggtacagtggtgtctgcctgtactcccaaagtgttgggattacaggcatgagccgccacaccctgccaaaagacccatctttcaatactgccacatttgggattaagtttcaacatgaagtttggagaggacaaacatcatcatagtgggagatctaaatacacctttctaaggaactgatgaatgaaggaaacatagaagtctataaagacatagaaaatttaccaacaagcttacttaatgaccatatataatataattgtgaaatacagattcttttcaactgcacacatggaatatttatgagagtcttaaagcaagccaacaaattttagattagtaacgtagaaataatcttctttaaccgtaaagcaattaattcaggaatcaatagcgagagataaccagaaaaaccctatactttcaggaattttagaatatactgctagatacattatgagtcaaaaaaagaaaactaatgggagttagataatatttagagctgaatgataacaaaaatactagataccaatatttggaccatgcagctaaaggggtgcttagaaaaaattttgtagcataaatccttacattaagaaaggaaaaggtgacttggcatggtggcttatgcctgtaatcccagcactttgcaaggctgaggtgggaggatcgcttgaggctaggaattcaatactagcctggagaaaagaaaagaaaaagagaaagaaagcaaaagaagaagagaaaaagaaagaaaggaaggagaggtgcaagttaaggagttaattatccaatttaagaagacagaaaaaggggaagacaatacaaagatatgagcaaaaataaatgaagaaaaacaagcatataaaagagagaaggcacagcaaatgatttaggagtaaaaaagagaccacaactatagatgctgcagagattaaaccagcaaaaacaaatattgataaataattataaaaaattggaaaattttgatggaattgatatattccaagaaaaatgtcatcaaaattgaaccaagaaaatatttaaaaatctaagcagtcctttgctcattaaaggataaatcagtagttaacactttttctacaaagaaatggtgtgcctggatggtcgtgtaggtgagttttaccaaggattatggtaacaaatgagtgagacctctatggagaaaatattgaaggacattaaagaagacctcataaatggagagagatatatcattaatggataggaagcctcaatggcataagtatgtcagtttctttcaaaactcacctatggattcaatgtgattccaaaccaaatcccaacaaggtctttcctggaattggaagccagattctgaaatgtatttggaaaagtaaagaggcagggttagctatttcattaacaaagaaggaacatcaggcagggagacttgtgttattattaaggcttattataaattattattgtgatcaagatagtgtatttttggtgtagagatagttaaattggccaatggattgagccaaatttccaaaacagacccacaaataaatgaaactctaatttacaacagagacagtactgcagatcatggggggaaaggatgaactattgagggattggcaaacttttttggtaagggctagacagccttacgtggtgttcacagtgtctgttgtagttagtcacctctgctgtggtattgtaagagcagctatagacaatactgtacgtgaacaaatgatcatggatatgttctaataaaactttatgtgcattgagatttaaatttcatataattttcatgggtcatgagttattagctttctttttgtttttctcagccatttaaaatgcagaaaccattattagctactgggctgtacaaaaacgggcaaaggagaccaggcatggtggttcacacctataatcccaacactttgggaggcagaggcaggagga

SEQ ID NO: 317008 - DNA, 883 bp, Homo sapiens
agaccagcactgcgatatcctgaacgtttgaagaaattacataacctgaagacagaaggttacaggaaacagcagcagcggcagcagcagcagcagcagcaacagaagaaggtgaaaacacctattaagaaacaggaggctaaaaagaaagccaagagtgatccagggatccagagcacttcacataaacatccagttaccaccgttcatgaccgtctctatggttacagaactctgccaggtcagaacagtgacatgaagcagcagcagcagatggaaaaaggaaccacttcgaaacaggattccacggagagaccaaagatgaactactatgaccatgcggatttccaccacagtgtaaaaagtcctgaattgtatgaaacagaacccactaacaaggacattagtgctccagtggacgctgtgccagaagcccaggctgccaggcaaaagaagatctcctttaacttttcagaaattatggctagcacaggctggaactctgagctcaaactacttaggattcttcaggacactgatgatgaggatgaggaggaccagtcctctggggcagagtgagaagcctctggaggaatagactgaaggcatcccctggggcagccgtgttccaaagcgggatggctggtatcctgagggcagcaacgtttcacataagggcaagaggagaggggcttctgctctctggagcctttaccagggcctgagctctgagcttagggattccattttctttgttcacctctacttgcctctaaaataaatgtaggagaaaaatccccagcctttttaaatttagattatttcctttccattagggtcagaataattttggtgattaaacacaactgcttttcaaaaaaaa

SEQ ID NO: 317009 - DNA, 171 bp, Homo sapiens
caatctgtgggttcgtcattgatacacaataacacaaaaaggcacttaagaagcttgcttattttctgtcatttgggtatgtctagcttattttcaagtaactgtgtttcacattaagtgccaacatatttttgttttaagactttgtgttaaccactagtttgacatgaa

SEQ ID NO: 317010 - DNA, 4843 bp, Homo sapiens
ccagagggcgaagtgggagggcacaggggagactaaaaaggccagggaagttggcctgccggaagttcccagggagaaggcagcgcgttgtacccgagttacctgtagtcaaccacagtctgaaaatattaaggtattttaagacagaaagagagagaggagagaaaccgcattcacaaaaaagaaatcctctttttagaacatctcttggtggtaccatcagaaatgtcttccttaagtggaaaagtccaaaccgttttgggccttgtagagccaagcaaactgggccgtaccctgacccatgaacacctggccatgacctttgactgctgttactgtccacctcccccgtgccaggaagctatttccaaagaacctatcgtgatgaaaaatttatattggattcagaaaaacgcctattcccataaagaaaaccttcaattaaatcaggagacagaagccataaaggaagaactgttgtattttaaagctaatggtggaggggctttggtggaaaacacaaccactgggattagccgagacacacagacgttgaagaggcttgcagaagagactggcgtccatatcatatctggagccgggttttatgtggatgcaactcactcctcagagaccagggccatgtcagtggagcagcttaccgatgtccttatgaatgaaattctccatggagctgatggaaccagtatcaagtgtggcattattggagaaattggttgctcctggcctttgactgagagtgaaagaaaggttctccaggccacagctcatgcccaggctcagcttggttgtcctgttattatccatcctggacggagctccagggcaccatttcagattatccgaatattgcaagaagcaggcgcagacatctccaaaacagtcatgtcacacctggataggactattcttgataagaaagagctcttggagtttgctcaacttggctgctacttggaatatgatctctttggtactgaactacttcattaccaactcggcccagatattgacatgcctgatgataacaaaagaattagaagggtgcgtctcctggtggaagagggctgtgaagatcgaattctggtagcacatgacatacatacgaaaacccggctgatgaaatatggaggtcacggctattctcatatactcaccaatgttgttcctaaaatgttgctgagaggcataactgagaatgtgcttgataagattctaatagagaaccctaagcaatggctaactttcaaataggatggttgcttatgaattcacaccttgagtataaaacttgcagagaacattcagcgatttccagtccactgtgagatattaatcagttacctaggactaatgacagatcatttccttctgatgagaactaggagggtttgccttctctgagaccagctattacaactgtgcctctagggagttactcagcctaattgagccctattattttaacttaacaaaataaatacagaagtacctatttctaaacaatgatttaaagtctatatcccctaagcggagttgttgtttttctccctaatctatcagctgcactacttgagaaaatttaaagtgtttctagttaaattatttccttcttgagcgatctaatgtttcttgtaatattgatgatcctactaattatcctgctgttctttaattaatgcttaatgaataatatggcactgtaaaatagcttctgcaacaagggaagttaaattttgagacttttttccccaaaggatactgactgtaatacaattaccaattcacaatgataaaaatattttgaaaggttaattttatactgtccacctatctatatattcttctactgaaatgattttgatatctttggctttccggtatctatttttgccatacattttgctgttttgcaaagtttgtataagaacacataacactactgaattataaaaattcaatcataaaagtcaaaatatattacataatatagtttaatgaatcattacatttataataacaaaggccacaatttaattaattggtaagatataatgcaaaaaaaaaaagagaaatgtttgccttatgtatattccctttatttcctttaccttttgtttttccttggacctaaacagagaaaataatgcttatgtatctgaagaaaaggtcagatctattggaaatgacagcccgatacttgagcctcctctttaaaaggtatccagccctgatattttgtgtaaataaaatgtttttaaaacctgttagttaaaacacttaggtgatgggcactgctgcttataaattcatcttttggttgaatcctcactatgctatttggtacctaaaaatattctccaaacccttgctgccagttcctctttgataaatatatagttaattcgaaataaaatccattgcaattcatttatgagttatcttacatatcacaaagaccaattagaattagtcattattcttgatgaagagtctgtttttaatcataaaaatcatgacagttactcagacccaggcatttcaacagagctaacaccaccttcagataggcacaccatgcataactcttgggaagttgagctttgctaaataaaagatatttctgctgatcaaagatgatcaagctttctgtgtattggaacagaaagtaacaaagaggaatgagccaggagaacaaactaattcctttaaataaataaataaaaaaaaatgcaaatgtccttcaccagtaaagcaagcaaatttttaaaatctctgtttttgaaatctactcgtcaaagagttttcagaggcaatgaaaggggaacagatttttcattgtaatagtggaagttgtgtgatagttaggagatatcaacatgcatttttaatcttttccttagatgaaagagatggcttttggcagtgtgttctaaccagaaagaaaggatttgtattactctccaaatctactgtactgtcagcttcactccacctgagaaaaaagaaaaaaaaattgatagctcaaatgcatgtaattcataaacactgcaaaggagagccacttggtgtctgcagtcctcatattaacagtctgtcacagaatgcagttaaagtattgattggcatatggtaatagagcaaccatagccttaacttacagacctgtgaaataaagggcattttgacctaatacaattaattttctggataactcttaaagagaagtcattttaactgtttttgctactccatatattgtcattcaaaatatattttaacccaaaataagttaaataatttgtgcatgtttgtgtgtgtatatatgcatacacttttttatattaaaattttgaggctatacagccactgtgccctgtggaataaagccatatatataaatgttttatatgtatatgttttatacataaataaaacatttcatctaatatatatatgtgtgtgtgagtatatgtgtgcatgtttagcagatatttgtataaaatataaacactctgttgtcatattggctatatgcgaaattgttaattttaaaataacctcaggccacagacttgtagtaatcatttgaaggcctcacctagtgtccccttggtgacgtatgcagcagctcaaattaaacctttgtgcattgggttatgaataatcttttcttccaaagatggcaaaagcctcggtttgatttgatactaaagaataaatttctctgactttcccagtgaatctaaatgtattcagttgacaaaatggacacataagggctttttctaaataccgtacataattacacattttcacacttagagggtaatcctatgatacactgtcaatctctattttaaaagactatcaccagaaaagagagaaaagaaaattcatataagaaaaagaaaatgtgaaaaagatcataggcttgggaattccctcaaatccagaaaattccaggttaaggcttgaagttgaatcattcccaggtctagctctaaggttaacaagagtacaaggcaaacaatttctttggggacaagcagcattatttcaattagaccttctcctgcagggcaaaaatcattcttccccacactatgaatggactccaagtatcataataagcaggtaaactcacaagaaccaaagctgacatatggataaaagcagcaagatcacagtacaccaaagtatcatatatatagaagaaataattcaatgtcttagatttgtctataaaaatttgtgatctatataggacttcattcacatggacactaacgataaggagtatttgctttggcggtagtggatcacacatctgcttatcttgctttgatattttttacataatgtttctgagtgatacagatgtgagtcaggtagcatttgatttccccacatatacacaactgaggtgccctgccattggcatcccctgggatccttgattcactgacgttagccatacgaatccagtgttcaaactcagaataataagcttagtttctgcattatcagtcagcataaataataaatccagaaaacgtgctgtatttgttgttgtttcctccatgggctttcccgccatctaatttgatatagacttcatctcccggctccaaatgaagaaccacactgttactggcatagtcgtaattctgatcagcatcttgggcaattgcactagcacgcactgtttttgcagagatcagcccacatgctggtgccgtcccctccgcgcatcaggacgtggtaggtgaagaagtagatgcccgggatggagcaggtgaacttgccggtggtggggtcg

SEQ ID NO: 317011 - DNA, 3757 bp, Homo sapiens
ccagagggcgaagtgggagggcacaggggagactaaaaaggccagggaagttggcctgccggaagttcccagggagaaggcagcgcgttgtacccgagttacctgtagtcaaccacagtctgaaaatattaaggtattttaagacagaaagagagagaggagagaaaccgcattcacaaaaaagaaatcctctttttagaacatctcttggtggtaccatcagaaatgtcttccttaagtggaaaagtccaaaccgttttgggccttgtagagccaagcaaactgggccgtaccctgacccatgaacacctggccatgacctttgactgctgttactgtccacctcccccgtgccaggaagctatttccaaagaacctatcgtgatgaaaaatttatattggattcagaaaaacgcctattcccataaagaaaaccttcaattaaatcaggagacagaagccataaaggaagaactgttgtattttaaagctaatggtggaggggctttggtggaaaacacaaccactgggattagccgagacacacagacgttgaagaggcttgcagaagagactggcgtccatatcatatctggagccgggttttatgtggatgcaactcactcctcagagaccagggccatgtcagtggagcagcttaccgatgtccttatgaatgaaattctccatggagctgatggaaccagtatcaagtgtggcattattggagaaattggttgctcctggcctttgactgagagtgaaagaaaggttctccaggccacagctcatgcccaggctcagcttggttgtcctgttattatccatcctggacggagctccagggcaccatttcagattatccgaatattgcaagaagcaggcgcagacatctccaaaacagtcatgtcacacctggataggactattcttgataagaaagagctcttggagtttgctcaacttggctgctacttggaatatgatctctttggtactgaactacttcattaccaactcggcccagatattgacatgcctgatgataacaaaagaattagaagggtgcgtctcctggtggaagagggctgtgaagatcgaattctggtagcacatgacatacatacgaaaacccggctgatgaaatatggaggtcacggctattctcatatactcaccaatgttgttcctaaaatgttgctgagaggcataactgagaatgtgcttgataagattctaatagagaaccctaagcaatggctaactttcaaataggatggttgcttatgaattcacaccttgagtataaaacttgcagagaacattcagcgatttccagtccactgtgagatattaatcagttacctaggactaatgacagatcatttccttctgatgagaactaggagggtttgccttctctgagaccagctattacaactgtgcctctagggagttactcagcctaattgagccctattattttaacttaacaaaataaatacagaagtacctatttctaaacaatgatttaaagtctatatcccctaagcggagttgttgtttttctccctaatctatcagctgcactacttgagaaaatttaaagtgtttctagttaaattatttccttcttgagcgatctaatgtttcttgtaatattgatgatcctactaattatcctgctgttctttaattaatgcttaatgaataatatggcactgtaaaatagcttctgcaacaagggaagttaaattttgagacttttttccccaaaggatactgactgtaatacaattaccaattcacaatgataaaaatattttgaaaggttaattttatactgtccacctatctatatattcttctactgaaatgattttgatatctttggctttccggtatctatttttgccatacattttgctgttttgcaaagtttgtataagaacacataacactactgaattataaaaattcaatcataaaagtcaaaatatattacataatatagtttaatgaatcattacatttataataacaaaggccacaatttaattaattggtaagatataatgcaaaaaaaaaaagagaaatgtttgccttatgtatattccctttatttcctttaccttttgtttttccttggacctaaacagagaaaataatgcttatgtatctgaagaaaaggtcagatctattggaaatgacagcccgatacttgagcctcctctttaaaaggtatccagccctgatattttgtgtaaataaaatgtttttaaaacctgttagttaaaacacttaggtgatgggcactgctgcttataaattcatcttttggttgaatcctcactatgctatttggtacctaaaaatattctccaaacccttgctgccagttcctctttgataaatatatagttaattcgaaataaaatccattgcaattcatttatgagttatcttacatatcacaaagaccaattagaattagtcattattcttgatgaagagtctgtttttaatcataaaaatcatgacagttactcagacccaggcatttcaacagagctaacaccaccttcagataggcacaccatgcataactcttgggaagttgagctttgctaaataaaagatatttctgctgatcaaagatgatcaagctttctgtgtattggaacagaaagtaacaaagaggaatgagccaggagaacaaactaattcctttaaataaataaataaaaaaaaatgcaaatgtccttcaccagtaaagcaagcaaatttttaaaatctctgtttttgaaatctactcgtcaaagagttttcagaggcaatgaaaggggaacagatttttcattgtaatagtggaagttgtgtgatagttaggagatatcaacatgcatttttaatcttttccttagatgaaagagatggcttttggcagtgtgttctaaccagaaagaaaggatttgtattactctccaaatctactgtactgtcagcttcactccacctgagaaaaaagaaaaaaaaattgatagctcaaatgcatgtaattcataaacactgcaaaggagagccacttggtgtctgcagtcctcatattaacagtctgtcacagaatgcagttaaagtattgattggcatatggtaatagagcaaccatagccttaacttacagacctgtgaaataaagggcattttgacctaatacaattaattttctggataactcttaaagagaagtcattttaactgtttttgctactccatatattgtcattcaaaatatattttaacccaaaataagttaaataatttgtgcatgtttgtgtgtgtatatatgcatacacttttttatattaaaattttgaggctatacagccactgtgccctgtggaataaagccatatatataaatgttttatatgtatatgttttatacataaataaaacatttcatctaatatatatatgtgtgtgtgagtatatgtgtgcatgtttagcagatatttgtataaaatataaacactctgttgtcatattggctatatgcgaaattgttaattttaaaataacctcaggccacagacttgtagtaatcatttgaaggcctcacctagtgtccccttggtgacgtatgcagcagctcaaattaaacctttgtgcattgggttatgaataatcttttcttccaaagatggcaaaagcctcggtttgatttgatactaaagaataaatttctctgactttc

SEQ ID NO: 317012 - DNA, 4790 bp, Homo sapiens
ccagagggcgaagtgggagggcacaggggagactaaaaaggccagggaagttggcctgccggaagttcccagggagaaggcagcgcgttgtacccgagttacctgtagtcaaccacagtctgaaaatattaaggtattttaagacagaaagagagagaggagagaaaccgcattcacaaaaaagaaatcctctttttagaacatctcttggtggtaccatcagaaatgtcttccttaagtggaaaagtccaaaccgttttgggccttgtagagccaagcaaactgggccgtaccctgacccatgaacacctggccatgacctttgactgctgttactgtccacctcccccgtgccaggaagctatttccaaagaacctatcgtgatgaaaaatttatattggattcagaaaaacgcctattcccataaagaaaaccttcaattaaatcaggagacagaagccataaaggaagaactgttgtattttaaagctaatggtggaggggctttggtggaaaacacaaccactgggattagccgagacacacagacgttgaagaggcttgcagaagagactggcgtccatatcatatctggagccgggttttatgtggatgcaactcactcctcagagaccagggccatgtcagtggagcagcttaccgatgtccttatgaatgaaattctccatggagctgatggaaccagtatcaagtgtggcattattggagaaattggttgctcctggcctttgactgagagtgaaagaaaggttctccaggccacagctcatgcccaggctcagcttggttgtcctgttattatccatcctggacggagctccagggcaccatttcagattatccgaatattgcaagaagcaggcgcagacatctccaaaacagtcatgtcacacctggataggactattcttgataagaaagagctcttggagtttgctcaacttggctgctacttggaatatgatctctttggtactgaactacttcattaccaactcggcccagatattgacatgcctgatgataacaaaagaattagaagggtgcgtctcctggtggaagagggctgtgaagatcgaattctggtagcacatgacatacatacgaaaacccggctgatgaaatatggaggtcacggctattctcatatactcaccaatgttgttcctaaaatgttgctgagaggcataactgagaatgtgcttgataagattctaatagagaaccctaagcaatggctaactttcaaataggatggttgcttatgaattcacaccttgagtataaaacttgcagagaacattcagcgatttccagtccactgtgagatattaatcagttacctaggactaatgacagatcatttccttctgatgagaactaggagggtttgccttctctgagaccagctattacaactgtgcctctagggagttactcagcctaattgagccctattattttaacttaacaaaataaatacagaagtacctatttctaaacaatgatttaaagtctatatcccctaagcggagttgttgtttttctccctaatctatcagctgcactacttgagaaaatttaaagtgtttctagttaaattatttccttcttgagcgatctaatgtttcttgtaatattgatgatcctactaattatcctgctgttctttaattaatgcttaatgaataatatggcactgtaaaatagcttctgcaacaagggaagttaaattttgagacttttttccccaaaggatactgactgtaatacaattaccaattcacaatgataaaaatattttgaaaggttaattttatactgtccacctatctatatattcttctactgaaatgattttgatatctttggctttccggtatctatttttgccatacattttgctgttttgcaaagtttgtataagaacacataacactactgaattataaaaattcaatcataaaagtcaaaatatattacataatatagtttaatgaatcattacatttataataacaaaggccacaatttaattaattggtaagatataatgcaaaaaaaaaaagagaaatgtttgccttatgtatattccctttatttcctttaccttttgtttttccttggacctaaacagagaaaataatgcttatgtatctgaagaaaaggtcagatctattggaaatgacagcccgatacttgagcctcctctttaaaaggtatccagccctgatattttgtgtaaataaaatgtttttaaaacctgttagttaaaacacttaggtgatgggcactgctgcttataaattcatcttttggttgaatcctcactatgctatttggtacctaaaaatattctccaaacccttgctgccagttcctctttgataaatatatagttaattcgaaataaaatccattgcaattcatttatgagttatcttacatatcacaaagaccaattagaattagtcattattcttgatgaagagtctgtttttaatcataaaaatcatgacagttactcagacccaggcatttcaacagagctaacaccaccttcagataggcacaccatgcataactcttgggaagttgagctttgctaaataaaagatatttctgctgatcaaagatgatcaagctttctgtgtattggaacagaaagtaacaaagaggaatgagccaggagaacaaactaattcctttaaataaataaataaaaaaaaatgcaaatgtccttcaccagtaaagcaagcaaatttttaaaatctctgtttttgaaatctactcgtcaaagagttttcagaggcaatgaaaggggaacagatttttcattgtaatagtggaagttgtgtgatagttaggagatatcaacatgcatttttaatcttttccttagatgaaagagatggcttttggcagtgtgttctaaccagaaagaaaggatttgtattactctccaaatctactgtactgtcagcttcactccacctgagaaaaaagaaaaattggtgtctgcagtcctcatattaacagtctgtcacagaatgcagttaaagtattgattggcatatggtaatagagcaaccatagccttaacttacagacctgtgaaataaagggcattttgacctaatacaattaattttctggataactcttaaagagaagtcattttaactgtttttgctactccatatattgtcattcaaaatatattttaacccaaaataagttaaataatttgtgcatgtttgtgtgtgtatatatgcatacacttttttatattaaaattttgaggctatacagccactgtgccctgtggaataaagccatatatataaatgttttatatgtatatgttttatacataaataaaacatttcatctaatatatatatgtgtgtgtgagtatatgtgtgcatgtttagcagatatttgtataaaatataaacactctgttgtcatattggctatatgcgaaattgttaattttaaaataacctcaggccacagacttgtagtaatcatttgaaggcctcacctagtgtccccttggtgacgtatgcagcagctcaaattaaacctttgtgcattgggttatgaataatcttttcttccaaagatggcaaaagcctcggtttgatttgatactaaagaataaatttctctgactttcccagtgaatctaaatgtattcagttgacaaaatggacacataagggctttttctaaataccgtacataattacacattttcacacttagagggtaatcctatgatacactgtcaatctctattttaaaagactatcaccagaaaagagagaaaagaaaattcatataagaaaaagaaaatgtgaaaaagatcataggcttgggaattccctcaaatccagaaaattccaggttaaggcttgaagttgaatcattcccaggtctagctctaaggttaacaagagtacaaggcaaacaatttctttggggacaagcagcattatttcaattagaccttctcctgcagggcaaaaatcattcttccccacactatgaatggactccaagtatcataataagcaggtaaactcacaagaaccaaagctgacatatggataaaagcagcaagatcacagtacaccaaagtatcatatatatagaagaaataattcaatgtcttagatttgtctataaaaatttgtgatctatataggacttcattcacatggacactaacgataaggagtatttgctttggcggtagtggatcacacatctgcttatcttgctttgatattttttacataatgtttctgagtgatacagatgtgagtcaggtagcatttgatttccccacatatacacaactgaggtgccctgccattggcatcccctgggatccttgattcactgacgttagccatacgaatccagtgttcaaactcagaataataagcttagtttctgcattatcagtcagcataaataataaatccagaaaacgtgctgtatttgttgttgtttcctccatgggctttcccgccatctaatttgatatagacttcatctcccggctccaaatgaagaaccacactgttactggcatagtcgtaattctgatcagcatcttgggcaattgcactagcacgcactgtttttgcagagatcagcccacatgctggtgccgtcccctccgcgcatcaggacgtggtaggtgaagaagtagatgcccgggatggagcaggtgaacttgccggtggtggggtcg

SEQ ID NO: 317013 - DNA, 4764 bp, Homo sapiens
ccagagggcgaagtgggagggcacaggggagactaaaaaggccagggaagttggcctgccggaagttcccagggagaaggcagcgcgttgtacccgagaaaaaagaaatcctctttttagaacatctcttggtggtaccatcagaaatgtcttccttaagtggaaaagtccaaaccgttttgggccttgtagagccaagcaaactgggccgtaccctgacccatgaacacctggccatgacctttgactgctgttactgtccacctcccccgtgccaggaagctatttccaaagaacctatcgtgatgaaaaatttatattggattcagaaaaacgcctattcccataaagaaaaccttcaattaaatcaggagacagaagccataaaggaagaactgttgtattttaaagctaatggtggaggggctttggtggaaaacacaaccactgggattagccgagacacacagacgttgaagaggcttgcagaagagactggcgtccatatcatatctggagccgggttttatgtggatgcaactcactcctcagagaccagggccatgtcagtggagcagcttaccgatgtccttatgaatgaaattctccatggagctgatggaaccagtatcaagtgtggcattattggagaaattggttgctcctggcctttgactgagagtgaaagaaaggttctccaggccacagctcatgcccaggctcagcttggttgtcctgttattatccatcctggacggagctccagggcaccatttcagattatccgaatattgcaagaagcaggcgcagacatctccaaaacagtcatgtcacacctggataggactattcttgataagaaagagctcttggagtttgctcaacttggctgctacttggaatatgatctctttggtactgaactacttcattaccaactcggcccagatattgacatgcctgatgataacaaaagaattagaagggtgcgtctcctggtggaagagggctgtgaagatcgaattctggtagcacatgacatacatacgaaaacccggctgatgaaatatggaggtcacggctattctcatatactcaccaatgttgttcctaaaatgttgctgagaggcataactgagaatgtgcttgataagattctaatagagaaccctaagcaatggctaactttcaaataggatggttgcttatgaattcacaccttgagtataaaacttgcagagaacattcagcgatttccagtccactgtgagatattaatcagttacctaggactaatgacagatcatttccttctgatgagaactaggagggtttgccttctctgagaccagctattacaactgtgcctctagggagttactcagcctaattgagccctattattttaacttaacaaaataaatacagaagtacctatttctaaacaatgatttaaagtctatatcccctaagcggagttgttgtttttctccctaatctatcagctgcactacttgagaaaatttaaagtgtttctagttaaattatttccttcttgagcgatctaatgtttcttgtaatattgatgatcctactaattatcctgctgttctttaattaatgcttaatgaataatatggcactgtaaaatagcttctgcaacaagggaagttaaattttgagacttttttccccaaaggatactgactgtaatacaattaccaattcacaatgataaaaatattttgaaaggttaattttatactgtccacctatctatatattcttctactgaaatgattttgatatctttggctttccggtatctatttttgccatacattttgctgttttgcaaagtttgtataagaacacataacactactgaattataaaaattcaatcataaaagtcaaaatatattacataatatagtttaatgaatcattacatttataataacaaaggccacaatttaattaattggtaagatataatgcaaaaaaaaaaagagaaatgtttgccttatgtatattccctttatttcctttaccttttgtttttccttggacctaaacagagaaaataatgcttatgtatctgaagaaaaggtcagatctattggaaatgacagcccgatacttgagcctcctctttaaaaggtatccagccctgatattttgtgtaaataaaatgtttttaaaacctgttagttaaaacacttaggtgatgggcactgctgcttataaattcatcttttggttgaatcctcactatgctatttggtacctaaaaatattctccaaacccttgctgccagttcctctttgataaatatatagttaattcgaaataaaatccattgcaattcatttatgagttatcttacatatcacaaagaccaattagaattagtcattattcttgatgaagagtctgtttttaatcataaaaatcatgacagttactcagacccaggcatttcaacagagctaacaccaccttcagataggcacaccatgcataactcttgggaagttgagctttgctaaataaaagatatttctgctgatcaaagatgatcaagctttctgtgtattggaacagaaagtaacaaagaggaatgagccaggagaacaaactaattcctttaaataaataaataaaaaaaaatgcaaatgtccttcaccagtaaagcaagcaaatttttaaaatctctgtttttgaaatctactcgtcaaagagttttcagaggcaatgaaaggggaacagatttttcattgtaatagtggaagttgtgtgatagttaggagatatcaacatgcatttttaatcttttccttagatgaaagagatggcttttggcagtgtgttctaaccagaaagaaaggatttgtattactctccaaatctactgtactgtcagcttcactccacctgagaaaaaagaaaaaaaaattgatagctcaaatgcatgtaattcataaacactgcaaaggagagccacttggtgtctgcagtcctcatattaacagtctgtcacagaatgcagttaaagtattgattggcatatggtaatagagcaaccatagccttaacttacagacctgtgaaataaagggcattttgacctaatacaattaattttctggataactcttaaagagaagtcattttaactgtttttgctactccatatattgtcattcaaaatatattttaacccaaaataagttaaataatttgtgcatgtttgtgtgtgtatatatgcatacacttttttatattaaaattttgaggctatacagccactgtgccctgtggaataaagccatatatataaatgttttatatgtatatgttttatacataaataaaacatttcatctaatatatatatgtgtgtgtgagtatatgtgtgcatgtttagcagatatttgtataaaatataaacactctgttgtcatattggctatatgcgaaattgttaattttaaaataacctcaggccacagacttgtagtaatcatttgaaggcctcacctagtgtccccttggtgacgtatgcagcagctcaaattaaacctttgtgcattgggttatgaataatcttttcttccaaagatggcaaaagcctcggtttgatttgatactaaagaataaatttctctgactttcccagtgaatctaaatgtattcagttgacaaaatggacacataagggctttttctaaataccgtacataattacacattttcacacttagagggtaatcctatgatacactgtcaatctctattttaaaagactatcaccagaaaagagagaaaagaaaattcatataagaaaaagaaaatgtgaaaaagatcataggcttgggaattccctcaaatccagaaaattccaggttaaggcttgaagttgaatcattcccaggtctagctctaaggttaacaagagtacaaggcaaacaatttctttggggacaagcagcattatttcaattagaccttctcctgcagggcaaaaatcattcttccccacactatgaatggactccaagtatcataataagcaggtaaactcacaagaaccaaagctgacatatggataaaagcagcaagatcacagtacaccaaagtatcatatatatagaagaaataattcaatgtcttagatttgtctataaaaatttgtgatctatataggacttcattcacatggacactaacgataaggagtatttgctttggcggtagtggatcacacatctgcttatcttgctttgatattttttacataatgtttctgagtgatacagatgtgagtcaggtagcatttgatttccccacatatacacaactgaggtgccctgccattggcatcccctgggatccttgattcactgacgttagccatacgaatccagtgttcaaactcagaataataagcttagtttctgcattatcagtcagcataaataataaatccagaaaacgtgctgtatttgttgttgtttcctccatgggctttcccgccatctaatttgatatagacttcatctcccggctccaaatgaagaaccacactgttactggcatagtcgtaattctgatcagcatcttgggcaattgcactagcacgcactgtttttgcagagatcagcccacatgctggtgccgtcccctccgcgcatcaggacgtggtaggtgaagaagtagatgcccgggatggagcaggtgaacttgccggtggtggggtcg

SEQ ID NO: 317014 - DNA, 4789 bp, Homo sapiens
ccagagggcgaagtgggagggcacaggggagactaaaaaggccagggaagttggcctgccggaagttcccagggagaaggcagcgcgttgtacccgagttacctgtagtcaaccacagtctgaaaatattaaggtattttaagacagaaagagagagaggagagaaaccgcattcacaaaaaagaaatcctctttttagaacatctcttggtggtaccatcagaaatgtcttccttaagtggaaaagtccaaaccgttttgggccttgtagagccaagcaaactgggccgtaccctgacccatgaacacctggccatgacctttgactgctgttactgtccacctcccccgtgccaggaagctatttccaaagaacctatcgtgatgaaaaatttatattggattcagaaaaacgcctattcccataaagttaaagctaatggtggaggggctttggtggaaaacacaaccactgggattagccgagacacacagacgttgaagaggcttgcagaagagactggcgtccatatcatatctggagccgggttttatgtggatgcaactcactcctcagagaccagggccatgtcagtggagcagcttaccgatgtccttatgaatgaaattctccatggagctgatggaaccagtatcaagtgtggcattattggagaaattggttgctcctggcctttgactgagagtgaaagaaaggttctccaggccacagctcatgcccaggctcagcttggttgtcctgttattatccatcctggacggagctccagggcaccatttcagattatccgaatattgcaagaagcaggcgcagacatctccaaaacagtcatgtcacacctggataggactattcttgataagaaagagctcttggagtttgctcaacttggctgctacttggaatatgatctctttggtactgaactacttcattaccaactcggcccagatattgacatgcctgatgataacaaaagaattagaagggtgcgtctcctggtggaagagggctgtgaagatcgaattctggtagcacatgacatacatacgaaaacccggctgatgaaatatggaggtcacggctattctcatatactcaccaatgttgttcctaaaatgttgctgagaggcataactgagaatgtgcttgataagattctaatagagaaccctaagcaatggctaactttcaaataggatggttgcttatgaattcacaccttgagtataaaacttgcagagaacattcagcgatttccagtccactgtgagatattaatcagttacctaggactaatgacagatcatttccttctgatgagaactaggagggtttgccttctctgagaccagctattacaactgtgcctctagggagttactcagcctaattgagccctattattttaacttaacaaaataaatacagaagtacctatttctaaacaatgatttaaagtctatatcccctaagcggagttgttgtttttctccctaatctatcagctgcactacttgagaaaatttaaagtgtttctagttaaattatttccttcttgagcgatctaatgtttcttgtaatattgatgatcctactaattatcctgctgttctttaattaatgcttaatgaataatatggcactgtaaaatagcttctgcaacaagggaagttaaattttgagacttttttccccaaaggatactgactgtaatacaattaccaattcacaatgataaaaatattttgaaaggttaattttatactgtccacctatctatatattcttctactgaaatgattttgatatctttggctttccggtatctatttttgccatacattttgctgttttgcaaagtttgtataagaacacataacactactgaattataaaaattcaatcataaaagtcaaaatatattacataatatagtttaatgaatcattacatttataataacaaaggccacaatttaattaattggtaagatataatgcaaaaaaaaaaagagaaatgtttgccttatgtatattccctttatttcctttaccttttgtttttccttggacctaaacagagaaaataatgcttatgtatctgaagaaaaggtcagatctattggaaatgacagcccgatacttgagcctcctctttaaaaggtatccagccctgatattttgtgtaaataaaatgtttttaaaacctgttagttaaaacacttaggtgatgggcactgctgcttataaattcatcttttggttgaatcctcactatgctatttggtacctaaaaatattctccaaacccttgctgccagttcctctttgataaatatatagttaattcgaaataaaatccattgcaattcatttatgagttatcttacatatcacaaagaccaattagaattagtcattattcttgatgaagagtctgtttttaatcataaaaatcatgacagttactcagacccaggcatttcaacagagctaacaccaccttcagataggcacaccatgcataactcttgggaagttgagctttgctaaataaaagatatttctgctgatcaaagatgatcaagctttctgtgtattggaacagaaagtaacaaagaggaatgagccaggagaacaaactaattcctttaaataaataaataaaaaaaaatgcaaatgtccttcaccagtaaagcaagcaaatttttaaaatctctgtttttgaaatctactcgtcaaagagttttcagaggcaatgaaaggggaacagatttttcattgtaatagtggaagttgtgtgatagttaggagatatcaacatgcatttttaatcttttccttagatgaaagagatggcttttggcagtgtgttctaaccagaaagaaaggatttgtattactctccaaatctactgtactgtcagcttcactccacctgagaaaaaagaaaaaaaaattgatagctcaaatgcatgtaattcataaacactgcaaaggagagccacttggtgtctgcagtcctcatattaacagtctgtcacagaatgcagttaaagtattgattggcatatggtaatagagcaaccatagccttaacttacagacctgtgaaataaagggcattttgacctaatacaattaattttctggataactcttaaagagaagtcattttaactgtttttgctactccatatattgtcattcaaaatatattttaacccaaaataagttaaataatttgtgcatgtttgtgtgtgtatatatgcatacacttttttatattaaaattttgaggctatacagccactgtgccctgtggaataaagccatatatataaatgttttatatgtatatgttttatacataaataaaacatttcatctaatatatatatgtgtgtgtgagtatatgtgtgcatgtttagcagatatttgtataaaatataaacactctgttgtcatattggctatatgcgaaattgttaattttaaaataacctcaggccacagacttgtagtaatcatttgaaggcctcacctagtgtccccttggtgacgtatgcagcagctcaaattaaacctttgtgcattgggttatgaataatcttttcttccaaagatggcaaaagcctcggtttgatttgatactaaagaataaatttctctgactttcccagtgaatctaaatgtattcagttgacaaaatggacacataagggctttttctaaataccgtacataattacacattttcacacttagagggtaatcctatgatacactgtcaatctctattttaaaagactatcaccagaaaagagagaaaagaaaattcatataagaaaaagaaaatgtgaaaaagatcataggcttgggaattccctcaaatccagaaaattccaggttaaggcttgaagttgaatcattcccaggtctagctctaaggttaacaagagtacaaggcaaacaatttctttggggacaagcagcattatttcaattagaccttctcctgcagggcaaaaatcattcttccccacactatgaatggactccaagtatcataataagcaggtaaactcacaagaaccaaagctgacatatggataaaagcagcaagatcacagtacaccaaagtatcatatatatagaagaaataattcaatgtcttagatttgtctataaaaatttgtgatctatataggacttcattcacatggacactaacgataaggagtatttgctttggcggtagtggatcacacatctgcttatcttgctttgatattttttacataatgtttctgagtgatacagatgtgagtcaggtagcatttgatttccccacatatacacaactgaggtgccctgccattggcatcccctgggatccttgattcactgacgttagccatacgaatccagtgttcaaactcagaataataagcttagtttctgcattatcagtcagcataaataataaatccagaaaacgtgctgtatttgttgttgtttcctccatgggctttcccgccatctaatttgatatagacttcatctcccggctccaaatgaagaaccacactgttactggcatagtcgtaattctgatcagcatcttgggcaattgcactagcacgcactgtttttgcagagatcagcccacatgctggtgccgtcccctccgcgcatcaggacgtggtaggtgaagaagtagatgcccgggatggagcaggtgaacttgccggtggtggggtcg

SEQ ID NO: 317015 - DNA, 4418 bp, Homo sapiens
ccagagggcgaagtgggagggcacaggggagactaaaaaggccagggaagttggcctgccggaagttcccagggagaaggcagcgcgttgtacccgagattcagggtctggctctgcttcccaggctagagtgcatttggcgcgatcacagctcactgcagcctcgacctcctgagctcaagcgaacttcctgcctcagcctcctgagcttcctgagtagctgcgactacagcttaccgatgtccttatgaatgaaattctccatggagctgatggaaccagtatcaagtgtggcattattggagaaattggttgctcctggcctttgactgagagtgaaagaaaggttctccaggccacagctcatgcccaggctcagcttggttgtcctgttattatccatcctggacggagctccagggcaccatttcagattatccgaatattgcaagaagcaggcgcagacatctccaaaacagtcatgtcacacctggataggactattcttgataagaaagagctcttggagtttgctcaacttggctgctacttggaatatgatctctttggtactgaactacttcattaccaactcggcccagatattgacatgcctgatgataacaaaagaattagaagggtgcgtctcctggtggaagagggctgtgaagatcgaattctggtagcacatgacatacatacgaaaacccggctgatgaaatatggaggtcacggctattctcatatactcaccaatgttgttcctaaaatgttgctgagaggcataactgagaatgtgcttgataagattctaatagagaaccctaagcaatggctaactttcaaataggatggttgcttatgaattcacaccttgagtataaaacttgcagagaacattcagcgatttccagtccactgtgagatattaatcagttacctaggactaatgacagatcatttccttctgatgagaactaggagggtttgccttctctgagaccagctattacaactgtgcctctagggagttactcagcctaattgagccctattattttaacttaacaaaataaatacagaagtacctatttctaaacaatgatttaaagtctatatcccctaagcggagttgttgtttttctccctaatctatcagctgcactacttgagaaaatttaaagtgtttctagttaaattatttccttcttgagcgatctaatgtttcttgtaatattgatgatcctactaattatcctgctgttctttaattaatgcttaatgaataatatggcactgtaaaatagcttctgcaacaagggaagttaaattttgagacttttttccccaaaggatactgactgtaatacaattaccaattcacaatgataaaaatattttgaaaggttaattttatactgtccacctatctatatattcttctactgaaatgattttgatatctttggctttccggtatctatttttgccatacattttgctgttttgcaaagtttgtataagaacacataacactactgaattataaaaattcaatcataaaagtcaaaatatattacataatatagtttaatgaatcattacatttataataacaaaggccacaatttaattaattggtaagatataatgcaaaaaaaaaaagagaaatgtttgccttatgtatattccctttatttcctttaccttttgtttttccttggacctaaacagagaaaataatgcttatgtatctgaagaaaaggtcagatctattggaaatgacagcccgatacttgagcctcctctttaaaaggtatccagccctgatattttgtgtaaataaaatgtttttaaaacctgttagttaaaacacttaggtgatgggcactgctgcttataaattcatcttttggttgaatcctcactatgctatttggtacctaaaaatattctccaaacccttgctgccagttcctctttgataaatatatagttaattcgaaataaaatccattgcaattcatttatgagttatcttacatatcacaaagaccaattagaattagtcattattcttgatgaagagtctgtttttaatcataaaaatcatgacagttactcagacccaggcatttcaacagagctaacaccaccttcagataggcacaccatgcataactcttgggaagttgagctttgctaaataaaagatatttctgctgatcaaagatgatcaagctttctgtgtattggaacagaaagtaacaaagaggaatgagccaggagaacaaactaattcctttaaataaataaataaaaaaaaatgcaaatgtccttcaccagtaaagcaagcaaatttttaaaatctctgtttttgaaatctactcgtcaaagagttttcagaggcaatgaaaggggaacagatttttcattgtaatagtggaagttgtgtgatagttaggagatatcaacatgcatttttaatcttttccttagatgaaagagatggcttttggcagtgtgttctaaccagaaagaaaggatttgtattactctccaaatctactgtactgtcagcttcactccacctgagaaaaaagaaaaaaaaattgatagctcaaatgcatgtaattcataaacactgcaaaggagagccacttggtgtctgcagtcctcatattaacagtctgtcacagaatgcagttaaagtattgattggcatatggtaatagagcaaccatagccttaacttacagacctgtgaaataaagggcattttgacctaatacaattaattttctggataactcttaaagagaagtcattttaactgtttttgctactccatatattgtcattcaaaatatattttaacccaaaataagttaaataatttgtgcatgtttgtgtgtgtatatatgcatacacttttttatattaaaattttgaggctatacagccactgtgccctgtggaataaagccatatatataaatgttttatatgtatatgttttatacataaataaaacatttcatctaatatatatatgtgtgtgtgagtatatgtgtgcatgtttagcagatatttgtataaaatataaacactctgttgtcatattggctatatgcgaaattgttaattttaaaataacctcaggccacagacttgtagtaatcatttgaaggcctcacctagtgtccccttggtgacgtatgcagcagctcaaattaaacctttgtgcattgggttatgaataatcttttcttccaaagatggcaaaagcctcggtttgatttgatactaaagaataaatttctctgactttcccagtgaatctaaatgtattcagttgacaaaatggacacataagggctttttctaaataccgtacataattacacattttcacacttagagggtaatcctatgatacactgtcaatctctattttaaaagactatcaccagaaaagagagaaaagaaaattcatataagaaaaagaaaatgtgaaaaagatcataggcttgggaattccctcaaatccagaaaattccaggttaaggcttgaagttgaatcattcccaggtctagctctaaggttaacaagagtacaaggcaaacaatttctttggggacaagcagcattatttcaattagaccttctcctgcagggcaaaaatcattcttccccacactatgaatggactccaagtatcataataagcaggtaaactcacaagaaccaaagctgacatatggataaaagcagcaagatcacagtacaccaaagtatcatatatatagaagaaataattcaatgtcttagatttgtctataaaaatttgtgatctatataggacttcattcacatggacactaacgataaggagtatttgctttggcggtagtggatcacacatctgcttatcttgctttgatattttttacataatgtttctgagtgatacagatgtgagtcaggtagcatttgatttccccacatatacacaactgaggtgccctgccattggcatcccctgggatccttgattcactgacgttagccatacgaatccagtgttcaaactcagaataataagcttagtttctgcattatcagtcagcataaataataaatccagaaaacgtgctgtatttgttgttgtttcctccatgggctttcccgccatctaatttgatatagacttcatctcccggctccaaatgaagaaccacactgttactggcatagtcgtaattctgatcagcatcttgggcaattgcactagcacgcactgtttttgcagagatcagcccacatgctggtgccgtcccctccgcgcatcaggacgtggtaggtgaagaagtagatgcccgggatggagcaggtgaacttgccggtggtggggtcg

SEQ ID NO: 317016 - DNA, 4034 bp, Homo sapiens
acttgaggcaccatttcagattatcggataatggcagaagaggaaattcttccaaaacaaggctcagtgtacaacacccgggagaattagggcacaattcctggggaatcaaaaagagacgctctggagagttggccacagcatgggctcatgcatactggcacatatggaccccctatcgggatcacgtgaactacttcattaccaactcggcccagatattgacatgcctgatgataacaaaagaattagaagggtgcgtctcctggtggaagagggctgtgaagatcgaattctggtagcacatgacatacatacgaaaacccggctgatgaaatatggaggtcacggctattctcatatactcaccaatgttgttcctaaaatgttgctgagaggcataactgagaatgtgcttgataagattctaatagagaaccctaagcaatggctaactttcaaataggatggttgcttatgaattcacaccttgagtataaaacttgcagagaacattcagcgatttccagtccactgtgagatattaatcagttacctaggactaatgacagatcatttccttctgatgagaactaggagggtttgccttctctgagaccagctattacaactgtgcctctagggagttactcagcctaattgagccctattattttaacttaacaaaataaatacagaagtacctatttctaaacaatgatttaaagtctatatcccctaagcggagttgttgtttttctccctaatctatcagctgcactacttgagaaaatttaaagtgtttctagttaaattatttccttcttgagcgatctaatgtttcttgtaatattgatgatcctactaattatcctgctgttctttaattaatgcttaatgaataatatggcactgtaaaatagcttctgcaacaagggaagttaaattttgagacttttttccccaaaggatactgactgtaatacaattaccaattcacaatgataaaaatattttgaaaggttaattttatactgtccacctatctatatattcttctactgaaatgattttgatatctttggctttccggtatctatttttgccatacattttgctgttttgcaaagtttgtataagaacacataacactactgaattataaaaattcaatcataaaagtcaaaatatattacataatatagtttaatgaatcattacatttataataacaaaggccacaatttaattaattggtaagatataatgcaaaaaaaaaaagagaaatgtttgccttatgtatattccctttatttcctttaccttttgtttttccttggacctaaacagagaaaataatgcttatgtatctgaagaaaaggtcagatctattggaaatgacagcccgatacttgagcctcctctttaaaaggtatccagccctgatattttgtgtaaataaaatgtttttaaaacctgttagttaaaacacttaggtgatgggcactgctgcttataaattcatcttttggttgaatcctcactatgctatttggtacctaaaaatattctccaaacccttgctgccagttcctctttgataaatatatagttaattcgaaataaaatccattgcaattcatttatgagttatcttacatatcacaaagaccaattagaattagtcattattcttgatgaagagtctgtttttaatcataaaaatcatgacagttactcagacccaggcatttcaacagagctaacaccaccttcagataggcacaccatgcataactcttgggaagttgagctttgctaaataaaagatatttctgctgatcaaagatgatcaagctttctgtgtattggaacagaaagtaacaaagaggaatgagccaggagaacaaactaattcctttaaataaataaataaaaaaaaatgcaaatgtccttcaccagtaaagcaagcaaatttttaaaatctctgtttttgaaatctactcgtcaaagagttttcagaggcaatgaaaggggaacagatttttcattgtaatagtggaagttgtgtgatagttaggagatatcaacatgcatttttaatcttttccttagatgaaagagatggcttttggcagtgtgttctaaccagaaagaaaggatttgtattactctccaaatctactgtactgtcagcttcactccacctgagaaaaaagaaaaaaaaattgatagctcaaatgcatgtaattcataaacactgcaaaggagagccacttggtgtctgcagtcctcatattaacagtctgtcacagaatgcagttaaagtattgattggcatatggtaatagagcaaccatagccttaacttacagacctgtgaaataaagggcattttgacctaatacaattaattttctggataactcttaaagagaagtcattttaactgtttttgctactccatatattgtcattcaaaatatattttaacccaaaataagttaaataatttgtgcatgtttgtgtgtgtatatatgcatacacttttttatattaaaattttgaggctatacagccactgtgccctgtggaataaagccatatatataaatgttttatatgtatatgttttatacataaataaaacatttcatctaatatatatatgtgtgtgtgagtatatgtgtgcatgtttagcagatatttgtataaaatataaacactctgttgtcatattggctatatgcgaaattgttaattttaaaataacctcaggccacagacttgtagtaatcatttgaaggcctcacctagtgtccccttggtgacgtatgcagcagctcaaattaaacctttgtgcattgggttatgaataatcttttcttccaaagatggcaaaagcctcggtttgatttgatactaaagaataaatttctctgactttcccagtgaatctaaatgtattcagttgacaaaatggacacataagggctttttctaaataccgtacataattacacattttcacacttagagggtaatcctatgatacactgtcaatctctattttaaaagactatcaccagaaaagagagaaaagaaaattcatataagaaaaagaaaatgtgaaaaagatcataggcttgggaattccctcaaatccagaaaattccaggttaaggcttgaagttgaatcattcccaggtctagctctaaggttaacaagagtacaaggcaaacaatttctttggggacaagcagcattatttcaattagaccttctcctgcagggcaaaaatcattcttccccacactatgaatggactccaagtatcataataagcaggtaaactcacaagaaccaaagctgacatatggataaaagcagcaagatcacagtacaccaaagtatcatatatatagaagaaataattcaatgtcttagatttgtctataaaaatttgtgatctatataggacttcattcacatggacactaacgataaggagtatttgctttggcggtagtggatcacacatctgcttatcttgctttgatattttttacataatgtttctgagtgatacagatgtgagtcaggtagcatttgatttccccacatatacacaactgaggtgccctgccattggcatcccctgggatccttgattcactgacgttagccatacgaatccagtgttcaaactcagaataataagcttagtttctgcattatcagtcagcataaataataaatccagaaaacgtgctgtatttgttgttgtttcctccatgggctttcccgccatctaatttgatatagacttcatctcccggctccaaatgaagaaccacactgttactggcatagtcgtaattctgatcagcatcttgggcaattgcactagcacgcactgtttttgcagagatcagcccacatgctggtgccgtcccctccgcgcatcaggacgtggtaggtgaagaagtagatgcccgggatggagcaggtgaacttgccggtggtggggtcg

SEQ ID NO: 317017 - DNA, 1098 bp, Homo sapiens
ccagagggcgaagtgggagggcacaggggagactaaaaaggccagggaagttggcctgccggaagttcccagggagaaggcagcgcgttgtacccgagttacctgtagtcaaccacagtctgaaaatattaaggtattttaagacagaaagagagagaggagagaaaccgcattcacaaaaaagaaatcctctttttagaacatctcttggtggtaccatcagaaatgtcttccttaagtggaaaagtccaaaccgttttgggccttgtagagccaagcaaactgggccgtaccctgacccatgaacacctggccatgacctttgactgctgttactgtccacctcccccgtgccaggaagctatttccaaagaacctatcgtgatgaaaaatttatattggattcagaaaaacgcctattcccataaagaaaaccttcaattaaatcaggagacagaagccataaaggaagaactgttgtattttaaagctaatggtggaggggctttggtggaaaacacaaccactgggattagccgagacacacagacgttgaagaggcttgcagaagagactggcgtccatatcatatctggagccgggttttatgtggatgcaactcactcctcagagaccagggccatgtcagtggagcagcttaccgatgtccttatgaatgaaattctccatggagctgatggaaccagtatcaagtgtggcattattggagaaattggttgctcctggcctttgactgagagtgaaagaaaggttctccaggccacagctcatgcccaggctcagcttggttgtcctgttattatccatcctggacggagctccagggcaccatttcagattatccgaatattgcaagaagcaggcgcagacatctccaaaacagtcatgtcacacctggataggtaagtaggctgtcttacaaatggatgcaaactgccatataattaatgcatgatcaaattaagaatctacagtaatcagtcaatgcaatactaatcacgcagagaaaaccactaactatatggaaggtagtatttataaagtttcacaactgacatgaataaaagtcaatgctgc

SEQ ID NO: 317018 - DNA, 682 bp, Homo sapiens
ccagagggcgaagtgggagggcacaggggagactaaaaaggccagggaagttggcctgccggaagttcccagggagaaggcagcgcgttgtacccgagttacctgtagtcaaccacagtctgaaaatattaaggtattttaagacagaaagagagagaggagagaaaccgcattcacaaaaaagaaatcctctttttagaacatctcttggtggtaccatcagaaatgtcttccttaagtggaaaagtccaaaccgttttgggccttgtagagccaagcaaactgggccgtaccctgacccatgaacacctggccatgacctttgactgctgttactgtccacctcccccgtgccaggaagctatttccaaagaacctatcgtgatgaaaaatttatattggattcagaaaaacgcctattcccataaagaaaaccttcaattaaatcaggagacagaagccataaaggaagaactgttgtattttaaagctaatggtggaggggctttggtggaaaacacaaccactgggattagccgagacacacagacgttgaagaggcttgcagaagagactggcgtccatatcatatctggagccgggttttatgtggatgcaactcactcctcagagaccagggccatgtcagtggagcagaacagcataccttccggtccagcta

SEQ ID NO: 317019 - DNA, 500 bp, Homo sapiens
ggaagttcccagggagaaggcagcgcgttgtacccgaggtaaggcttcttggagtcagagcaggagccggaactgtgggcccagtaggaagagtggggcccgacggcggaggccgcgcggccagggttcgctgcagagctccacgcgagggtcctgccggaaggaaggattttctagccgctgcgcttgggccctgccgcctctccttaagtgcttgagggacgttgcaaagagcgccagtcccgtgtggcgccagctccctgtggctcgacagcaatgcccgggggcgtcatcgggtagctgtgctaagcctcctttaataagcttttttttttttttttttttagattcagggtctggctctgcttcccaggctagagtgcatttggcgcgatcacagctcactgcagcctcgacctcctgagctcaagcgaacttcctgcctcagcctcctgagcttcctgagtagctgcgactacaggcacgtgccaccatgtccg

SEQ ID NO: 317020 - DNA, 2080 bp, Homo sapiens
ccagagggcgaagtgggagggcacaggggagactaaaaaggccagggaagttggcctgccggaagttcccagggagaaggcagcgcgttgtacccgagttacctgtagtcaaccacagtctgaaaatattaaggtattttaagacagaaagagagagaggagagaaaccgcattcacaaaaaagaaatcctctttttagaacatctcttggtggtaccatcagaaatgtcttccttaagtggaaaagtccaaaccgttttgggccttgtagagccaagcaaactgggccgtaccctgacccatgaacacctggccatgacctttgactgctgttactgtccacctcccccgtgccaggaagctatttccaaagaacctatcgtgatgaaaaatttatattggattcagaaaaacgcctattcccataaagaaaaccttcaattaaatcaggagacagaagccataaaggaagaactgttgtattttaaagctaatggtggaggggctttggtggaaaacacaaccactgggattagccgagacacacagacgttgaagaggcttgcagaagagactggcgtccatatcatatctggagccgggttttatgtggatgcaactcactcctcagagaccagggccatgtcagtggagcagcttaccgatgtccttatgaatgaaattctccatggagctgatggaaccagtatcaagtgtggcattattggagaaattggttgctcctggcctttgactgagagtgaaagaaaggttctccaggccacagctcatgcccaggctcagcttggttgtcctgttattatccatcctggacggagctccagggcaccatttcagattatccgaatattgcaagaagcaggcgcagacatctccaaaacagtcatgtcacacctggataggactattcttgataagaaagagctcttggagtttgctcaacttggctgctacttggaatatgatctctttggtactgaactacttcattaccaactcggcccagatattgacatgcctgatgataacaaaagaattagaagggtgcgtctcctggtggaagagggctgtgaagatcgaattctggtagcacatgacatacatacgaaaacccggctgatgaaatatggaggtcacggctattctcatatactcaccaatgttgttcctaaaatgttgctgagaggcataactgagaatgtgcttgataagattctaatagagaaccctaagcaatggctaactttcaaataggatggttgcttatgaattcacaccttgagtataaaacttgcagagaacattcagcgatttccagtccactgtgagatattaatcagttacctaggactaatgacagatcatttccttctgatgagaactaggagggtttgccttctctgagaccagctattacaactgtgcctctagggagttactcagcctaattgagccctattattttaacttaacaaaataaatacagaagtacctatttctaaacaatgatttaaagtctatatcccctaagcggagttgttgtttttctccctaatctatcagctgcactacttgagaaaatttaaagtgtttctagttaaattatttccttcttgagcgatctaatgtttcttgtaatattgatgatcctactaattatcctgctgttctttaattaatgcttaatgaataatatggcactgtaaaatagcttctgcaacaagggaagttaaattttgagacttttttccccaaaggatactgactgtaatacaattaccaattcacaatgataaaaatattttgaaaggttaattttatactgtccacctatctatatattcttctactgaaatgattttgatatctttggctttccggtatctatttttgccatacattttgctgttttgcaaagtttgtataagaacacataacactactgaattataaaaattcaatcataaaagtcaaaatatattacataatatagtttaatgaatcattacatttataataacaaaggccacaatttaattaattggtaagatataatgca

SEQ ID NO: 317021 - DNA, 4801 bp, Homo sapiens
ccagagggcgaagtgggagggcacaggggagactaaaaaggccagggaagttggcctgccggaagttcccagggagaaggcagcgcgttgtacccgagttacctgtagtcaaccacagtctgaaaatattaaggtattttaagacagaaagagagagaggagagaaaccgcattcacaaaaaagaaatcctctttttagaacatctcttggtggtaccatcagaaatgtcttccttaagtggaaaagtccaaaccgttttgggccttgtagagccaagcaaactgggccgtaccctgacccatgaacacctggccatgacctttgactgctgttactgtccacctcccccgtgccaggaagctatttccaaagaacctatcgtgatgaaaaatttatattggattcagaaaaacgcctattcccataaagaaaaccttcaattaaatcaggagacagaagccataaaggaagaactgttgtattttaaagctaatggtggaggggctttggtggaaaacacaaccactgggattagccgagacacacagacgttgaagaggcttgcagaagagactggcgtccatatcatatctggagccgggttttatgtggatgcaactcactcctcagagaccagggccatgtcagtggagcagcttaccgatgtccttatgaatgaaattctccatggagctgatggaaccagtatcaagtgtggcattattggagaaattggttgctcctggcctttgactgagagtgaaagaaaggttctccaggccacagctcatgcccaggctcagcttggttgtcctgttattatccatcctggacggagctccagggcaccatttcagattatccgaatattgcaagaagcaggcgcagacatctccaaaacagtcatgtcacacctggataggactattcttgataagaaagagctcttggagtttgctcaacttggctgctacttggaatatgatctctttggtactgaactacttcattaccaactcggcccagatattgacatgcctgatgataacaaaagaattagaagggtgcgtctcctggtggaagagggctgtgaagatcgaattctggtagcacatgacatacatacgaaaacccggctgatgaaatatggaggtcacggctattctcatatactcaccaatgttgttcctaaaatgttgctgagaggcataactgagaatgtgcttgataagattctaatagagaaccctaagcaatggctaactttcaaataggatggttgcttatgaattcacaccttgagtataaaacttgcagagaacattcagcgatttccagtccactgtgagatattaatcagttacctaggactaatgacagatcatttccttctgatgagaactaggagggtttgccttctctgagaccagctattacaactgtgcctctagggagttactcagcctaattgagccctattattttaacttaacaaaataaatacagaagtacctatttctaaacaatgatttaaagtctatatcccctaagcggagttgttgtttttctccctaatctatcagctgcactacttgagaaaatttaaagtgtttctagttaaattatttccttcttgagcgatctaatgtttcttgtaatattgatgatcctactaattatcctgctgttctttaattaatgcttaatgaataatatggcactgtaaaatagcttctgcaacaagggaagttaaattttgagacttttttccccaaaggatactgactgtaatacaattaccaattcacaatgataaaaatattttgaaaggttaattttatactgtccacctatctatatattcttctactgaaatgattttgatatctttggctttccggtatctatttttgccatacattttgctgttttgcaaagtttgtataagaacacataacactactgaattataaaaattcaatcataaaagtcaaaatatattacataatatagtttaatgaatcattacatttataataacaaaggccacaatttaattaattggtaagatataatgcaaaaaaaaaaagagaaatgtttgccttatgtatattccctttatttcctttaccttttgtttttccttggacctaaacagagaaaataatgcttatgtatctgaagaaaaggtcagatctattggaaatgacagcccgatacttgagcctcctctttaaaaggtatccagccctgatattttgtgtaaataaaatgtttttaaaacctgttagttaaaacacttaggtgatgggcactgctgcttataaattcatcttttggttgaatcctcactatgctatttggtacctaaaaatattctccaaacccttgctgccagttcctctttgataaatatatagttaattcgaaataaaatccattgcaattcatttatgagttatcttacatatcacaaagaccaattagaattagtcattattcttgatgaagagtctgtttttaatcataaaaatcatgacagttactcagacccaggcatttcaacagagctaacaccaccttcagataggcacaccatgcataactcttgggaagttgagctttgctaaataaaagatatttctgctgatcaaagatgatcaagctttctgtgtattggaacagaaagtaacaaagaggaatgagccaggagaacaaactaattcctttaaataaataaataaaaaaaaatgcaaatgtccttcaccagtaaagcaagcaaatttttaaaatctctgtttttgaaatctactcgtcaaagagttttcagaggcaatgaaaggggaacagatttttcattgtaatagtggaagttgtgtgatagttaggagatatcaacatgcatttttaatcttttccttagatgaaagagatggcttttggcagtgtgttctaaccagaaagaaaggatttgtattactctccaaatctactgtactgtcagcttcactccacctgagaaaaaagaaaaaaaaattgatagctcaaatgcatgtaattcataaacactgcaaaggagagccacttggtgtctgcagtcctcatattaacagtctgtcacagaatgcagttaaagtattgattggcatatggtaatagagcaaccatagccttaacttacagacctgtgaaataaagggcattttgacctaatacaattaattttctggataactcttaaagagaagtcattttaactgtttttgctactccatatattgtcattcaaaatatattttaacccaaaataagttaaataatttgtgcatgtttgtgtgtgtatatatgcatacacttttttatattaaaattttgaggctatacagccactgtgccctgtggaataaagccatatatataaatgttttatatgtatatgttttatacataaataaaacatttcatctaatatatatatgtgtgtgtgagtatatgtgtgcatgtttagcagatatttgtataaaatataaacactctgttgtcatattggctatatgcgaaattgttaattttaaaataacctcaggccacagacttgtagtaatcatttgaaggcctcacctagtgtccccttggtgacgtatgcagcagctcaaattaaacctttgtgcattgggttatgaataatcttttcttccaaagatggcaaaagcctcggtttgatttgatactaaagaataaatttctctgactttcccagtgaatctaaatgtattcagttgacaaaatggacacataagggctttttctaaataccgtacataattacacattttcacacttagagggtaatcctatgatacactgtcaatctctattttaaaagactatcaccagaaaagagagaaaagaaaattcatataagaaaaagaaaatgtgaaaaagatcataggcttgggaattccctcaaatccagaaaattccaggttaaggcttgaagttgaatcattcccaggtctagctctaaggttaacaagagtacaaggcaaacaatttctttggggacaagcagcattatttcaattagaccttctcctgcagggcaaaaatcattcttccccacactatgaatggactccaagtatcataataagcaggtaaactcacaagaaccaaagctgacatatggataaaagcagcaagatcacagtacaccaaagtatcatatatatagaagaaataattcaatgtcttagatttgtctataaaaatttgtgatctatataggacttcattcacatggacactaacgataaggagtatttgctttggcggtagtggatcacacatctgcttatcttgctttgatattttttacataatgtttctgagtgatacagatgtgagtcaggtagcatttgatttccccacatatacacaactgaggtgccctgccattggcatcccctgggatccttgattcactgacgttagccatacgaatccagtgttcaaactcagaataataagcttagtttctgcattatcagtcagcataaataataaatccagaaaacgtgctgtatttgttgttgtttcctccatgggctttcccgccatctaatttgatatagacttcatctcccggctccaaatgaagaaccacactgttactggcatagtctgtttttgcagagatcagcccacatgctggtgccgtcccctccgcgcatcaggacgtggtaggtgaagaagtagatgcccgggatggagcaggtgaacttgccggtggtggggtcg

SEQ ID NO: 317022 - DNA, 3681 bp, Homo sapiens
ccagagggcgaagtgggagggcacaggggagactaaaaaggccagggaagttggcctgccggaagttcccagggagaaggcagcgcgttgtacccgagttacctgtagtcaaccacagtctgaaaatattaaggtattttaagacagaaagagagagaggagagaaaccgcattcacaaaaaagaaatcctctttttagaacatctcttggtggtaccatcagaaatgtcttccttaagtggaaaagtccaaaccgttttgggccttgtagagccaagcaaactgggccgtaccctgacccatgaacacctggccatgacctttgactgctgttactgtccacctcccccgtgccaggaagctatttccaaagaacctatcgtgatgaaaaatttatattggattcagaaaaacgcctattcccataaagaaaaccttcaattaaatcaggagacagaagccataaaggaagaactgttgtattttaaagctaatggtggaggggctttggtggaaaacacaaccactgggattagccgagacacacagacgttgaagaggcttgcagaagagactggcgtccatatcatatctggagccgggttttatgtggatgcaactcactcctcagagaccagggccatgtcagtggagcagcttaccgatgtccttatgaatgaaattctccatggagctgatggaaccagtatcaagtgtggcattattggagaaattggttgctcctggcctttgactgagagtgaaagaaaggttctccaggccacagctcatgcccaggctcagcttggttgtcctgttattatccatcctggacggagctccagggcaccatttcagattatccgaatattgcaagaagcaggcgcagacatctccaaaacagtcatgtcacacctggataggactattcttgataagaaagagctcttggagtttgctcaacttggctgctacttggaatatgatctctttggtactgaactacttcattaccaactcggcccagatattgacatgcctgatgataacaaaagaattagaagggtgcgtctcctggtggaagagggctgtgaagatcgaattctggtagcacatgacatacatacgaaaacccggctgatgaaatatggaggtcacggctattctcatatactcaccaatgttgttcctaaaatgttgctgagaggcataactgagaatgtgcttgataagattctaatagagaaccctaagcaatggctaactttcaaataggatggttgcttatgaattcacaccttgagtataaaacttgcagagaacattcagcgatttccagtccactgtgagatattaatcagttacctaggactaatgacagatcatttccttctgatgagaactaggagggtttgccttctctgagaccagctattacaactgtgcctctagggagttactcagcctaattgagccctattattttaacttaacaaaataaatacagaagtacctatttctaaacaatgatttaaagtctatatcccctaagcggagttgttgtttttctccctaatctatcagctgcactacttgagaaaatttaaagtgtttctagttaaattatttccttcttgagcgatctaatgtttcttgtaatattgatgatcctactaattatcctgctgttctttaattaatgcttaatgaataatatggcactgtaaaatagcttctgcaacaagggaagttaaattttgagacttttttccccaaaggatactgactgtaatacaattaccaattcacaatgataaaaatattttgaaaggttaattttatactgtccacctatctatatattcttctactgaaatgattttgatatctttggctttccggtatctatttttgccatacattttgctgttttgcaaagtttgtataagaacacataacactactgaattataaaaattcaatcataaaagtcaaaatatattacataatatagtttaatgaatcattacatttataataacaaaggccacaatttaattaattggtaagatataatgcaaaaaaaaaaagagaaatgtttgccttatgtatattccctttatttcctttaccttttgtttttccttggacctaaacagagaaaataatgcttatgtatctgaagaaaaggtcagatctattggaaatgacagcccgatacttgagcctcctctttaaaaggtatccagccctgatattttgtgtaaataaaatgtttttaaaacctgttagttaaaacacttaggtgatgggcactgctgcttataaattcatcttttggttgaatcctcactatgctatttggtacctaaaaatattctccaaacccttgctgccagttcctctttgataaatatatagttaattcgaaataaaatccattgcaattcatttatgagttatcttacatatcacaaagaccaattagaattagtcattattcttgatgaagagtctgtttttaatcataaaaatcatgacagttactcagacccaggcatttcaacagagctaacaccaccttcagataggcacaccatgcataactcttgggaagttgagctttgctaaataaaagatatttctgctgatcaaagatgatcaagctttctgtgtattggaacagaaagtaacaaagaggaatgagccaggagaacaaactaattcctttaaataaataaataaaaaaaaatgcaaatgtccttcaccagtaaagcaagcaaatttttaaaatctctgtttttgaaatctactcgtcaaagagttttcagaggcaatgaaaggggaacagatttttcattgtaatagtggaagttgtgtgatagttaggagatatcaacatgcatttttaatcttttccttagatgaaagagatggcttttggcagtgtgttctaaccagaaagaaaggatttgtattactctccaaatctactgtactgtcagcttcactccacctgagaaaaaagaaaaaaaaattgatagctcaaatgcatgtaattcataaacactgcaaaggagagccacttggtgtctgcagtcctcatattaacagtctgtcacagaatgcagttaaagtattgattggcatatggtaatagagcaaccatagccttaacttacagacctgtgaaataaagggcattttgacctaatacaattaattttctggataactcttaaagagaagtcattttaactgtttttgctactccatatattgtcattcaaaatatattttaacccaaaataagttaaataatttgtgcatgtttgtgtgtgtatatatgcatacacttttttatattaaaattttgaggctatacagccactgtgccctgtggaataaagccatatatataaatgttttatatgtatatgttttatacataaataaaacatttcatctaatatatatatgtgtgtgtgagtatatgtgtgcatgtttagcagatatttgtataaaatataaacactctgttgtcatattggctatatgcgaaattgttaattttaaaataacctcaggccacagacttgtagtaatcatttgaaggcctcacctagtgtccccttggtgacgtatgcagcagctcaaattaaacctttgtgcattgggtta

SEQ ID NO: 317023 - DNA, 4898 bp, Homo sapiens
ccagagggcgaagtgggagggcacaggggagactaaaaaggccagggaagttggcctgccggaagttcccagggagaaggcagcgcgttgtacccgagattcagggtctggctctgcttcccaggctagagtgcatttggcgcgatcacagctcactgcagcctcgacctcctgagctcaagcgaacttcctgcctcagcctcctgagcttcctgagtagctgcgactacagaaaaaagaaatcctctttttagaacatctcttggtggtaccatcagaaatgtcttccttaagtggaaaagtccaaaccgttttgggccttgtagagccaagcaaactgggccgtaccctgacccatgaacacctggccatgacctttgactgctgttactgtccacctcccccgtgccaggaagctatttccaaagaacctatcgtgatgaaaaatttatattggattcagaaaaacgcctattcccataaagaaaaccttcaattaaatcaggagacagaagccataaaggaagaactgttgtattttaaagctaatggtggaggggctttggtggaaaacacaaccactgggattagccgagacacacagacgttgaagaggcttgcagaagagactggcgtccatatcatatctggagccgggttttatgtggatgcaactcactcctcagagaccagggccatgtcagtggagcagcttaccgatgtccttatgaatgaaattctccatggagctgatggaaccagtatcaagtgtggcattattggagaaattggttgctcctggcctttgactgagagtgaaagaaaggttctccaggccacagctcatgcccaggctcagcttggttgtcctgttattatccatcctggacggagctccagggcaccatttcagattatccgaatattgcaagaagcaggcgcagacatctccaaaacagtcatgtcacacctggataggactattcttgataagaaagagctcttggagtttgctcaacttggctgctacttggaatatgatctctttggtactgaactacttcattaccaactcggcccagatattgacatgcctgatgataacaaaagaattagaagggtgcgtctcctggtggaagagggctgtgaagatcgaattctggtagcacatgacatacatacgaaaacccggctgatgaaatatggaggtcacggctattctcatatactcaccaatgttgttcctaaaatgttgctgagaggcataactgagaatgtgcttgataagattctaatagagaaccctaagcaatggctaactttcaaataggatggttgcttatgaattcacaccttgagtataaaacttgcagagaacattcagcgatttccagtccactgtgagatattaatcagttacctaggactaatgacagatcatttccttctgatgagaactaggagggtttgccttctctgagaccagctattacaactgtgcctctagggagttactcagcctaattgagccctattattttaacttaacaaaataaatacagaagtacctatttctaaacaatgatttaaagtctatatcccctaagcggagttgttgtttttctccctaatctatcagctgcactacttgagaaaatttaaagtgtttctagttaaattatttccttcttgagcgatctaatgtttcttgtaatattgatgatcctactaattatcctgctgttctttaattaatgcttaatgaataatatggcactgtaaaatagcttctgcaacaagggaagttaaattttgagacttttttccccaaaggatactgactgtaatacaattaccaattcacaatgataaaaatattttgaaaggttaattttatactgtccacctatctatatattcttctactgaaatgattttgatatctttggctttccggtatctatttttgccatacattttgctgttttgcaaagtttgtataagaacacataacactactgaattataaaaattcaatcataaaagtcaaaatatattacataatatagtttaatgaatcattacatttataataacaaaggccacaatttaattaattggtaagatataatgcaaaaaaaaaaagagaaatgtttgccttatgtatattccctttatttcctttaccttttgtttttccttggacctaaacagagaaaataatgcttatgtatctgaagaaaaggtcagatctattggaaatgacagcccgatacttgagcctcctctttaaaaggtatccagccctgatattttgtgtaaataaaatgtttttaaaacctgttagttaaaacacttaggtgatgggcactgctgcttataaattcatcttttggttgaatcctcactatgctatttggtacctaaaaatattctccaaacccttgctgccagttcctctttgataaatatatagttaattcgaaataaaatccattgcaattcatttatgagttatcttacatatcacaaagaccaattagaattagtcattattcttgatgaagagtctgtttttaatcataaaaatcatgacagttactcagacccaggcatttcaacagagctaacaccaccttcagataggcacaccatgcataactcttgggaagttgagctttgctaaataaaagatatttctgctgatcaaagatgatcaagctttctgtgtattggaacagaaagtaacaaagaggaatgagccaggagaacaaactaattcctttaaataaataaataaaaaaaaatgcaaatgtccttcaccagtaaagcaagcaaatttttaaaatctctgtttttgaaatctactcgtcaaagagttttcagaggcaatgaaaggggaacagatttttcattgtaatagtggaagttgtgtgatagttaggagatatcaacatgcatttttaatcttttccttagatgaaagagatggcttttggcagtgtgttctaaccagaaagaaaggatttgtattactctccaaatctactgtactgtcagcttcactccacctgagaaaaaagaaaaaaaaattgatagctcaaatgcatgtaattcataaacactgcaaaggagagccacttggtgtctgcagtcctcatattaacagtctgtcacagaatgcagttaaagtattgattggcatatggtaatagagcaaccatagccttaacttacagacctgtgaaataaagggcattttgacctaatacaattaattttctggataactcttaaagagaagtcattttaactgtttttgctactccatatattgtcattcaaaatatattttaacccaaaataagttaaataatttgtgcatgtttgtgtgtgtatatatgcatacacttttttatattaaaattttgaggctatacagccactgtgccctgtggaataaagccatatatataaatgttttatatgtatatgttttatacataaataaaacatttcatctaatatatatatgtgtgtgtgagtatatgtgtgcatgtttagcagatatttgtataaaatataaacactctgttgtcatattggctatatgcgaaattgttaattttaaaataacctcaggccacagacttgtagtaatcatttgaaggcctcacctagtgtccccttggtgacgtatgcagcagctcaaattaaacctttgtgcattgggttatgaataatcttttcttccaaagatggcaaaagcctcggtttgatttgatactaaagaataaatttctctgactttcccagtgaatctaaatgtattcagttgacaaaatggacacataagggctttttctaaataccgtacataattacacattttcacacttagagggtaatcctatgatacactgtcaatctctattttaaaagactatcaccagaaaagagagaaaagaaaattcatataagaaaaagaaaatgtgaaaaagatcataggcttgggaattccctcaaatccagaaaattccaggttaaggcttgaagttgaatcattcccaggtctagctctaaggttaacaagagtacaaggcaaacaatttctttggggacaagcagcattatttcaattagaccttctcctgcagggcaaaaatcattcttccccacactatgaatggactccaagtatcataataagcaggtaaactcacaagaaccaaagctgacatatggataaaagcagcaagatcacagtacaccaaagtatcatatatatagaagaaataattcaatgtcttagatttgtctataaaaatttgtgatctatataggacttcattcacatggacactaacgataaggagtatttgctttggcggtagtggatcacacatctgcttatcttgctttgatattttttacataatgtttctgagtgatacagatgtgagtcaggtagcatttgatttccccacatatacacaactgaggtgccctgccattggcatcccctgggatccttgattcactgacgttagccatacgaatccagtgttcaaactcagaataataagcttagtttctgcattatcagtcagcataaataataaatccagaaaacgtgctgtatttgttgttgtttcctccatgggctttcccgccatctaatttgatatagacttcatctcccggctccaaatgaagaaccacactgttactggcatagtcgtaattctgatcagcatcttgggcaattgcactagcacgcactgtttttgcagagatcagcccacatgctggtgccgtcccctccgcgcatcaggacgtggtaggtgaagaagtagatgcccgggatggagcaggtgaacttgccggtggtggggtcg

SEQ ID NO: 317024 - DNA, 4789 bp, Homo sapiens
ccagagggcgaagtgggagggcacaggggagactaaaaaggccagggaagttggcctgccggaagttcccagggagaaggcagcgcgttgtacccgagttacctgtagtcaaccacagtctgaaaatattaaggtattttaagacagaaagagagagaggagagaaaccgcattcacaaaaaagaaatcctctttttagaacatctcttggtggtaccatcagaaatgtcttccttaagtggaaaagtccaaaccgttttgggccttgtagagccaagcaaactgggccgtaccctgacccatgaacacctggccatgacctttgactgctgttactgtccacctcccccgtgccaggaagctatttccaaagaacctatcgtgatgaaaaatttatattggattcagaaaaacgcctattcccataaagaaaaccttcaattaaatcaggagacagaagccataaaggaagaactgttgtattttaaagctaatggtggaggggctttggtggaagagactggcgtccatatcatatctggagccgggttttatgtggatgcaactcactcctcagagaccagggccatgtcagtggagcagcttaccgatgtccttatgaatgaaattctccatggagctgatggaaccagtatcaagtgtggcattattggagaaattggttgctcctggcctttgactgagagtgaaagaaaggttctccaggccacagctcatgcccaggctcagcttggttgtcctgttattatccatcctggacggagctccagggcaccatttcagattatccgaatattgcaagaagcaggcgcagacatctccaaaacagtcatgtcacacctggataggactattcttgataagaaagagctcttggagtttgctcaacttggctgctacttggaatatgatctctttggtactgaactacttcattaccaactcggcccagatattgacatgcctgatgataacaaaagaattagaagggtgcgtctcctggtggaagagggctgtgaagatcgaattctggtagcacatgacatacatacgaaaacccggctgatgaaatatggaggtcacggctattctcatatactcaccaatgttgttcctaaaatgttgctgagaggcataactgagaatgtgcttgataagattctaatagagaaccctaagcaatggctaactttcaaataggatggttgcttatgaattcacaccttgagtataaaacttgcagagaacattcagcgatttccagtccactgtgagatattaatcagttacctaggactaatgacagatcatttccttctgatgagaactaggagggtttgccttctctgagaccagctattacaactgtgcctctagggagttactcagcctaattgagccctattattttaacttaacaaaataaatacagaagtacctatttctaaacaatgatttaaagtctatatcccctaagcggagttgttgtttttctccctaatctatcagctgcactacttgagaaaatttaaagtgtttctagttaaattatttccttcttgagcgatctaatgtttcttgtaatattgatgatcctactaattatcctgctgttctttaattaatgcttaatgaataatatggcactgtaaaatagcttctgcaacaagggaagttaaattttgagacttttttccccaaaggatactgactgtaatacaattaccaattcacaatgataaaaatattttgaaaggttaattttatactgtccacctatctatatattcttctactgaaatgattttgatatctttggctttccggtatctatttttgccatacattttgctgttttgcaaagtttgtataagaacacataacactactgaattataaaaattcaatcataaaagtcaaaatatattacataatatagtttaatgaatcattacatttataataacaaaggccacaatttaattaattggtaagatataatgcaaaaaaaaaaagagaaatgtttgccttatgtatattccctttatttcctttaccttttgtttttccttggacctaaacagagaaaataatgcttatgtatctgaagaaaaggtcagatctattggaaatgacagcccgatacttgagcctcctctttaaaaggtatccagccctgatattttgtgtaaataaaatgtttttaaaacctgttagttaaaacacttaggtgatgggcactgctgcttataaattcatcttttggttgaatcctcactatgctatttggtacctaaaaatattctccaaacccttgctgccagttcctctttgataaatatatagttaattcgaaataaaatccattgcaattcatttatgagttatcttacatatcacaaagaccaattagaattagtcattattcttgatgaagagtctgtttttaatcataaaaatcatgacagttactcagacccaggcatttcaacagagctaacaccaccttcagataggcacaccatgcataactcttgggaagttgagctttgctaaataaaagatatttctgctgatcaaagatgatcaagctttctgtgtattggaacagaaagtaacaaagaggaatgagccaggagaacaaactaattcctttaaataaataaataaaaaaaaatgcaaatgtccttcaccagtaaagcaagcaaatttttaaaatctctgtttttgaaatctactcgtcaaagagttttcagaggcaatgaaaggggaacagatttttcattgtaatagtggaagttgtgtgatagttaggagatatcaacatgcatttttaatcttttccttagatgaaagagatggcttttggcagtgtgttctaaccagaaagaaaggatttgtattactctccaaatctactgtactgtcagcttcactccacctgagaaaaaagaaaaaaaaattgatagctcaaatgcatgtaattcataaacactgcaaaggagagccacttggtgtctgcagtcctcatattaacagtctgtcacagaatgcagttaaagtattgattggcatatggtaatagagcaaccatagccttaacttacagacctgtgaaataaagggcattttgacctaatacaattaattttctggataactcttaaagagaagtcattttaactgtttttgctactccatatattgtcattcaaaatatattttaacccaaaataagttaaataatttgtgcatgtttgtgtgtgtatatatgcatacacttttttatattaaaattttgaggctatacagccactgtgccctgtggaataaagccatatatataaatgttttatatgtatatgttttatacataaataaaacatttcatctaatatatatatgtgtgtgtgagtatatgtgtgcatgtttagcagatatttgtataaaatataaacactctgttgtcatattggctatatgcgaaattgttaattttaaaataacctcaggccacagacttgtagtaatcatttgaaggcctcacctagtgtccccttggtgacgtatgcagcagctcaaattaaacctttgtgcattgggttatgaataatcttttcttccaaagatggcaaaagcctcggtttgatttgatactaaagaataaatttctctgactttcccagtgaatctaaatgtattcagttgacaaaatggacacataagggctttttctaaataccgtacataattacacattttcacacttagagggtaatcctatgatacactgtcaatctctattttaaaagactatcaccagaaaagagagaaaagaaaattcatataagaaaaagaaaatgtgaaaaagatcataggcttgggaattccctcaaatccagaaaattccaggttaaggcttgaagttgaatcattcccaggtctagctctaaggttaacaagagtacaaggcaaacaatttctttggggacaagcagcattatttcaattagaccttctcctgcagggcaaaaatcattcttccccacactatgaatggactccaagtatcataataagcaggtaaactcacaagaaccaaagctgacatatggataaaagcagcaagatcacagtacaccaaagtatcatatatatagaagaaataattcaatgtcttagatttgtctataaaaatttgtgatctatataggacttcattcacatggacactaacgataaggagtatttgctttggcggtagtggatcacacatctgcttatcttgctttgatattttttacataatgtttctgagtgatacagatgtgagtcaggtagcatttgatttccccacatatacacaactgaggtgccctgccattggcatcccctgggatccttgattcactgacgttagccatacgaatccagtgttcaaactcagaataataagcttagtttctgcattatcagtcagcataaataataaatccagaaaacgtgctgtatttgttgttgtttcctccatgggctttcccgccatctaatttgatatagacttcatctcccggctccaaatgaagaaccacactgttactggcatagtcgtaattctgatcagcatcttgggcaattgcactagcacgcactgtttttgcagagatcagcccacatgctggtgccgtcccctccgcgcatcaggacgtggtaggtgaagaagtagatgcccgggatggagcaggtgaacttgccggtggtggggtcg

SEQ ID NO: 317025 - DNA, 4363 bp, Homo sapiens
ccagagggcgaagtgggagggcacaggggagactaaaaaggccagggaagttggcctgccggaagttcccagggagaaggcagcgcgttgtacccgagttacctgtagtcaaccacagtctgaaaatattaaggtattttaagacagaaagagagagaggagagaaaccgcattcaccttaccgatgtccttatgaatgaaattctccatggagctgatggaaccagtatcaagtgtggcattattggagaaattggttgctcctggcctttgactgagagtgaaagaaaggttctccaggccacagctcatgcccaggctcagcttggttgtcctgttattatccatcctggacggagctccagggcaccatttcagattatccgaatattgcaagaagcaggcgcagacatctccaaaacagtcatgtcacacctggataggactattcttgataagaaagagctcttggagtttgctcaacttggctgctacttggaatatgatctctttggtactgaactacttcattaccaactcggcccagatattgacatgcctgatgataacaaaagaattagaagggtgcgtctcctggtggaagagggctgtgaagatcgaattctggtagcacatgacatacatacgaaaacccggctgatgaaatatggaggtcacggctattctcatatactcaccaatgttgttcctaaaatgttgctgagaggcataactgagaatgtgcttgataagattctaatagagaaccctaagcaatggctaactttcaaataggatggttgcttatgaattcacaccttgagtataaaacttgcagagaacattcagcgatttccagtccactgtgagatattaatcagttacctaggactaatgacagatcatttccttctgatgagaactaggagggtttgccttctctgagaccagctattacaactgtgcctctagggagttactcagcctaattgagccctattattttaacttaacaaaataaatacagaagtacctatttctaaacaatgatttaaagtctatatcccctaagcggagttgttgtttttctccctaatctatcagctgcactacttgagaaaatttaaagtgtttctagttaaattatttccttcttgagcgatctaatgtttcttgtaatattgatgatcctactaattatcctgctgttctttaattaatgcttaatgaataatatggcactgtaaaatagcttctgcaacaagggaagttaaattttgagacttttttccccaaaggatactgactgtaatacaattaccaattcacaatgataaaaatattttgaaaggttaattttatactgtccacctatctatatattcttctactgaaatgattttgatatctttggctttccggtatctatttttgccatacattttgctgttttgcaaagtttgtataagaacacataacactactgaattataaaaattcaatcataaaagtcaaaatatattacataatatagtttaatgaatcattacatttataataacaaaggccacaatttaattaattggtaagatataatgcaaaaaaaaaaagagaaatgtttgccttatgtatattccctttatttcctttaccttttgtttttccttggacctaaacagagaaaataatgcttatgtatctgaagaaaaggtcagatctattggaaatgacagcccgatacttgagcctcctctttaaaaggtatccagccctgatattttgtgtaaataaaatgtttttaaaacctgttagttaaaacacttaggtgatgggcactgctgcttataaattcatcttttggttgaatcctcactatgctatttggtacctaaaaatattctccaaacccttgctgccagttcctctttgataaatatatagttaattcgaaataaaatccattgcaattcatttatgagttatcttacatatcacaaagaccaattagaattagtcattattcttgatgaagagtctgtttttaatcataaaaatcatgacagttactcagacccaggcatttcaacagagctaacaccaccttcagataggcacaccatgcataactcttgggaagttgagctttgctaaataaaagatatttctgctgatcaaagatgatcaagctttctgtgtattggaacagaaagtaacaaagaggaatgagccaggagaacaaactaattcctttaaataaataaataaaaaaaaatgcaaatgtccttcaccagtaaagcaagcaaatttttaaaatctctgtttttgaaatctactcgtcaaagagttttcagaggcaatgaaaggggaacagatttttcattgtaatagtggaagttgtgtgatagttaggagatatcaacatgcatttttaatcttttccttagatgaaagagatggcttttggcagtgtgttctaaccagaaagaaaggatttgtattactctccaaatctactgtactgtcagcttcactccacctgagaaaaaagaaaaaaaaattgatagctcaaatgcatgtaattcataaacactgcaaaggagagccacttggtgtctgcagtcctcatattaacagtctgtcacagaatgcagttaaagtattgattggcatatggtaatagagcaaccatagccttaacttacagacctgtgaaataaagggcattttgacctaatacaattaattttctggataactcttaaagagaagtcattttaactgtttttgctactccatatattgtcattcaaaatatattttaacccaaaataagttaaataatttgtgcatgtttgtgtgtgtatatatgcatacacttttttatattaaaattttgaggctatacagccactgtgccctgtggaataaagccatatatataaatgttttatatgtatatgttttatacataaataaaacatttcatctaatatatatatgtgtgtgtgagtatatgtgtgcatgtttagcagatatttgtataaaatataaacactctgttgtcatattggctatatgcgaaattgttaattttaaaataacctcaggccacagacttgtagtaatcatttgaaggcctcacctagtgtccccttggtgacgtatgcagcagctcaaattaaacctttgtgcattgggttatgaataatcttttcttccaaagatggcaaaagcctcggtttgatttgatactaaagaataaatttctctgactttcccagtgaatctaaatgtattcagttgacaaaatggacacataagggctttttctaaataccgtacataattacacattttcacacttagagggtaatcctatgatacactgtcaatctctattttaaaagactatcaccagaaaagagagaaaagaaaattcatataagaaaaagaaaatgtgaaaaagatcataggcttgggaattccctcaaatccagaaaattccaggttaaggcttgaagttgaatcattcccaggtctagctctaaggttaacaagagtacaaggcaaacaatttctttggggacaagcagcattatttcaattagaccttctcctgcagggcaaaaatcattcttccccacactatgaatggactccaagtatcataataagcaggtaaactcacaagaaccaaagctgacatatggataaaagcagcaagatcacagtacaccaaagtatcatatatatagaagaaataattcaatgtcttagatttgtctataaaaatttgtgatctatataggacttcattcacatggacactaacgataaggagtatttgctttggcggtagtggatcacacatctgcttatcttgctttgatattttttacataatgtttctgagtgatacagatgtgagtcaggtagcatttgatttccccacatatacacaactgaggtgccctgccattggcatcccctgggatccttgattcactgacgttagccatacgaatccagtgttcaaactcagaataataagcttagtttctgcattatcagtcagcataaataataaatccagaaaacgtgctgtatttgttgttgtttcctccatgggctttcccgccatctaatttgatatagacttcatctcccggctccaaatgaagaaccacactgttactggcatagtcgtaattctgatcagcatcttgggcaattgcactagcacgcactgtttttgcagagatcagcccacatgctggtgccgtcccctccgcgcatcaggacgtggtaggtgaagaagtagatgcccgggatggagcaggtgaacttgccggtggtggggtcg

SEQ ID NO: 317026 - DNA, 2903 bp, Homo sapiens
cccggaactactcccacaggggggcggggaaggaagatggcggcgcccagcgtcccgtgaggagagaggacacagggatcccggggagcggccccagactcgtaaattatggccgcatctccgcacactctctcctcacgcctcctgacaggttgcgtaggaggctctgtctggtatcttgaaagaagaactatacaggactcccctcacaagttcttacatcttctcaggaatgtcaataagcagtggattacatttcagcactttagcttcctcaaacgcatgtatgtcacacagctgaacagaagccacaaccagcaagtaagacccaagccagaaccagtagcatctcctttccttgaaaaaacatcttcaggtcaagccaaagcagaaatatatgagatgagacctctctcaccgcccagcctatctttgtccagaaagccaaatgaaaaggaattgatagaactagagccagactcagtaattgaagactcaatagatgtagggaaagagacaaaagaggaaaagcggtggaaagagatgaagctgcaagtgtatgatttgccaggaattttggctcgactatccaaaatcaaactcacagctctggttgtaagtaccactgcagctggatttgcattggctccgggcccttttgactggccctgtttcctgcttacttctgttgggacaggccttgcatcctgtgctgccaactccatcaatcagttttttgaggtgccatttgactcaaacatgaataggacaaagaacagaccgctggttcgtggacagatcagcccattgctagctgtgtcctttgccacttgttgtgctgttccgggagttgccattctgaccttgggggtgaatccactcacaggagccctggggctcttcaacattttcctgtatacctgctgctacacaccactgaaaaggatcagcattgccaacacatgggtcggagctgtggttggggccatcccgcctgtcatgggctggacagcggccacgggcagcctcgatgctggcgcatttctcctgggaggaatcctctactcctggcagtttcctcatttcaacgccctgagctggggcctccgtgaagactactcccggggcggctactgcatgatgtcggtcacccacccgggcctgtgccggcgcgtggcgctgcgccactgcctggccctgctcgtgctgtccgcagcagcccctgtgctggacatcaccacatggaccttccccatcatggcccttcccatcaatgcgtacatctcctacctcggcttccgcttctacgtggacgcagaccgcaggagctcgcggagactgttcttctgcagcctgtggcacctgccgctgctgctgctgctcatgctcacctgcaagcggccgagcggaggcggggacgcagggccccctcccagctgagagcactgggacgcccaccgcccctttccctccgctgccaggcgagcatgttgtggtaattctggaacacaagaagagaaattgctgggtttagaacaagattataaacgaattcggtgctcagtgatcacttgacagttttttttttttttaaatattacccaaaatgctccccaaataagaaatgcatcagctcagtcagtgaatacaaaaaaggaattatttttccctttgagggtctttatacatctctcctccaaccccaccctctattctgtttcttcctcctcacatgggggtacacatacacagcttcctcttttggttccatccttaccaccacaccacacgcacactccacatgcccagcagagtggcacttggtggccagaaagtgtgagcctcatgatctgctgtctgtagttctgtgagctcaggtccctcaaaggcctcggagcacccccttcctggtgactgagccagggcctgcatttttggttttccccaccccacacattctcaaccatagtccttctaacaataccaatagctaggacccggctgctgtgcactgggactggggattccacatgtttgccttgggagtctcaagctggactgccagcccctgtcctcccttcacccccattgcgtatgagcatttcagaactccaaggagtcacaggcatctttatagttcacgttaacatatagacactgttggaagcagttccttctaaaagggtagccctggacttaataccagccggatacctctggcccccaccccattactgtacctctggagtcactactgtgggtcgccactcctctgctacacagcacggctttttcaaggctgtattgagaagggaagttaggaagaagggtgtgctgggctaaccagcccacagagctcacattcctgtcccttgggtgaaaaatacatgtccatcctgatatctcctgaattcagaaattagcctccacatgtgcaatggctttaagagccagaagcagggttctgggaattttgcaagttatcctgtggccaggtgtggtctcggttaccaaatacggttacctgcagctttttagtcctttgtgctcccacgggtctgcagagtcccatctgcccaaaggtcttgaagcttgacaggatgttttcattactcagtctcccagggcactgctggtccgtagggattcattggtcggggtgggagagttaaacaacatttaaacagagttctctcaaaaatgtctaaagggattgtaggtagataacatccaatcactgtttgcacttatctgaaatcttccctcttggctgcccccaggtatttactgtggagaacattgcataggaatgtctggaaaaagcctctacaacttgttacagccttcacatttgtacaattcattgattctcttttccttccacaataaaatggtatacaaga

SEQ ID NO: 317027 - DNA, 874 bp, Homo sapiens
cccggaactactcccacaggggggcggggaaggaagatggcggcgcccagcgtcccgtgaggagagaggacacagggatcccggggagcggccccagactcgtaaattatggccgcatctccgcacactctctcctcacgcctcctgacaggttgcgtaggaggctctgtctggtatcttgaaagaagaactatacaggactcccctcacaagttcttacatcttctcaggaatgtcaataagcagtggattacatttcagcactttagcttcctcaaacgcatgtatgtcacacagctgaacagaagccacaaccagcaagtaagacccaagccagaaccagtagcatctcctttccttgaaaaaacatcttcaggtcaagccaaagcagaaatatatgagatgagacctctctcaccgcccagcctatctttgtccagaaagccaaatgaaaaggaattgatagaactagagccagactcagtaattgaagactcaatagatgtagggaaagagacaaaagaggaaaagcggtggaaagagatgaagctgcaagtgtatgatttgccaggaattttggctcgactatccaaaatcaaactcacaggtactttgtttttctgatatacttacttatttgaaactctatctttagtgaaacaaaaagctaattttatttaccacctgaaaagaataatttggaactgcaggtcctgtcttagtatttttcctctcttcaatttaactgggatttgaaattaaattttcttgaattctatttacacagaattgtaaatagtattgcattgtaagtattgtattaaaaatagtcaccctttcctttgcaattaaagttgaatgtttatcctgctta

SEQ ID NO: 317028 - DNA, 3534 bp, Homo sapiens
cccggaactactcccacaggggggcggggaaggaagatggcggcgcccagcgtcccgtgaggagagaggacacagggatcccggggagcggccccagactcgtaaattatggccgcatctccgcacactctctcctcacgcctcctgacaggttgcgtaggaggctctgtctggtatcttgaaagaagaactatacaggactcccctcacaagttcttacatcttctcaggaatgtcaataagcagtggattacatttcagcactttagcttcctcaaacgcatgtatgtcacacagctgaacagaagccacaaccagcaagtaagacccaagccagaaccagtagcatctcctttccttgaaaaaacatcttcaggtcaagccaaagcagaaatatatgagatgagacctctctcaccgcccagcctatctttgtccagaaagccaaatgaaaaggaattgatagaactagagccagactcagtaattgaagactcaatagatgtagggaaagagacaaaagaggaaaagcggtggaaagagatgaagctgcaagtgtatgatttgccaggaattttggctcgactatccaaaatcaaactcacagctctggttgtaagtaccactgcagctggatttgcattggctccgggcccttttgactggccctgtttcctgcttacttctgttgggacaggccttgcatcctgtgctgccaactccatcaatcagttttttgaggtgccatttgactcaaacatgaataggacaaagaacagaccgctggttcgtggacagatcagcccattgctagctgtgtcctttgccacttgttgtgctgttccgggagttgccattctgaccttgggggtgaatccactcacaggagccctggggctcttcaacattttcctgtatacctgctgctacacaccactgaaaaggatcagcattgccaacacatgggtcggagctgtggttggggccatcccgcctgtcatgggctggacagcggccacgggcagcctcgatgctggcgcatttctcctgggaggaatcctctactcctggcagtttcctcatttcaacgccctgagctggggcctccgtgaagactactcccggggcggctactgcatgatgtcggtcacccacccgggcctgtgccggcgcgtggcgctgcgccactgcctggccctgctcgtgctgtccgcagcagcccctgtgctggacatcaccacatggaccttccccatcatggcccttcccatcaatgcgtacatctcctacctcggcttccgcttctacgtggacgcagaccgcaggagctcgcggagactgttcttctgcagcctgtggcacctgccgctgctgctgctgctcatgctcacctgcaagcggccgagcggaggcggggacgcagggccccctcccagctgagagcactgggacgcccaccgcccctttccctccgctgccaggcgagcatgttgtggtaattctggaacacaagaagagaaattgctgggtttagaacaagattataaacgaattcggtgctcagtgatcacttgacagttttttttttttttaaatattacccaaaatgctccccaaataagaaatgcatcagctcagtcagtgaatacaaaaaaggaattatttttccctttgagggtctttatacatctctcctccaaccccaccctctattctgtttcttcctcctcacatgggggtacacatacacagcttcctcttttggttccatccttaccaccacaccacacgcacactccacatgcccagcagagtggcacttggtggccagaaagtgtgagcctcatgatctgctgtctgtagttctgtgagctcaggtccctcaaaggcctcggagcacccccttcctggtgactgagccagggcctgcatttttggttttccccaccccacacattctcaaccatagtccttctaacaataccaatagctaggacccggctgctgtgcactgggactggggattccacatgtttgccttgggagtctcaagctggactgccagcccctgtcctcccttcacccccattgcgtatgagcatttcagaactccaaggagtcacaggcatctttatagttcacgttaacatatagacactgttggaagcagttccttctaaaagggtagccctggacttaataccagccggatacctctggcccccaccccattactgtacctctggagtcactactgtgggtcgccactcctctgctacacagcacggctttttcaaggctgtattgagaagggaagttaggaagaagggtgtgctgggctaaccagcccacagagctcacattcctgtcccttgggtgaaaaatacatgtccatcctgatatctcctgaattcagaaattagcctccacatgtgcaatggctttaagagccagaagcagggttctgggaattttgcaagttatcctgtggccaggtgtggtctcggttaccaaatacggttacctgcagctttttagtcctttgtgctcccacgggtctgcagagtcccatctgcccaaaggtcttgaagcttgacaggatgttttcattactcagtctcccagggcactgctggtccgtagggattcattggtcggggtgggagagttaaacaacatttaaacagagttctctcaaaaatgtctaaagggattgtaggtagataacatccaatcactgtttgcacttatctgaaatcttccctcttggctgcccccaggtatttactgtggagaacattgcataggaatgtctggaaaaagcctctacaacttgttacagccttcacatttgtacaattcattgattctcttttccttccacaataaaatggtatacaagaacaggagtgtgtgtgacgtcattggaagtaatcatcctgtgctgagttcgcacagttcttggtagaaccgacacttgatcacgccttcaagagctggcagagggtgcgtgggaggttggttttgtttcgtaaattgacaaattgtagttgtgtatatttatgaggtaataaagtgatgttatgatttatgaagacaattgaaataatgaaatcaagctgatgaatgtattcattacctcagatacttatttttgtgataagaacatttttaatgtactcagtaattttgaaattagaatacattatttcctgcattcacacagtgtgtgatgtacgtcaaagggaggagacgtactcatcataactgactttgtaccctttcaccatcttgtacccattccgttcaactcccagcctctctaaccaccattctactctctgcttcaagtctgattattctggattccacatagaagtaagaacatgcagtatttatctttctgtgccatattaagttgagaactttaaccttttcgcttaagagcagcaccttctggcttctctgacatctctggattgccagcatcactatgtgaggccatgattaagcaaaataaagcttactgagcac

SEQ ID NO: 317029 - DNA, 2853 bp, Homo sapiens
cccggaactactcccacaggggggcggggaaggaagatggcggcgcccagcgtcccgtgaggagagaggacacagggatcccggggagcggccccagactcgtaaattatggccgcatctccgcacactctctcctcacgcctcctgacaggttgcgtaggaggctctgtctggtatcttgaaagaagaactatacaggactcccctcacaagttcttacatcttctcaggaatgtcaataagcagtggattacatttcagcactttagcttcctcaaacgcatgtatgtcacacagctgaacagaagccacaaccagcaagtaagacccaaccaaagcagaaatatatgagatgagacctctctcaccgcccagcctatctttgtccagaaagccaaatgaaaaggaattgatagaactagagccagactcagtaattgaagactcaatagatgtagggaaagagacaaaagaggaaaagcggtggaaagagatgaagctgcaagtgtatgatttgccaggaattttggctcgactatccaaaatcaaactcacagctctggttgtaagtaccactgcagctggatttgcattggctccgggcccttttgactggccctgtttcctgcttacttctgttgggacaggccttgcatcctgtgctgccaactccatcaatcagttttttgaggtgccatttgactcaaacatgaataggacaaagaacagaccgctggttcgtggacagatcagcccattgctagctgtgtcctttgccacttgttgtgctgttccgggagttgccattctgaccttgggggtgaatccactcacaggagccctggggctcttcaacattttcctgtatacctgctgctacacaccactgaaaaggatcagcattgccaacacatgggtcggagctgtggttggggccatcccgcctgtcatgggctggacagcggccacgggcagcctcgatgctggcgcatttctcctgggaggaatcctctactcctggcagtttcctcatttcaacgccctgagctggggcctccgtgaagactactcccggggcggctactgcatgatgtcggtcacccacccgggcctgtgccggcgcgtggcgctgcgccactgcctggccctgctcgtgctgtccgcagcagcccctgtgctggacatcaccacatggaccttccccatcatggcccttcccatcaatgcgtacatctcctacctcggcttccgcttctacgtggacgcagaccgcaggagctcgcggagactgttcttctgcagcctgtggcacctgccgctgctgctgctgctcatgctcacctgcaagcggccgagcggaggcggggacgcagggccccctcccagctgagagcactgggacgcccaccgcccctttccctccgctgccaggcgagcatgttgtggtaattctggaacacaagaagagaaattgctgggtttagaacaagattataaacgaattcggtgctcagtgatcacttgacagttttttttttttttaaatattacccaaaatgctccccaaataagaaatgcatcagctcagtcagtgaatacaaaaaaggaattatttttccctttgagggtctttatacatctctcctccaaccccaccctctattctgtttcttcctcctcacatgggggtacacatacacagcttcctcttttggttccatccttaccaccacaccacacgcacactccacatgcccagcagagtggcacttggtggccagaaagtgtgagcctcatgatctgctgtctgtagttctgtgagctcaggtccctcaaaggcctcggagcacccccttcctggtgactgagccagggcctgcatttttggttttccccaccccacacattctcaaccatagtccttctaacaataccaatagctaggacccggctgctgtgcactgggactggggattccacatgtttgccttgggagtctcaagctggactgccagcccctgtcctcccttcacccccattgcgtatgagcatttcagaactccaaggagtcacaggcatctttatagttcacgttaacatatagacactgttggaagcagttccttctaaaagggtagccctggacttaataccagccggatacctctggcccccaccccattactgtacctctggagtcactactgtgggtcgccactcctctgctacacagcacggctttttcaaggctgtattgagaagggaagttaggaagaagggtgtgctgggctaaccagcccacagagctcacattcctgtcccttgggtgaaaaatacatgtccatcctgatatctcctgaattcagaaattagcctccacatgtgcaatggctttaagagccagaagcagggttctgggaattttgcaagttatcctgtggccaggtgtggtctcggttaccaaatacggttacctgcagctttttagtcctttgtgctcccacgggtctgcagagtcccatctgcccaaaggtcttgaagcttgacaggatgttttcattactcagtctcccagggcactgctggtccgtagggattcattggtcggggtgggagagttaaacaacatttaaacagagttctctcaaaaatgtctaaagggattgtaggtagataacatccaatcactgtttgcacttatctgaaatcttccctcttggctgcccccaggtatttactgtggagaacattgcataggaatgtctggaaaaagcctctacaacttgttacagccttcacatttgtacaattcattgattctcttttccttccacaataaaatggtatacaaga

SEQ ID NO: 317030 - DNA, 1325 bp, Homo sapiens
  misc_feature (17)..(17): n is a, c, g, or t
  misc_feature (35)..(35): n is a, c, g, or t
  misc_feature (75)..(75): n is a, c, g, or t
tcaaaaacccaaaaccnaccaaaaaaagctggccnttttaaccataaaattaattatgatgagccatttttagcntcttgtgtcctgtcatattattattgaatgaagcatatctcagtgtttatctgtcaggttttgaaacatttcatatatgtccaaatacttggcaggatttaaaaaaaaatagtgaatttggtgtaaagttgctattttatggaaatgcctctaactttacattttcattccatctgtagatttttctatctttataaaatattggagttattttttaaggaaaaatagaaaagtagcttgtgaatagctcaaactaagcttacaaatcgcatgtaaaaaagcaaaaaagttatttgtgtctgtttatattgcttccttttttgtagcctttgtacctgtacagggtgacagtaagggccaagcaggagaggcgtaatccttgtataaaataggatccagcgacactcttgtatttatctgttctctttttagtcagtcacttcaaaaaaacaaaaaacaaacaaaaaaaagctgtacattttaacataaaataaattatgatgagccatttttagcctcttgtgtcctgtcatattatgattgatagagaatgaccaatggaactgtatcatgtgtcacgcctcagaacacatacacattttgggaaaataaattatttagtgtaaattggagttatgggattttctgatttgttttgactttgggggaggggttggcaataaataagagtaatatctaataaaaccatcacatataccaaatacctatttaataaattaatttataatggattttaatgcttttcatgaaagtttattttatgcgagtgcataccttctgtatgccaatcattgtctttaaaataaagtgaaattgtttttttcttttggactttgatcttcatttgcaaagagatcccgcacaaatatccagctgcctcactcgcacagtctgtagaaacatccctccaagcctcgcaccagggtagcaaacttcctttttataaagattcataccaaaaaaagcacccaatttgggattgtatgtttgaaaaatcattttctttttaaaaagtgtgaacgttttgctctgttgtgaatgattaattgtatgttttctttagagtctaaagtttagaccccctgccaaaagtgaatattcacaagtatagcgttcagagaaagttctgagtgttgcttgaatttggttatttgagcaacaagtctagaaatgaatgcttgacctagcacccgtgtgaaactagcccgttaagctctccaggtgtctga

SEQ ID NO: 317031 - DNA, 434 bp, Homo sapiens
tagaaggccctataaggttcttcagagattagaatcttagttctcccgtactacattgtcaaaacatatctggatataggaaattgtggaaatgtaaaagctggactcttaaaaatattccttctaatgctgcagtgtctgaagaagagcgagaagctgagaaagaggctgagcggctaatggaacaagctagctgctgggagaaggaggaacaagaaatcctgtcaactagagctaacagtaggcaatcacctgcaaaagtacaatcgaaaaataaatatttgcattccccggagagccggccagtcacaggggagcgagggcagctgctggagctgtctaaagagagcagtgaagaagaagaggaggaggaggacgagggagggcaaggtggctacacagaaactgggatcctgcttagagtcgagcaacca

SEQ ID NO: 317032 - DNA, 8708 bp, Homo sapiens
  misc_feature (3)..(6): n is a, c, g, or t
  misc_feature (8)..(8): n is a, c, g, or t
ggnnnnangcaacgacaacaacagggggacacaaaatggcggcggcttagctcctacccctggcggcggcggcagcggtggcggaggcgacggcacctcctccaggcggcagccgcagtttctcaggcagcggcagcgcccccggcaggcgcggtggcggtggcgcgcagccagatttgcctgaagacctggataatctccatttttgtcatgggactgttaaaaacgtttggaagttccaattctggtcttgatttcccagttaaagatgttcttcacccgaatgcagtctttcctgttggtaaaataagacaaccatcaacattgcctgtttgtctgcttttgaatctcttaaggatggatgtttgtaagatgttgcttaatacagtctggaatactctgtccatttgttgaattgtaaatgactttcaaatgtgcaagttctgttaaatacaaagagaacctctatgggtaacttttgtgttgaagaagtcatttgtcaaccatggtaaaacttgcaaacccactttatacagagtggattcttgaagctatacagaaaataaaaaagcaaaagcaaaggccctctgaagagagaatctgccatgcggtcagtacttcccatgggttggataagaagacagtctctgaacagctggaactcagtgttcaggatggctcagttctcaaagtcaccaacaaaggccttgcctcctataaggacccagacaaccctgggcgcttttcatcagttaaaccaggcacttttcctaagtcagccaaggggtctagaggatcatgtaatgatctccgcaatgtggattggaataaacttttaaggagagcaattgaaggacttgaggagccgaatggctcctccctgaagaacatagagaagtatctcagaagtcaaagtgatctcacaagcaccaccaacaacccagcctttcagcagcggctgcgactgggggccaaacgcgctgtgaataatgggaggttactgaaagacggaccgcagtacagggtcaattatgggagcttagatggcaaaggggcacctcagtatcccagtgcattcccatcctcgctcccacctgtcagccttctaccccatgagaaagaccagccccgtgctgatcccattccaatatgtagcttctgtttggggactaaagaatcaaatcgtgaaaagaaaccagaagaactcctctcttgtgcagattgtggcagtagtggacacccatcctgtttgaaattttgtcctgaattaacaacaaatgtaaaggccttaaggtggcagtgcatcgaatgcaagacatgcagtgcctgtagagtccaaggcagaaatgctgataatatgcttttttgtgattcctgtgatagaggatttcatatggaatgctgtgacccaccactttccagaatgccaaaagggatgtggatttgccaagtctgcagaccaaagaaaaagggaagaaaactacttcatgagaaagctgcacaaataaaacgacgatatgcaaaacccattggacgaccgaaaaataaattaaagcaacgattgttgtctgtaaccagtgatgaaggatccatgaatgcattcacaggaagggggtcacctggtaggggtcaaaagactaaagtctgtaccacaccttcatctggtcatgctgcatctgggaaggactcaagcagcagattggctgttacagaccccactcggcctggtgccaccaccaaaatcaccaccacctccacctacatttctgcctctacacttaaagttaacaagaaaaccaaagggctcattgatggccttactaagttttttacaccatcacctgatggtcgcagatcacgaggtgaaattatagacttttcaaagcactatcgtccaaggaaaaaggtctctcagaaacagtcatgcacttctcatgtgttggctacaggtaccacacaaaagctaaaacctccaccttcttcacttccacccccaacccccatctccggtcagagccccagttcacaaaagtccagcacggccacttcttctccctctccccagagttcttccagccagtgcagtgtgccctccctgagcagccttaccactaacagccagctgaaggcactctttgatgggctttctcatactataccactcagggacagtctcgcaaaaagggacaccccgagttatgcaccacccaaacgtatgcgtcgtaaaactgaattatcttccacggcaaaatctaaagcccacttctttggcaaaagagatattagaagtcggtttatttctcactcctcctcctctagctgggggatggctagaggaagtatttttaaagcaattgctcacttcaagcgaacaactttccttaaaaagcacaggatgctaggcagattaaaatataaagtgacccctcagatggggaccccctcaccagggaaggggagcttgacagacggaaggattaaacctgatcaggatgatgatactgaaataaaaataaacatcaaacaagaaagtgcagatgtaaatgtgattggaaacaaggatgtcgttactgaagaggatttggatgtttttaagcaggcccaggaactttcttgggagaaaatagagtgtgagagtggggtggaagactgtggccggtacccttctgtgattgaatttggtaaatatgaaatccaaacctggtactcctcgccttacccacaggaatatgcaagattaccaaagctttacctgtgtgaattctgtcttaaatatatgaaaagtaaaaatattttgctaagacactccaagaagtgtggatggtttcatcctccagcaaatgaaatttaccgaaggaaagacctttcagtatttgaggttgatgggaatatgagcaaaatttattgccaaaacctttgcttgttagccaagctcttcctggaccacaaaacgttgtattatgatgtcgagccattccttttttatgtccttacaaaaaatgatgaaaagggctgtcatctggttggatacctctctaaggaaaagctttgccagcagaagtataatgtctcctgcataatgatcatgccccagcaccaaaggcaaggatttggacggtttctcattgatttcagctatttgctttctagaagagaaggccaagcagggtctcctgaaaagcctctctccgatctgggccgtctctcctacctggcatattggaagagcgtcatcttggagtatctctaccaccaccatgagaggcacatcagcatcaaggcaattagcagagcgacgggcatgtgcccacatgacattgccaccactctgcagcacctccacatgatcgacaagagagatggcagatttgtcatcattagacgggaaaagttgatattgagccacatggaaaagctgaaaacctgttccagagccaatgaacttgatccagacagtctgaggtggaccccaattttaatttctaatgctgcagtgtctgaagaagagcgagaagctgagaaagaggctgagcggctaatggaacaagctagctgctgggagaaggaggaacaagaaatcctgtcaactagagctaacagtaggcaatcacctgcaaaagtacaatcgaaaaataaatatttgcattccccggagagccggccagtcacaggggagcgagggcagctgctggagctgtctaaagagagcagtgaagaagaagaggaggaggaggacgaggaggaggaagaagaggaggaagaagaggaagaggatgaagaggaggaagaagaggaagaagaagaagaagaagaagaaaatattcaaagctctcccccaagattgacgaaaccacagtcagttgccataaagagaaagaggccttttgtactaaagaagaaaaggggtcgtaaacgcaggaggatcaacagcagtgtaacaacagagaccatttcagagacgacagaagtactgaatgagccctttgacaactcagatgaagagaggccaatgccacagctggagcctacctgtgagattgaagtggaggaagatggcaggaagccagtcctgagaaaagcattccagcatcagcctgggaagaaaagacaaacagaggaagaggaaggaaaagacaatcattgcttcaagaatgctgacccttgtagaaacaatatgaatgatgattcaagtaacttgaaagaaggcagtaaagacaatcccgaacctctaaagtgcaaacaagtgtggccaaaaggaacaaagcgcggtctatctaagtggaggcaaaacaaagagaggaagaccggatttaaactgaatttgtacaccccgccagaaacacccatggagcctgacgagcaggtaacagtggaagaacagaaggagacttcagaaggaaaaaccagccccagtcccatcaggattgaggaggaggtcaaggaaactggggaagccctgttgcctcaagaggaaaacagaagggaagaaacatgtgcccctgtaagtccaaacacatcaccaggtgaaaaaccagaagatgatctcatcaaacctgaggaagaggaagaggaggaggaggaggaagaggaagaagaggaagaagaggaaggggaagaagaagaaggaggaggaaatgtagaaaaagatccagatggtgctaaaagccaagaaaaagaggaaccagaaatctccacggaaaaagaagactctgcacgtttggatgatcacgaagaggaggaggaagaggatgaagagccatcccacaacgaggaccatgatgccgatgacgaggatgacagccacatggagtctgccgaagtggagaaggaagagctgcccagagaaagcttcaaagaagtactggaaaaccaggagacttttttagaccttaatgtgcagcctggtcactcgaacccagaggtcttaatggactgtggcgtcgacctgacagcttcttgtaacagtgagcccaaggagcttgctggggaccctgaagctgtacccgaatctgacgaggagccacccccaggagaacaggcacagaagcaggaccaaaagaacagcaaggaagtcgatacagagttcaaagagggaaacccagcaaccatggaaatcgactctgagactgtccaggccgttcagtctttgacccaggagagcagcgaacaggacgacacctttcaggattgtgccgagactcaagaggcctgtagaagcctacagaactacacccgtgcagaccaaagtccacagattgccaccacgctcgacgattgccaacagtcggaccacagtagcccagtttcatccgtccactcccatcctggccagtccgtacgttctgtcaacagcccaagtgtccctgctctggaaaacagctacgcccaaatcagcccagatcaaagtgccatctcagtgccatctctgcagaacatggaaaccagtcccatgatggatgtcccatcagtttcagatcattcacagcaagtcgtagacagtggatttagtgacctgggcagtatcgagagcacaactgagaactacgaaaacccaagcagctacgattctactatgggaggcagcatctgtggaaacggctcttcacagaacagctgctcctatagcaacctcacctccagcagtctgacacagagcagctgtgctgtcacccagcagatgtccaacatcagcgggagctgcagcatgctgcagcaaaccagcatcagctcccctccgacctgcagcgtcaagtctcctcaaggctgtgtggtggagaggcctccgagcagcagccagcagctggctcagtgcagcatggctgctaacttcaccccacccatgcagctggctgaaatccccgagacgagcaacgccaacattggcttatacgagcgaatgggtcagagtgattttggggctgggcattacccgcagccgtcagccaccttcagccttgccaaactgcagcagttaactaatacacttattgatcattcattgccttacagccattccgctgctgtgacttcctatgcaaacagtgcctctttgtccacaccattaagtaacacagggcttgttcaactttctcagtctccacactccgtccctgggggaccccaagcacaagctaccatgaccccaccccccaacctgactcctcctccaatgaatctgccgccgcctcttttgcaacggaacatggctgcatcaaatattggcatctctcacagccaaagactgcaaacccagattgccagcaagggccacatctccatgagaaccaagtcagcgtctctgtcaccagccgctgccacccatcagtcacaaatctatgggcgctcccagactgtagccatgcagggtcctgcacggactttaacgatgcaaagaggcatgaacatgagtgtgaacctgatgccagcgccagcctacaatgtcaactctgtgaacatgaacatgaacactctcaacgccatgaatgggtacagcatgtcccagccaatgatgaacagtggctaccacagcaatcatggctatatgaatcaaacgccccaataccctatgcagatgcagatgggcatgatgggcacccagccatatgcccagcagccaatgcagaccccaccccacggtaacatgatgtacacggcccccggacatcacggctacatgaacacaggcatgtccaaacagtctctcaatggctcctacatgagaaggtagacaacgtgggcagtccacaaaacctacggggcatcactattggattgatctgcacaaatacctttgaagagtacgatttcaaaaccagcaattggtgtgaatgcaaaaacatttgttggcaccatttatttaaaaaaaaaaaaagctgtatgcagcagaaagccttatacaagttgtttttctttttttcctttttctttttttggtaccttcatttctgttacttttatataaaattctctgcaaaggaaggcctctctttggactacaatttggaggcagccacttgttgtgcctgcttctgttaaacaatgtggatatcaagcccccccaaattatctgttttaatattgaacctagagctttttttttcccttccctgtccactccatgtaaatgcctttagcatttcagttattgtatattttgtttaaggtgacacttcagcatgccgctaatgtctttgttagtgacagtgcattttgtagtactgtacaagtgttgtgctaacagtaagccatttcttaagttttttgccttgattagggtgccctaatttgagggttttaaaaaaaactatatttttgttaattataaaactgtaaagagctataaaagctattcccatttggttagtcaaaagggttttattgctaaatgttggtgtaaagttgagacccttttccattttggtgacagatttctttggggaaaaaaggcagctttctgttttataaatgcagacttctgtttattgaatgaagcatatctcagtgtttatctgtcaggttttgaaacatttcatatatgtccaaatacttggcaggatttaaaaaaaaatagtgaatttggtgtaaagttgctattttatggaaatgcctctaactttacattttcattccatctgtagatttttctatctttataaaatattggagttattttttaaggaaaaatagaaaagtagcttgtgaatagctcaaactaagcttacaaatcgcatgtaaaaaagcaaaaaagttatttgtgtctgtttatattgcttccttttttgtagcctttgtacctgtacagggtgacagtaagggccaagcaggagaggcgtaatccttgtataaaataggatccagcgacactcttgtatttatctgttctctttttagtcagtcacttcaaaaaaacaaaaaacaaacaaaaaaaagctgtacattttaacataaaataaattatgatgagccatttttagcctcttgtgtcctgtcatattatgattgatagagaatgaccaatggaactgtatcatgtgtcacgcctcagaacacatacacattttgggaaaataaattatttagtgtaaattggagttatgggattttctgatttgttttgactttgggggaggggttggcaataaataagagtaatatctaataaaaccatcacatataccaaatacctatttaataaattaatttataatggattttaatgcttttcatgaaagtttattttatgcgagtgcataccttctgtatgccaatcattgtctttaaaataaagtgaaattgtttttttcttttggactttgatcttcatttgcaaagagatcccgcacaaatatccagctgcctcactcgcacagtctgtagaaacatccctccaagcctcgcaccagggtagcaaacttcctttttataaagattcataccaaaaaaagcacccaatttgggattgtatgtttgaaaaatcattttctttttaaaaagtgtgaacgttttgctctgttgtgaatgattaattgtatgttttctttagagtctaaagtttagaccccctgccaaaagtgaatattcacaagtatagcgttcagagaaagttctgagtgttgcttgaatttggttatttgagcaacaagtctagaaatgaatgcttgacctagcacccgtgtgaaactagcccgttaagctctccaggtgtctga

SEQ ID NO: 317033 - DNA, 7832 bp, Homo sapiens
  misc_feature (3)..(6): n is a, c, g, or t
  misc_feature (8)..(8): n is a, c, g, or t
ggnnnnangcaacgacaacaacagggggacacaaaatggcggcggcttagctcctacccctggcggcggcggcagcggtggcggaggcgacggcacctcctccaggcggcagccgcagtttctcaggcagcggcagcgcccccggcaggcgcggtggcggtggcgcgcagccagatttgcctgaagacctggataatctccatttttgtcatgggactgttaaaaacgtttggaagttccaattctggtcttgatttcccagttaaagatgttcttcacccgaatgcagtctttcctgttggtaaaataagacaaccatcaacattgcctgtttgtctgcttttgaatctcttaaggatggatgtttgtaagatgttgcttaatacagtctggaatactctgtccatttgttgaattgtaaatgactttcaaatgtgcaagttctgttaaatacaaagagaacctctatgggtaacttttgtgttgaagaagtcatttgtcaaccatggtaaaacttgcaaacccactttatacagagtggattcttgaagctatacagaaaataaaaaagcaaaagcaaaggccctctgaagagagaatctgccatgcggtcagtacttcccatgggttggataagaagacagtctctgaacagctggaactcagtgttcaggatggctcagttctcaaagtcaccaacaaaggccttgcctcctataaggacccagacaaccctgggcgcttttcatcagttaaaccaggcacttttcctaagtcagccaaggggtctagaggatcatgtaatgatctccgcaatgtggattggaataaacttttaaggagagcaattgaaggacttgaggagccgaatggctcctccctgaagaacatagagaagtatctcagaagtcaaagtgatctcacaagcaccaccaacaacccagcctttcagcagcggctgcgactgggggccaaacgcgctgtgaataatgggaggttactgaaagacggaccgcagtacagggtcaattatgggagcttagatggcaaaggggcacctcagtatcccagtgcattcccatcctcgctcccacctgtcagccttctaccccatgagaaagaccagccccgtgctgatcccattccaatatgtagcttctgtttggggactaaagaatcaaatcgtgaaaagaaaccagaagaactcctctcttgtgcagattgtggcagtagtggacacccatcctgtttgaaattttgtcctgaattaacaacaaatgtaaaggccttaaggtggcagtgcatcgaatgcaagacatgcagtgcctgtagagtccaaggcagaaatgctgataatatgcttttttgtgattcctgtgatagaggatttcatatggaatgctgtgacccaccactttccagaatgccaaaagggatgtggatttgccaagtctgcagaccaaagaaaaagggaagaaaactacttcatgagaaagctgcacaaataaaacgacgatatgcaaaacccattggacgaccgaaaaataaattaaagcaacgattgttgtctgtaaccagtgatgaaggatccatgaatgcattcacaggaagggggtcacctgatactgaaataaaaataaacatcaaacaagaaagtgcagatgtaaatgtgattggaaacaaggatgtcgttactgaagaggatttggatgtttttaagcaggcccaggaactttcttgggagaaaatagagtgtgagagtggggtggaagactgtggccggtacccttctgtgattgaatttggtaaatatgaaatccaaacctggtactcctcgccttacccacaggaatatgcaagattaccaaagctttacctgtgtgaattctgtcttaaatatatgaaaagtaaaaatattttgctaagacactccaagaagtgtggatggtttcatcctccagcaaatgaaatttaccgaaggaaagacctttcagtatttgaggttgatgggaatatgagcaaaatttattgccaaaacctttgcttgttagccaagctcttcctggaccacaaaacgttgtattatgatgtcgagccattccttttttatgtccttacaaaaaatgatgaaaagggctgtcatctggttggatacctctctaaggaaaagctttgccagcagaagtataatgtctcctgcataatgatcatgccccagcaccaaaggcaaggatttggacggtttctcattgatttcagctatttgctttctagaagagaaggccaagcagggtctcctgaaaagcctctctccgatctgggccgtctctcctacctggcatattggaagagcgtcatcttggagtatctctaccaccaccatgagaggcacatcagcatcaaggcaattagcagagcgacgggcatgtgcccacatgacattgccaccactctgcagcacctccacatgatcgacaagagagatggcagatttgtcatcattagacgggaaaagttgatattgagccacatggaaaagctgaaaacctgttccagagccaatgaacttgatccagacagtctgaggtggaccccaattttaatttctaatgctgcagtgtctgaagaagagcgagaagctgagaaagaggctgagcggctaatggaacaagctagctgctgggagaaggaggaacaagaaatcctgtcaactagagctaacagtaggcaatcacctgcaaaagtacaatcgaaaaataaatatttgcattccccggagagccggccagtcacaggggagcgagggcagctgctggagctgtctaaagagagcagtgaagaagaagaggaggaggaggacgaggaggaggaagaagaggaggaagaagaggaagaggatgaagaggaggaagaagaggaagaagaagaagaagaagaagaaaatattcaaagctctcccccaagattgacgaaaccacagtcagttgccataaagagaaagaggccttttgtactaaagaagaaaaggggtcgtaaacgcaggaggatcaacagcagtgtaacaacagagaccatttcagagacgacagaagtactgaatgagccctttgacaactcagatgaagagaggccaatgccacagctggagcctacctgtgagattgaagtggaggaagatggcaggaagccagtcctgagaaaagcattccagcatcagcctgggaagaaaagacaaacagaggaagaggaaggaaaagacaatcattgcttcaagaatgctgacccttgtagaaacaatatgaatgatgattcaagtaacttgaaagaaggcagtaaagacaatcccgaacctctaaagtgcaaacaagtgtggccaaaaggaacaaagcgcggtctatctaagtggaggcaaaacaaagagaggaagaccggatttaaactgaatttgtacaccccgccagaaacacccatggagcctgacgagcaggtaacagtggaagaacagaaggagacttcagaaggaaaaaccagccccagtcccatcaggattgaggaggaggtcaaggaaactggggaagccctgttgcctcaagaggaaaacagaagggaagaaacatgtgcccctgtaagtccaaacacatcaccaggtgaaaaaccagaagatgatctcatcaaacctgaggaagaggaagaggaggaggaggaggaagaggaagaagaggaagaagaggaaggggaagaagaagaaggaggaggaaatgtagaaaaagatccagatggtgctaaaagccaagaaaaagaggaaccagaaatctccacggaaaaagaagactctgcacgtttggatgatcacgaagaggaggaggaagaggatgaagagccatcccacaacgaggaccatgatgccgatgacgaggatgacagccacatggagtctgccgaagtggagaaggaagagctgcccagagaaagcttcaaagaagtactggaaaaccaggagacttttttagaccttaatgtgcagcctggtcactcgaacccagaggtcttaatggactgtggcgtcgacctgacagcttcttgtaacagtgagcccaaggagcttgctggggaccctgaagctgtacccgaatctgacgaggagccacccccaggagaacaggcacagaagcaggaccaaaagaacagcaaggaagtcgatacagagttcaaagagggaaacccagcaaccatggaaatcgactctgagactgtccaggccgttcagtctttgacccaggagagcagcgaacaggacgacacctttcaggattgtgccgagactcaagaggcctgtagaagcctacagaactacacccgtgcagaccaaagtccacagattgccaccacgctcgacgattgccaacagtcggaccacagtagcccagtttcatccgtccactcccatcctggccagtccgtacgttctgtcaacagcccaagtgtccctgctctggaaaacagctacgcccaaatcagcccagatcaaagtgccatctcagtgccatctctgcagaacatggaaaccagtcccatgatggatgtcccatcagtttcagatcattcacagcaagtcgtagacagtggatttagtgacctgggcagtatcgagagcacaactgagaactacgaaaacccaagcagctacgattctactatgggaggcagcatctgtggaaacggctcttcacagaacagctgctcctatagcaacctcacctccagcagtctgacacagagcagctgtgctgtcacccagcagatgtccaacatcagcgggagctgcagcatgctgcagcaaaccagcatcagctcccctccgacctgcagcgtcaagtctcctcaaggctgtgtggtggagaggcctccgagcagcagccagcagctggctcagtgcagcatggctgctaacttcaccccacccatgcagctggctgaaatccccgagacgagcaacgccaacattggcttatacgagcgaatgggtcagagtgattttggggctgggcattacccgcagccgtcagccaccttcagccttgccaaactgcagcagttaactaatacacttattgatcattcattgccttacagccattccgctgctgtgacttcctatgcaaacagtgcctctttgtccacaccattaagtaacacagggcttgttcaactttctcagtctccacactccgtccctgggggaccccaagcacaagctaccatgaccccaccccccaacctgactcctcctccaatgaatctgccgccgcctcttttgcaacggaacatggctgcatcaaatattggcatctctcacagccaaagactgcaaacccagattgccagcaagggccacatctccatgagaaccaagtcagcgtctctgtcaccagccgctgccacccatcagtcacaaatctatgggcgctcccagactgtagccatgcagggtcctgcacggactttaacgatgcaaagaggcatgaacatgagtgtgaacctgatgccagcgccagcctacaatgtcaactctgtgaacatgaacatgaacactctcaacgccatgaatgggtacagcatgtcccagccaatgatgaacagtggctaccacagcaatcatggctatatgaatcaaacgccccaataccctatgcagatgcagatgggcatgatgggcacccagccatatgcccagcagccaatgcagaccccaccccacggtaacatgatgtacacggcccccggacatcacggctacatgaacacaggcatgtccaaacagtctctcaatggctcctacatgagaaggtagacaacgtgggcagtccacaaaacctacggggcatcactattggattgatctgcacaaatacctttgaagagtacgatttcaaaaccagcaattggtgtgaatgcaaaaacatttgttggcaccatttatttaaaaaaaaaaaaagctgtatgcagcagaaagccttatacaagttgtttttctttttttcctttttctttttttggtaccttcatttctgttacttttatataaaattctctgcaaaggaaggcctctctttggactacaatttggaggcagccacttgttgtgcctgcttctgttaaacaatgtggatatcaagcccccccaaattatctgttttaatattgaacctagagctttttttttcccttccctgtccactccatgtaaatgcctttagcatttcagttattgtatattttgtttaaggtgacacttcagcatgccgctaatgtctttgttagtgacagtgcattttgtagtactgtacaagtgttgtgctaacagtaagccatttcttaagttttttgccttgattagggtgccctaatttgagggttttaaaaaaaactatatttttgttaattataaaactgtaaagagctataaaagctattcccatttggttagtcaaaagggttttattgctaaatgttggtgtaaagttgagacccttttccattttggtgacagatttctttggggaaaaaaggcagctttctgttttataaatgcagacttctgtttattgaatgaagcatatctcagtgtttatctgtcaggttttgaaacatttcatatatgtccaaatacttggcaggatttaaaaaaaaatagtgaatttggtgtaaagttgctattttatggaaatgcctctaactttacattttcattccatctgtagatttttctatctttataaaatattggagttattttttaaggaaaaatagaaaagtagcttgtgaatagctcaaactaagcttacaaatcgcatgtaaaaaagcaaaaaagttatttgtgtctgtttatattgcttccttttttgtagcctttgtacctgtacagggtgacagtaagggccaagcaggagaggcgtaatccttgtataaaataggatccagcgacactcttgtatttatctgttctctttttagtcagtcacttcaaaaaaacaaaaaacaaacaaaaaaaagctgtacattttaacataaaataaattatgatgagccatttttagcctcttgtgtcctgtcatattatgattgatagagaatgaccaatggaactgtatcatgtgtcacgcctcagaacacatacacattttgggaaaataaattatttagtgtaaattggagttatgggattttctgatttgttttgactttgggggaggggttggcaataaataagagtaatatctaataaaaccatcacatataccaaatacctatttaataaattaatttataatggattttaatgcttttcatgaaagtttattttatgcgagtgcataccttctgtatgccaatcattgtctttaaaataaagtgaaattgtttttttcttttggactttgatcttcatttgcaaagagatcccgcacaaatatccagctgcctcactcgcacagtctgtagaaacatccctccaagcctcgcaccagggtagcaaacttcctttttataaagattcataccaaaaaaagcacccaatttgggattgtatgtttgaaaaatcattttctttttaaaaagtgtgaacgttttgctctgttgtgaatgattaattgtatgttttctttagagtctaaagtttagaccccctgccaaaagtgaatattcacaagtatagcgttcagagaaagttctgagtgttgcttgaatttggttatttgagcaacaagtctagaaatgaatgcttgacctagcacccgtgtgaaactagcccgttaagctctccaggtgtctga

SEQ ID NO: 317034 - DNA, 8159 bp, Homo sapiens
  misc_feature (3)..(6): n is a, c, g, or t
  misc_feature (8)..(8): n is a, c, g, or t
ggnnnnangcaacgacaacaacagggggacacaaaatggcggcggcttagctcctacccctggcggcggcggcagcggtggcggaggcgacggcacctcctccaggcggcagccgcagtttctcaggcagcggcagcgcccccggcaggcgcggtggcggtggcgcgcagccagatttgcctgaagacctggataatctccatttttgtcatgggactgttaaaaacgtttggaagttccaattctggtcttgatttcccagttaaagatgttcttcacccgaatgcagtctttcctgttggtaaaataagacaaccatcaacattgcctgtttgtctgcttttgaatctcttaaggatggatgtttgtaagatgttgcttaatacagtctggaatactctgtccatttgttgaattgtaaatgactttcaaatgtgcaagttctgttaaatacaaagagaacctctatgggtaacttttgtgttgaagaagtcatttgtcaaccatggtaaaacttgcaaacccactttatacagagtggattcttgaagctatacagaaaataaaaaagcaaaagcaaaggccctctgaagagagaatctgccatgcggtcagtacttcccatgggttggataagaagacagtctctgaacagctggaactcagtgttcaggatggctcagttctcaaagtcaccaacaaaggccttgcctcctataaggacccagacaaccctgggcgcttttcatcagttaaaccaggcacttttcctaagtcagccaaggggtctagaggatcatgtaatgatctccgcaatgtggattggaataaacttttaaggagagcaattgaaggacttgaggagccgaatggctcctccctgaagaacatagagaagtatctcagaagtcaaagtgatctcacaagcaccaccaacaacccagcctttcagcagcggctgcgactgggggccaaacgcgctgtgaataatgggaggttactgaaagacggaccgcagtacagggtcaattatgggagcttagatggcaaaggggcacctcagtatcccagtgcattcccatcctcgctcccacctgtcagccttctaccccatgagaaagaccagccccgtgctgatcccattccaatatgtagcttctgtttggggactaaagaatcaaatcgtgaaaagaaaccagaagaactcctctcttgtgcagattgtggcagtagtggacacccatcctgtttgaaattttgtcctgaattaacaacaaatgtaaaggccttaaggtggcagtgcatcgaatgcaagacatgcagtgcctgtagagtccaaggcagaaatgctgataatatgcttttttgtgattcctgtgatagaggatttcatatggaatgctgtgacccaccactttccagaatgccaaaagggatgtggatttgccaagtctgcagaccaaagaaaaagggaagaaaactacttcatgagaaagctgcacaaataaaacgacgatatgcaaaacccattggacgaccgaaaaataaattaaagcaacgattgttgtctgtaaccagtgatgaaggatccatgaatgcattcacaggaagggggtcacctggtaggggtcaaaagactaaagtctgtaccacaccttcatctggtcatgctgcatctgggaaggactcaagcagcagattggctgttacagaccccactcggcctggtgccaccaccaaaatcaccaccacctccacctacatttctgcctctacacttaaagttaacaagaaaaccaaagggctcattgatggccttactaagttttttacaccatcacctgatggtcgcagatcacgaggtgaaattatagacttttcaaagcactatcgtccaaggaaaaaggtctctcagaaacagtcatgcacttctcatgtgttggctacagatactgaaataaaaataaacatcaaacaagaaagtgcagatgtaaatgtgattggaaacaaggatgtcgttactgaagaggatttggatgtttttaagcaggcccaggaactttcttgggagaaaatagagtgtgagagtggggtggaagactgtggccggtacccttctgtgattgaatttggtaaatatgaaatccaaacctggtactcctcgccttacccacaggaatatgcaagattaccaaagctttacctgtgtgaattctgtcttaaatatatgaaaagtaaaaatattttgctaagacactccaagaagtgtggatggtttcatcctccagcaaatgaaatttaccgaaggaaagacctttcagtatttgaggttgatgggaatatgagcaaaatttattgccaaaacctttgcttgttagccaagctcttcctggaccacaaaacgttgtattatgatgtcgagccattccttttttatgtccttacaaaaaatgatgaaaagggctgtcatctggttggatacctctctaaggaaaagctttgccagcagaagtataatgtctcctgcataatgatcatgccccagcaccaaaggcaaggatttggacggtttctcattgatttcagctatttgctttctagaagagaaggccaagcagggtctcctgaaaagcctctctccgatctgggccgtctctcctacctggcatattggaagagcgtcatcttggagtatctctaccaccaccatgagaggcacatcagcatcaaggcaattagcagagcgacgggcatgtgcccacatgacattgccaccactctgcagcacctccacatgatcgacaagagagatggcagatttgtcatcattagacgggaaaagttgatattgagccacatggaaaagctgaaaacctgttccagagccaatgaacttgatccagacagtctgaggtggaccccaattttaatttctaatgctgcagtgtctgaagaagagcgagaagctgagaaagaggctgagcggctaatggaacaagctagctgctgggagaaggaggaacaagaaatcctgtcaactagagctaacagtaggcaatcacctgcaaaagtacaatcgaaaaataaatatttgcattccccggagagccggccagtcacaggggagcgagggcagctgctggagctgtctaaagagagcagtgaagaagaagaggaggaggaggacgaggaggaggaagaagaggaggaagaagaggaagaggatgaagaggaggaagaagaggaagaagaagaagaagaagaagaaaatattcaaagctctcccccaagattgacgaaaccacagtcagttgccataaagagaaagaggccttttgtactaaagaagaaaaggggtcgtaaacgcaggaggatcaacagcagtgtaacaacagagaccatttcagagacgacagaagtactgaatgagccctttgacaactcagatgaagagaggccaatgccacagctggagcctacctgtgagattgaagtggaggaagatggcaggaagccagtcctgagaaaagcattccagcatcagcctgggaagaaaagacaaacagaggaagaggaaggaaaagacaatcattgcttcaagaatgctgacccttgtagaaacaatatgaatgatgattcaagtaacttgaaagaaggcagtaaagacaatcccgaacctctaaagtgcaaacaagtgtggccaaaaggaacaaagcgcggtctatctaagtggaggcaaaacaaagagaggaagaccggatttaaactgaatttgtacaccccgccagaaacacccatggagcctgacgagcaggtaacagtggaagaacagaaggagacttcagaaggaaaaaccagccccagtcccatcaggattgaggaggaggtcaaggaaactggggaagccctgttgcctcaagaggaaaacagaagggaagaaacatgtgcccctgtaagtccaaacacatcaccaggtgaaaaaccagaagatgatctcatcaaacctgaggaagaggaagaggaggaggaggaggaagaggaagaagaggaagaagaggaaggggaagaagaagaaggaggaggaaatgtagaaaaagatccagatggtgctaaaagccaagaaaaagaggaaccagaaatctccacggaaaaagaagactctgcacgtttggatgatcacgaagaggaggaggaagaggatgaagagccatcccacaacgaggaccatgatgccgatgacgaggatgacagccacatggagtctgccgaagtggagaaggaagagctgcccagagaaagcttcaaagaagtactggaaaaccaggagacttttttagaccttaatgtgcagcctggtcactcgaacccagaggtcttaatggactgtggcgtcgacctgacagcttcttgtaacagtgagcccaaggagcttgctggggaccctgaagctgtacccgaatctgacgaggagccacccccaggagaacaggcacagaagcaggaccaaaagaacagcaaggaagtcgatacagagttcaaagagggaaacccagcaaccatggaaatcgactctgagactgtccaggccgttcagtctttgacccaggagagcagcgaacaggacgacacctttcaggattgtgccgagactcaagaggcctgtagaagcctacagaactacacccgtgcagaccaaagtccacagattgccaccacgctcgacgattgccaacagtcggaccacagtagcccagtttcatccgtccactcccatcctggccagtccgtacgttctgtcaacagcccaagtgtccctgctctggaaaacagctacgcccaaatcagcccagatcaaagtgccatctcagtgccatctctgcagaacatggaaaccagtcccatgatggatgtcccatcagtttcagatcattcacagcaagtcgtagacagtggatttagtgacctgggcagtatcgagagcacaactgagaactacgaaaacccaagcagctacgattctactatgggaggcagcatctgtggaaacggctcttcacagaacagctgctcctatagcaacctcacctccagcagtctgacacagagcagctgtgctgtcacccagcagatgtccaacatcagcgggagctgcagcatgctgcagcaaaccagcatcagctcccctccgacctgcagcgtcaagtctcctcaaggctgtgtggtggagaggcctccgagcagcagccagcagctggctcagtgcagcatggctgctaacttcaccccacccatgcagctggctgaaatccccgagacgagcaacgccaacattggcttatacgagcgaatgggtcagagtgattttggggctgggcattacccgcagccgtcagccaccttcagccttgccaaactgcagcagttaactaatacacttattgatcattcattgccttacagccattccgctgctgtgacttcctatgcaaacagtgcctctttgtccacaccattaagtaacacagggcttgttcaactttctcagtctccacactccgtccctgggggaccccaagcacaagctaccatgaccccaccccccaacctgactcctcctccaatgaatctgccgccgcctcttttgcaacggaacatggctgcatcaaatattggcatctctcacagccaaagactgcaaacccagattgccagcaagggccacatctccatgagaaccaagtcagcgtctctgtcaccagccgctgccacccatcagtcacaaatctatgggcgctcccagactgtagccatgcagggtcctgcacggactttaacgatgcaaagaggcatgaacatgagtgtgaacctgatgccagcgccagcctacaatgtcaactctgtgaacatgaacatgaacactctcaacgccatgaatgggtacagcatgtcccagccaatgatgaacagtggctaccacagcaatcatggctatatgaatcaaacgccccaataccctatgcagatgcagatgggcatgatgggcacccagccatatgcccagcagccaatgcagaccccaccccacggtaacatgatgtacacggcccccggacatcacggctacatgaacacaggcatgtccaaacagtctctcaatggctcctacatgagaaggtagacaacgtgggcagtccacaaaacctacggggcatcactattggattgatctgcacaaatacctttgaagagtacgatttcaaaaccagcaattggtgtgaatgcaaaaacatttgttggcaccatttatttaaaaaaaaaaaaagctgtatgcagcagaaagccttatacaagttgtttttctttttttcctttttctttttttggtaccttcatttctgttacttttatataaaattctctgcaaaggaaggcctctctttggactacaatttggaggcagccacttgttgtgcctgcttctgttaaacaatgtggatatcaagcccccccaaattatctgttttaatattgaacctagagctttttttttcccttccctgtccactccatgtaaatgcctttagcatttcagttattgtatattttgtttaaggtgacacttcagcatgccgctaatgtctttgttagtgacagtgcattttgtagtactgtacaagtgttgtgctaacagtaagccatttcttaagttttttgccttgattagggtgccctaatttgagggttttaaaaaaaactatatttttgttaattataaaactgtaaagagctataaaagctattcccatttggttagtcaaaagggttttattgctaaatgttggtgtaaagttgagacccttttccattttggtgacagatttctttggggaaaaaaggcagctttctgttttataaatgcagacttctgtttattgaatgaagcatatctcagtgtttatctgtcaggttttgaaacatttcatatatgtccaaatacttggcaggatttaaaaaaaaatagtgaatttggtgtaaagttgctattttatggaaatgcctctaactttacattttcattccatctgtagatttttctatctttataaaatattggagttattttttaaggaaaaatagaaaagtagcttgtgaatagctcaaactaagcttacaaatcgcatgtaaaaaagcaaaaaagttatttgtgtctgtttatattgcttccttttttgtagcctttgtacctgtacagggtgacagtaagggccaagcaggagaggcgtaatccttgtataaaataggatccagcgacactcttgtatttatctgttctctttttagtcagtcacttcaaaaaaacaaaaaacaaacaaaaaaaagctgtacattttaacataaaataaattatgatgagccatttttagcctcttgtgtcctgtcatattatgattgatagagaatgaccaatggaactgtatcatgtgtcacgcctcagaacacatacacattttgggaaaataaattatttagtgtaaattggagttatgggattttctgatttgttttgactttgggggaggggttggcaataaataagagtaatatctaataaaaccatcacatataccaaatacctatttaataaattaatttataatggattttaatgcttttcatgaaagtttattttatgcgagtgcataccttctgtatgccaatcattgtctttaaaataaagtgaaattgtttttttcttttggactttgatcttcatttgcaaagagatcccgcacaaatatccagctgcctcactcgcacagtctgtagaaacatccctccaagcctcgcaccagggtagcaaacttcctttttataaagattcataccaaaaaaagcacccaatttgggattgtatgtttgaaaaatcattttctttttaaaaagtgtgaacgttttgctctgttgtgaatgattaattgtatgttttctttagagtctaaagtttagaccccctgccaaaagtgaatattcacaagtatagcgttcagagaaagttctgagtgttgcttgaatttggttatttgagcaacaagtctagaaatgaatgcttgacctagcacccgtgtgaaactagcccgttaagctctccaggtgtctga

SEQ ID NO: 317035 - DNA, 7759 bp, Homo sapiens
  misc_feature (3)..(6): n is a, c, g, or t
  misc_feature (8)..(8): n is a, c, g, or t
ggnnnnangcaacgacaacaacagggggacacaaaatggcggcggcttagctcctacccctggcggcggcggcagcggtggcggaggcgacggcacctcctccaggcggcagccgcagtttctcaggcagcggcagcgcccccggcaggcgcggtggcggtggcgcgcagccaggtcttgatttcccagttaaagatgttcttcacccgaatgcagtctttcctgttggtaaaataagacaaccatcaacattgcctgtttgtctgcttttgaatctcttaaggatggatgtttgtaagatgttgcttaatacagtctggaatactctgtccatttgttgaattgtaaatgactttcaaatgtgcaagttctgttaaatacaaagagaacctctatgggtaacttttgtgttgaagaagtcatttgtcaaccatggtaaaacttgcaaacccactttatacagagtggattcttgaagctatacagaaaataaaaaagcaaaagcaaaggccctctgaagagagaatctgccatgcggtcagtacttcccatgggttggataagaagacagtctctgaacagctggaactcagtgttcaggatggctcagttctcaaagtcaccaacaaaggccttgcctcctataaggacccagacaaccctgggcgcttttcatcagttaaaccaggcacttttcctaagtcagccaaggggtctagaggatcatgtaatgatctccgcaatgtggattggaataaacttttaaggagagcaattgaaggacttgaggagccgaatggctcctccctgaagaacatagagaagtatctcagaagtcaaagtgatctcacaagcaccaccaacaacccagcctttcagcagcggctgcgactgggggccaaacgcgctgtgaataatgggaggttactgaaagacggaccgcagtacagggtcaattatgggagcttagatggcaaaggggcacctcagtatcccagtgcattcccatcctcgctcccacctgtcagccttctaccccatgagaaagaccagccccgtgctgatcccattccaatatgtagcttctgtttggggactaaagaatcaaatcgtgaaaagaaaccagaagaactcctctcttgtgcagattgtggcagtagtggacacccatcctgtttgaaattttgtcctgaattaacaacaaatgtaaaggccttaaggtggcagtgcatcgaatgcaagacatgcagtgcctgtagagtccaaggcagaaatgctgataatatgcttttttgtgattcctgtgatagaggatttcatatggaatgctgtgacccaccactttccagaatgccaaaagggatgtggatttgccaagtctgcagaccaaagaaaaagggaagaaaactacttcatgagaaagctgcacaaataaaacgacgatatgcaaaacccattggacgaccgaaaaataaattaaagcaacgattgttgtctgtaaccagtgatgaaggatccatgaatgcattcacaggaagggggtcacctgatactgaaataaaaataaacatcaaacaagaaagtgcagatgtaaatgtgattggaaacaaggatgtcgttactgaagaggatttggatgtttttaagcaggcccaggaactttcttgggagaaaatagagtgtgagagtggggtggaagactgtggccggtacccttctgtgattgaatttggtaaatatgaaatccaaacctggtactcctcgccttacccacaggaatatgcaagattaccaaagctttacctgtgtgaattctgtcttaaatatatgaaaagtaaaaatattttgctaagacactccaagaagtgtggatggtttcatcctccagcaaatgaaatttaccgaaggaaagacctttcagtatttgaggttgatgggaatatgagcaaaatttattgccaaaacctttgcttgttagccaagctcttcctggaccacaaaacgttgtattatgatgtcgagccattccttttttatgtccttacaaaaaatgatgaaaagggctgtcatctggttggatacctctctaaggaaaagctttgccagcagaagtataatgtctcctgcataatgatcatgccccagcaccaaaggcaaggatttggacggtttctcattgatttcagctatttgctttctagaagagaaggccaagcagggtctcctgaaaagcctctctccgatctgggccgtctctcctacctggcatattggaagagcgtcatcttggagtatctctaccaccaccatgagaggcacatcagcatcaaggcaattagcagagcgacgggcatgtgcccacatgacattgccaccactctgcagcacctccacatgatcgacaagagagatggcagatttgtcatcattagacgggaaaagttgatattgagccacatggaaaagctgaaaacctgttccagagccaatgaacttgatccagacagtctgaggtggaccccaattttaatttctaatgctgcagtgtctgaagaagagcgagaagctgagaaagaggctgagcggctaatggaacaagctagctgctgggagaaggaggaacaagaaatcctgtcaactagagctaacagtaggcaatcacctgcaaaagtacaatcgaaaaataaatatttgcattccccggagagccggccagtcacaggggagcgagggcagctgctggagctgtctaaagagagcagtgaagaagaagaggaggaggaggacgaggaggaggaagaagaggaggaagaagaggaagaggatgaagaggaggaagaagaggaagaagaagaagaagaagaagaaaatattcaaagctctcccccaagattgacgaaaccacagtcagttgccataaagagaaagaggccttttgtactaaagaagaaaaggggtcgtaaacgcaggaggatcaacagcagtgtaacaacagagaccatttcagagacgacagaagtactgaatgagccctttgacaactcagatgaagagaggccaatgccacagctggagcctacctgtgagattgaagtggaggaagatggcaggaagccagtcctgagaaaagcattccagcatcagcctgggaagaaaagacaaacagaggaagaggaaggaaaagacaatcattgcttcaagaatgctgacccttgtagaaacaatatgaatgatgattcaagtaacttgaaagaaggcagtaaagacaatcccgaacctctaaagtgcaaacaagtgtggccaaaaggaacaaagcgcggtctatctaagtggaggcaaaacaaagagaggaagaccggatttaaactgaatttgtacaccccgccagaaacacccatggagcctgacgagcaggtaacagtggaagaacagaaggagacttcagaaggaaaaaccagccccagtcccatcaggattgaggaggaggtcaaggaaactggggaagccctgttgcctcaagaggaaaacagaagggaagaaacatgtgcccctgtaagtccaaacacatcaccaggtgaaaaaccagaagatgatctcatcaaacctgaggaagaggaagaggaggaggaggaggaagaggaagaagaggaagaagaggaaggggaagaagaagaaggaggaggaaatgtagaaaaagatccagatggtgctaaaagccaagaaaaagaggaaccagaaatctccacggaaaaagaagactctgcacgtttggatgatcacgaagaggaggaggaagaggatgaagagccatcccacaacgaggaccatgatgccgatgacgaggatgacagccacatggagtctgccgaagtggagaaggaagagctgcccagagaaagcttcaaagaagtactggaaaaccaggagacttttttagaccttaatgtgcagcctggtcactcgaacccagaggtcttaatggactgtggcgtcgacctgacagcttcttgtaacagtgagcccaaggagcttgctggggaccctgaagctgtacccgaatctgacgaggagccacccccaggagaacaggcacagaagcaggaccaaaagaacagcaaggaagtcgatacagagttcaaagagggaaacccagcaaccatggaaatcgactctgagactgtccaggccgttcagtctttgacccaggagagcagcgaacaggacgacacctttcaggattgtgccgagactcaagaggcctgtagaagcctacagaactacacccgtgcagaccaaagtccacagattgccaccacgctcgacgattgccaacagtcggaccacagtagcccagtttcatccgtccactcccatcctggccagtccgtacgttctgtcaacagcccaagtgtccctgctctggaaaacagctacgcccaaatcagcccagatcaaagtgccatctcagtgccatctctgcagaacatggaaaccagtcccatgatggatgtcccatcagtttcagatcattcacagcaagtcgtagacagtggatttagtgacctgggcagtatcgagagcacaactgagaactacgaaaacccaagcagctacgattctactatgggaggcagcatctgtggaaacggctcttcacagaacagctgctcctatagcaacctcacctccagcagtctgacacagagcagctgtgctgtcacccagcagatgtccaacatcagcgggagctgcagcatgctgcagcaaaccagcatcagctcccctccgacctgcagcgtcaagtctcctcaaggctgtgtggtggagaggcctccgagcagcagccagcagctggctcagtgcagcatggctgctaacttcaccccacccatgcagctggctgaaatccccgagacgagcaacgccaacattggcttatacgagcgaatgggtcagagtgattttggggctgggcattacccgcagccgtcagccaccttcagccttgccaaactgcagcagttaactaatacacttattgatcattcattgccttacagccattccgctgctgtgacttcctatgcaaacagtgcctctttgtccacaccattaagtaacacagggcttgttcaactttctcagtctccacactccgtccctgggggaccccaagcacaagctaccatgaccccaccccccaacctgactcctcctccaatgaatctgccgccgcctcttttgcaacggaacatggctgcatcaaatattggcatctctcacagccaaagactgcaaacccagattgccagcaagggccacatctccatgagaaccaagtcagcgtctctgtcaccagccgctgccacccatcagtcacaaatctatgggcgctcccagactgtagccatgcagggtcctgcacggactttaacgatgcaaagaggcatgaacatgagtgtgaacctgatgccagcgccagcctacaatgtcaactctgtgaacatgaacatgaacactctcaacgccatgaatgggtacagcatgtcccagccaatgatgaacagtggctaccacagcaatcatggctatatgaatcaaacgccccaataccctatgcagatgcagatgggcatgatgggcacccagccatatgcccagcagccaatgcagaccccaccccacggtaacatgatgtacacggcccccggacatcacggctacatgaacacaggcatgtccaaacagtctctcaatggctcctacatgagaaggtagacaacgtgggcagtccacaaaacctacggggcatcactattggattgatctgcacaaatacctttgaagagtacgatttcaaaaccagcaattggtgtgaatgcaaaaacatttgttggcaccatttatttaaaaaaaaaaaaagctgtatgcagcagaaagccttatacaagttgtttttctttttttcctttttctttttttggtaccttcatttctgttacttttatataaaattctctgcaaaggaaggcctctctttggactacaatttggaggcagccacttgttgtgcctgcttctgttaaacaatgtggatatcaagcccccccaaattatctgttttaatattgaacctagagctttttttttcccttccctgtccactccatgtaaatgcctttagcatttcagttattgtatattttgtttaaggtgacacttcagcatgccgctaatgtctttgttagtgacagtgcattttgtagtactgtacaagtgttgtgctaacagtaagccatttcttaagttttttgccttgattagggtgccctaatttgagggttttaaaaaaaactatatttttgttaattataaaactgtaaagagctataaaagctattcccatttggttagtcaaaagggttttattgctaaatgttggtgtaaagttgagacccttttccattttggtgacagatttctttggggaaaaaaggcagctttctgttttataaatgcagacttctgtttattgaatgaagcatatctcagtgtttatctgtcaggttttgaaacatttcatatatgtccaaatacttggcaggatttaaaaaaaaatagtgaatttggtgtaaagttgctattttatggaaatgcctctaactttacattttcattccatctgtagatttttctatctttataaaatattggagttattttttaaggaaaaatagaaaagtagcttgtgaatagctcaaactaagcttacaaatcgcatgtaaaaaagcaaaaaagttatttgtgtctgtttatattgcttccttttttgtagcctttgtacctgtacagggtgacagtaagggccaagcaggagaggcgtaatccttgtataaaataggatccagcgacactcttgtatttatctgttctctttttagtcagtcacttcaaaaaaacaaaaaacaaacaaaaaaaagctgtacattttaacataaaataaattatgatgagccatttttagcctcttgtgtcctgtcatattatgattgatagagaatgaccaatggaactgtatcatgtgtcacgcctcagaacacatacacattttgggaaaataaattatttagtgtaaattggagttatgggattttctgatttgttttgactttgggggaggggttggcaataaataagagtaatatctaataaaaccatcacatataccaaatacctatttaataaattaatttataatggattttaatgcttttcatgaaagtttattttatgcgagtgcataccttctgtatgccaatcattgtctttaaaataaagtgaaattgtttttttcttttggactttgatcttcatttgcaaagagatcccgcacaaatatccagctgcctcactcgcacagtctgtagaaacatccctccaagcctcgcaccagggtagcaaacttcctttttataaagattcataccaaaaaaagcacccaatttgggattgtatgtttgaaaaatcattttctttttaaaaagtgtgaacgttttgctctgttgtgaatgattaattgtatgttttctttagagtctaaagtttagaccccctgccaaaagtgaatattcacaagtatagcgttcagagaaagttctgagtgttgcttgaatttggttatttgagcaacaagtctagaaatgaatgcttgacctagcacccgtgtgaaactagcccgttaagctctccaggtgtctga

SEQ ID NO: 317036 - DNA, 6304 bp, Homo sapiens
  misc_feature (3)..(3): n is a, c, g, or t
tanacgatcaccttcgcggtatcataaactccgaccccctcaccagggaaggggagcttgacagacggaaggattaaacctgatcaggatgatgatactgaaataaaaataaacatcaaacaagaaagtgcagatgtaaatgtgattggaaacaaggatgtcgttactgaagaggatttggatgtttttaagcaggcccaggaactttcttgggagaaaatagagtgtgagagtggggtggaagactgtggccggtacccttctgtgattgaatttggtaaatatgaaatccaaacctggtactcctcgccttacccacaggaatatgcaagattaccaaagctttacctgtgtgaattctgtcttaaatatatgaaaagtaaaaatattttgctaagacactccaagaagtgtggatggtttcatcctccagcaaatgaaatttaccgaaggaaagacctttcagtatttgaggttgatgggaatatgagcaaaatttattgccaaaacctttgcttgttagccaagctcttcctggaccacaaaacgttgtattatgatgtcgagccattccttttttatgtccttacaaaaaatgatgaaaagggctgtcatctggttggatacctctctaaggaaaagctttgccagcagaagtataatgtctcctgcataatgatcatgccccagcaccaaaggcaaggatttggacggtttctcattgatttcagctatttgctttctagaagagaaggccaagcagggtctcctgaaaagcctctctccgatctgggccgtctctcctacctggcatattggaagagcgtcatcttggagtatctctaccaccaccatgagaggcacatcagcatcaaggcaattagcagagcgacgggcatgtgcccacatgacattgccaccactctgcagcacctccacatgatcgacaagagagatggcagatttgtcatcattagacgggaaaagttgatattgagccacatggaaaagctgaaaacctgttccagagccaatgaacttgatccagacagtctgaggtggaccccaattttaatttctaatgctgcagtgtctgaagaagagcgagaagctgagaaagaggctgagcggctaatggaacaagctagctgctgggagaaggaggaacaagaaatcctgtcaactagagctaacagtaggcaatcacctgcaaaagtacaatcgaaaaataaatatttgcattccccggagagccggccagtcacaggggagcgagggcagctgctggagctgtctaaagagagcagtgaagaagaagaggaggaggaggacgaggaggaggaagaagaggaggaagaagaggaagaggatgaagaggaggaagaagaggaagaagaagaagaagaagaagaaaatattcaaagctctcccccaagattgacgaaaccacagtcagttgccataaagagaaagaggccttttgtactaaagaagaaaaggggtcgtaaacgcaggaggatcaacagcagtgtaacaacagagaccatttcagagacgacagaagtactgaatgagccctttgacaactcagatgaagagaggccaatgccacagctggagcctacctgtgagattgaagtggaggaagatggcaggaagccagtcctgagaaaagcattccagcatcagcctgggaagaaaagacaaacagaggaagaggaaggaaaagacaatcattgcttcaagaatgctgacccttgtagaaacaatatgaatgatgattcaagtaacttgaaagaaggcagtaaagacaatcccgaacctctaaagtgcaaacaagtgtggccaaaaggaacaaagcgcggtctatctaagtggaggcaaaacaaagagaggaagaccggatttaaactgaatttgtacaccccgccagaaacacccatggagcctgacgagcaggtaacagtggaagaacagaaggagacttcagaaggaaaaaccagccccagtcccatcaggattgaggaggaggtcaaggaaactggggaagccctgttgcctcaagaggaaaacagaagggaagaaacatgtgcccctgtaagtccaaacacatcaccaggtgaaaaaccagaagatgatctcatcaaacctgaggaagaggaagaggaggaggaggaggaagaggaagaagaggaagaagaggaaggggaagaagaagaaggaggaggaaatgtagaaaaagatccagatggtgctaaaagccaagaaaaagaggaaccagaaatctccacggaaaaagaagactctgcacgtttggatgatcacgaagaggaggaggaagaggatgaagagccatcccacaacgaggaccatgatgccgatgacgaggatgacagccacatggagtctgccgaagtggagaaggaagagctgcccagagaaagcttcaaagaagtactggaaaaccaggagacttttttagaccttaatgtgcagcctggtcactcgaacccagaggtcttaatggactgtggcgtcgacctgacagcttcttgtaacagtgagcccaaggagcttgctggggaccctgaagctgtacccgaatctgacgaggagccacccccaggagaacaggcacagaagcaggaccaaaagaacagcaaggaagtcgatacagagttcaaagagggaaacccagcaaccatggaaatcgactctgagactgtccaggccgttcagtctttgacccaggagagcagcgaacaggacgacacctttcaggattgtgccgagactcaagaggcctgtagaagcctacagaactacacccgtgcagaccaaagtccacagattgccaccacgctcgacgattgccaacagtcggaccacagtagcccagtttcatccgtccactcccatcctggccagtccgtacgttctgtcaacagcccaagtgtccctgctctggaaaacagctacgcccaaatcagcccagatcaaagtgccatctcagtgccatctctgcagaacatggaaaccagtcccatgatggatgtcccatcagtttcagatcattcacagcaagtcgtagacagtggatttagtgacctgggcagtatcgagagcacaactgagaactacgaaaacccaagcagctacgattctactatgggaggcagcatctgtggaaacggctcttcacagaacagctgctcctatagcaacctcacctccagcagtctgacacagagcagctgtgctgtcacccagcagatgtccaacatcagcgggagctgcagcatgctgcagcaaaccagcatcagctcccctccgacctgcagcgtcaagtctcctcaaggctgtgtggtggagaggcctccgagcagcagccagcagctggctcagtgcagcatggctgctaacttcaccccacccatgcagctggctgaaatccccgagacgagcaacgccaacattggcttatacgagcgaatgggtcagagtgattttggggctgggcattacccgcagccgtcagccaccttcagccttgccaaactgcagcagttaactaatacacttattgatcattcattgccttacagccattccgctgctgtgacttcctatgcaaacagtgcctctttgtccacaccattaagtaacacagggcttgttcaactttctcagtctccacactccgtccctgggggaccccaagcacaagctaccatgaccccaccccccaacctgactcctcctccaatgaatctgccgccgcctcttttgcaacggaacatggctgcatcaaatattggcatctctcacagccaaagactgcaaacccagattgccagcaagggccacatctccatgagaaccaagtcagcgtctctgtcaccagccgctgccacccatcagtcacaaatctatgggcgctcccagactgtagccatgcagggtcctgcacggactttaacgatgcaaagaggcatgaacatgagtgtgaacctgatgccagcgccagcctacaatgtcaactctgtgaacatgaacatgaacactctcaacgccatgaatgggtacagcatgtcccagccaatgatgaacagtggctaccacagcaatcatggctatatgaatcaaacgccccaataccctatgcagatgcagatgggcatgatgggcacccagccatatgcccagcagccaatgcagaccccaccccacggtaacatgatgtacacggcccccggacatcacggctacatgaacacaggcatgtccaaacagtctctcaatggctcctacatgagaaggtagacaacgtgggcagtccacaaaacctacggggcatcactattggattgatctgcacaaatacctttgaagagtacgatttcaaaaccagcaattggtgtgaatgcaaaaacatttgttggcaccatttatttaaaaaaaaaaaaagctgtatgcagcagaaagccttatacaagttgtttttctttttttcctttttctttttttggtaccttcatttctgttacttttatataaaattctctgcaaaggaaggcctctctttggactacaatttggaggcagccacttgttgtgcctgcttctgttaaacaatgtggatatcaagcccccccaaattatctgttttaatattgaacctagagctttttttttcccttccctgtccactccatgtaaatgcctttagcatttcagttattgtatattttgtttaaggtgacacttcagcatgccgctaatgtctttgttagtgacagtgcattttgtagtactgtacaagtgttgtgctaacagtaagccatttcttaagttttttgccttgattagggtgccctaatttgagggttttaaaaaaaactatatttttgttaattataaaactgtaaagagctataaaagctattcccatttggttagtcaaaagggttttattgctaaatgttggtgtaaagttgagacccttttccattttggtgacagatttctttggggaaaaaaggcagctttctgttttataaatgcagacttctgtttattgaatgaagcatatctcagtgtttatctgtcaggttttgaaacatttcatatatgtccaaatacttggcaggatttaaaaaaaaatagtgaatttggtgtaaagttgctattttatggaaatgcctctaactttacattttcattccatctgtagatttttctatctttataaaatattggagttattttttaaggaaaaatagaaaagtagcttgtgaatagctcaaactaagcttacaaatcgcatgtaaaaaagcaaaaaagttatttgtgtctgtttatattgcttccttttttgtagcctttgtacctgtacagggtgacagtaagggccaagcaggagaggcgtaatccttgtataaaataggatccagcgacactcttgtatttatctgttctctttttagtcagtcacttcaaaaaaacaaaaaacaaacaaaaaaaagctgtacattttaacataaaataaattatgatgagccatttttagcctcttgtgtcctgtcatattatgattgatagagaatgaccaatggaactgtatcatgtgtcacgcctcagaacacatacacattttgggaaaataaattatttagtgtaaattggagttatgggattttctgatttgttttgactttgggggaggggttggcaataaataagagtaatatctaataaaaccatcacatataccaaatacctatttaataaattaatttataatggattttaatgcttttcatgaaagtttattttatgcgagtgcataccttctgtatgccaatcattgtctttaaaataaagtgaaattgtttttttcttttggactttgatcttcatttgcaaagagatcccgcacaaatatccagctgcctcactcgcacagtctgtagaaacatccctccaagcctcgcaccagggtagcaaacttcctttttataaagattcataccaaaaaaagcacccaatttgggattgtatgtttgaaaaatcattttctttttaaaaagtgtgaacgttttgctctgttgtgaatgattaattgtatgttttctttagagtctaaagtttagaccccctgccaaaagtgaatattcacaagtatagcgttcagagaaagttctgagtgttgcttgaatttggttatttgagcaacaagtctagaaatgaatgcttgacctagcacccgtgtgaaactagcccgttaagctctccaggtgtctga

SEQ ID NO: 317037 - DNA, 5210 bp, Homo sapiens
cctttgccaaggaaccttcacagtaatgctgtaaaatgcgttcaaaagcttaagctgctgggagaaggaggaacaagaaatcctgtcaactagagctaacagtaggcaatcacctgcaaaagtacaatcgaaaaataaatatttgcattccccggagagccggccagtcacaggggagcgagggcagctgctggagctgtctaaagagagcagtgaagaagaagaggaggaggaggacgaggaggaggaagaagaggaggaagaagaggaagaggatgaagaggaggaagaagaggaagaagaagaagaagaagaagaaaatattcaaagctctcccccaagattgacgaaaccacagtcagttgccataaagagaaagaggccttttgtactaaagaagaaaaggggtcgtaaacgcaggaggatcaacagcagtgtaacaacagagaccatttcagagacgacagaagtactgaatgagccctttgacaactcagatgaagagaggccaatgccacagctggagcctacctgtgagattgaagtggaggaagatggcaggaagccagtcctgagaaaagcattccagcatcagcctgggaagaaaagacaaacagaggaagaggaaggaaaagacaatcattgcttcaagaatgctgacccttgtagaaacaatatgaatgatgattcaagtaacttgaaagaaggcagtaaagacaatcccgaacctctaaagtgcaaacaagtgtggccaaaaggaacaaagcgcggtctatctaagtggaggcaaaacaaagagaggaagaccggatttaaactgaatttgtacaccccgccagaaacacccatggagcctgacgagcaggtaacagtggaagaacagaaggagacttcagaaggaaaaaccagccccagtcccatcaggattgaggaggaggtcaaggaaactggggaagccctgttgcctcaagaggaaaacagaagggaagaaacatgtgcccctgtaagtccaaacacatcaccaggtgaaaaaccagaagatgatctcatcaaacctgaggaagaggaagaggaggaggaggaggaagaggaagaagaggaagaagaggaaggggaagaagaagaaggaggaggaaatgtagaaaaagatccagatggtgctaaaagccaagaaaaagaggaaccagaaatctccacggaaaaagaagactctgcacgtttggatgatcacgaagaggaggaggaagaggatgaagagccatcccacaacgaggaccatgatgccgatgacgaggatgacagccacatggagtctgccgaagtggagaaggaagagctgcccagagaaagcttcaaagaagtactggaaaaccaggagacttttttagaccttaatgtgcagcctggtcactcgaacccagaggtcttaatggactgtggcgtcgacctgacagcttcttgtaacagtgagcccaaggagcttgctggggaccctgaagctgtacccgaatctgacgaggagccacccccaggagaacaggcacagaagcaggaccaaaagaacagcaaggaagtcgatacagagttcaaagagggaaacccagcaaccatggaaatcgactctgagactgtccaggccgttcagtctttgacccaggagagcagcgaacaggacgacacctttcaggattgtgccgagactcaagaggcctgtagaagcctacagaactacacccgtgcagaccaaagtccacagattgccaccacgctcgacgattgccaacagtcggaccacagtagcccagtttcatccgtccactcccatcctggccagtccgtacgttctgtcaacagcccaagtgtccctgctctggaaaacagctacgcccaaatcagcccagatcaaagtgccatctcagtgccatctctgcagaacatggaaaccagtcccatgatggatgtcccatcagtttcagatcattcacagcaagtcgtagacagtggatttagtgacctgggcagtatcgagagcacaactgagaactacgaaaacccaagcagctacgattctactatgggaggcagcatctgtggaaacggctcttcacagaacagctgctcctatagcaacctcacctccagcagtctgacacagagcagctgtgctgtcacccagcagatgtccaacatcagcgggagctgcagcatgctgcagcaaaccagcatcagctcccctccgacctgcagcgtcaagtctcctcaaggctgtgtggtggagaggcctccgagcagcagccagcagctggctcagtgcagcatggctgctaacttcaccccacccatgcagctggctgaaatccccgagacgagcaacgccaacattggcttatacgagcgaatgggtcagagtgattttggggctgggcattacccgcagccgtcagccaccttcagccttgccaaactgcagcagttaactaatacacttattgatcattcattgccttacagccattccgctgctgtgacttcctatgcaaacagtgcctctttgtccacaccattaagtaacacagggcttgttcaactttctcagtctccacactccgtccctgggggaccccaagcacaagctaccatgaccccaccccccaacctgactcctcctccaatgaatctgccgccgcctcttttgcaacggaacatggctgcatcaaatattggcatctctcacagccaaagactgcaaacccagattgccagcaagggccacatctccatgagaaccaagtcagcgtctctgtcaccagccgctgccacccatcagtcacaaatctatgggcgctcccagactgtagccatgcagggtcctgcacggactttaacgatgcaaagaggcatgaacatgagtgtgaacctgatgccagcgccagcctacaatgtcaactctgtgaacatgaacatgaacactctcaacgccatgaatgggtacagcatgtcccagccaatgatgaacagtggctaccacagcaatcatggctatatgaatcaaacgccccaataccctatgcagatgcagatgggcatgatgggcacccagccatatgcccagcagccaatgcagaccccaccccacggtaacatgatgtacacggcccccggacatcacggctacatgaacacaggcatgtccaaacagtctctcaatggctcctacatgagaaggtagacaacgtgggcagtccacaaaacctacggggcatcactattggattgatctgcacaaatacctttgaagagtacgatttcaaaaccagcaattggtgtgaatgcaaaaacatttgttggcaccatttatttaaaaaaaaaaaaagctgtatgcagcagaaagccttatacaagttgtttttctttttttcctttttctttttttggtaccttcatttctgttacttttatataaaattctctgcaaaggaaggcctctctttggactacaatttggaggcagccacttgttgtgcctgcttctgttaaacaatgtggatatcaagcccccccaaattatctgttttaatattgaacctagagctttttttttcccttccctgtccactccatgtaaatgcctttagcatttcagttattgtatattttgtttaaggtgacacttcagcatgccgctaatgtctttgttagtgacagtgcattttgtagtactgtacaagtgttgtgctaacagtaagccatttcttaagttttttgccttgattagggtgccctaatttgagggttttaaaaaaaactatatttttgttaattataaaactgtaaagagctataaaagctattcccatttggttagtcaaaagggttttattgctaaatgttggtgtaaagttgagacccttttccattttggtgacagatttctttggggaaaaaaggcagctttctgttttataaatgcagacttctgtttattgaatgaagcatatctcagtgtttatctgtcaggttttgaaacatttcatatatgtccaaatacttggcaggatttaaaaaaaaatagtgaatttggtgtaaagttgctattttatggaaatgcctctaactttacattttcattccatctgtagatttttctatctttataaaatattggagttattttttaaggaaaaatagaaaagtagcttgtgaatagctcaaactaagcttacaaatcgcatgtaaaaaagcaaaaaagttatttgtgtctgtttatattgcttccttttttgtagcctttgtacctgtacagggtgacagtaagggccaagcaggagaggcgtaatccttgtataaaataggatccagcgacactcttgtatttatctgttctctttttagtcagtcacttcaaaaaaacaaaaaacaaacaaaaaaaagctgtacattttaacataaaataaattatgatgagccatttttagcctcttgtgtcctgtcatattatgattgatagagaatgaccaatggaactgtatcatgtgtcacgcctcagaacacatacacattttgggaaaataaattatttagtgtaaattggagttatgggattttctgatttgttttgactttgggggaggggttggcaataaataagagtaatatctaataaaaccatcacatataccaaatacctatttaataaattaatttataatggattttaatgcttttcatgaaagtttattttatgcgagtgcataccttctgtatgccaatcattgtctttaaaataaagtgaaattgtttttttcttttggactttgatcttcatttgcaaagagatcccgcacaaatatccagctgcctcactcgcacagtctgtagaaacatccctccaagcctcgcaccagggtagcaaacttcctttttataaagattcataccaaaaaaagcacccaatttgggattgtatgtttgaaaaatcattttctttttaaaaagtgtgaacgttttgctctgttgtgaatgattaattgtatgttttctttagagtctaaagtttagaccccctgccaaaagtgaatattcacaagtatagcgttcagagaaagttctgagtgttgcttgaatttggttatttgagcaacaagtctagaaatgaatgcttgacctagcacccgtgtgaaactagcccgttaagctctccaggtgtctga

SEQ ID NO: 317038 - DNA, 6622 bp, Homo sapiens
  misc_feature (3)..(6): n is a, c, g, or t
  misc_feature (8)..(8): n is a, c, g, or t
ggnnnnangcaacgacaacaacagggggacacaaaatggcggcggcttagctcctacccctggcggcggcggcagcggtggcggaggcgacggcacctcctccaggcggcagccgcagtttctcaggcagcggcagcgcccccggcaggcgcggtggcggtggcgcgcagccagatttgcctgaagacctggataatctccatttttgtcatgggactgttaaaaacgtttggaagttccaattctggtcttgatttcccagttaaagatgttcttcacccgaatgcagtctttcctgttggtaaaataagacaaccatcaacattgcctgtttgtctgcttttgaatctcttaaggatggatgtttgtaagatgttgcttaatacagtctggaatactctgtccatttgttgaattgtaaatgactttcaaatgtgcaagttctgttaaatacaaagagaacctctatgggtaacttttgtgttgaagaagtcatttgtcaaccatggtaaaacttgcaaacccactttatacagagtggattcttgaagctatacagaaaataaaaaagcaaaagcaaaggccctctgaagagagaatctgccatgcggtcagtacttcccatgggttggataagaagacagtctctgaacagctggaactcagtgttcaggatggctcagttctcaaagtcaccaacaaaggccttgcctcctataaggacccagacaaccctgggcgcttttcatcagttaaaccaggcacttttcctaagtcagccaaggggtctagaggatcatgtaatgatctccgcaatgtggattggaataaacttttaaggagagcaattgaaggacttgaggagccgaatggctcctccctgaagaacatagagaagtatctcagaagtcaaagtgatctcacaagcaccaccaacaacccagcctttcagcagcggctgcgactgggggccaaacgcgctgtgaataatgggaggttactgaaagacggaccgcagtacagggtcaattatgggagcttagatggcaaaggggcacctcagtatcccagtgcattcccatcctcgctcccacctgtcagccttctaccccatgagaaagaccagccccgtgctgatcccattccaatatgtagcttctgtttggggactaaagaatcaaatcgtgaaaagaaaccagaagaactcctctcttgtgcagattgtggcagtagtggacacccatcctgtttgaaattttgtcctgaattaacaacaaatgtaaaggccttaaggtggcagtgcatcgaatgcaagacatgcagtgcctgtagagtccaaggcagaaatgctgataatatgcttttttgtgattcctgtgatagaggatttcatatggaatgctgtgacccaccactttccagaatgccaaaagggatgtggatttgccaagtctgcagaccaaagaaaaagggaagaaaactacttcatgagaaagctgcacaaataaaacgacgatatgcaaaacccattggacgaccgaaaaataaattaaagcaacgattgttgtctgtaaccagtgatgaaggatccatgaatgcattcacaggaagggggtcacctggtaggggtcaaaagactaaagtctgtaccacaccttcatctggtcatgctgcatctgggaaggactcaagcagcagattggctgttacagaccccactcggcctggtgccaccaccaaaatcaccaccacctccacctacatttctgcctctacacttaaagttaacaagaaaaccaaagggctcattgatggccttactaagttttttacaccatcacctgatggtcgcagatcacgaggtgaaattatagacttttcaaagcactatcgtccaaggaaaaaggtctctcagaaacagtcatgcacttctcatgtgttggctacaggtaccacacaaaagctaaaacctccaccttcttcacttccacccccaacccccatctccggtcagagccccagttcacaaaagtccagcacggccacttcttctccctctccccagagttcttccagccagtgcagtgtgccctccctgagcagccttaccactaacagccagctgaaggcactctttgatgggctttctcatactataccactcagggacagtctcgcaaaaagggacaccccgagttatgcaccacccaaacgtatgcgtcgtaaaactgaattatcttccacggcaaaatctaaagcccacttctttggcaaaagagatattagaagtcggtttatttctcactcctcctcctctagctgggggatggctagaggaagtatttttaaagcaattgctcacttcaagcgaacaactttccttaaaaagcacaggatgctaggcagattaaaatataaagtgacccctcagatggggaccccctcaccagggaaggggagcttgacagacggaaggattaaacctgatcaggatgatgatactgaaataaaaataaacatcaaacaagaaagtgcagatgtaaatgtgattggaaacaaggatgtcgttactgaagaggatttggatgtttttaagcaggcccaggaactttcttgggagaaaatagagtgtgagagtggggtggaagactgtggccggtacccttctgtgattgaatttggtaaatatgaaatccaaacctggtactcctcgccttacccacaggaatatgcaagattaccaaagctttacctgtgtgaattctgtcttaaatatatgaaaagtaaaaatattttgctaagacactccaagaagtgtggatggtttcatcctccagcaaatgaaatttaccgaaggaaagacctttcagtatttgaggttgatgggaatatgagcaaaatttattgccaaaacctttgcttgttagccaagctcttcctggaccacaaaacgttgtattatgatgtcgagccattccttttttatgtccttacaaaaaatgatgaaaagggctgtcatctggttggatacctctctaaggaaaagctttgccagcagaagtataatgtctcctgcataatgatcatgccccagcaccaaaggcaaggatttggacggtttctcattgatttcagctatttgctttctagaagagaaggccaagcagggtctcctgaaaagcctctctccgatctgggccgtctctcctacctggcatattggaagagcgtcatcttggagtatctctaccaccaccatgagaggcacatcagcatcaaggcaattagcagagcgacgggcatgtgcccacatgacattgccaccactctgcagcacctccacatgatcgacaagagagatggcagatttgtcatcattagacgggaaaagttgatattgagccacatggaaaagctgaaaacctgttccagagccaatgaacttgatccagacagtctgaggtggaccccaattttaatttctaatgctgcagtgtctgaagaagagcgagaagctgagaaagaggctgagcggctaatggaacaagctagctgctgggagaaggaggaacaagaaatcctgtcaactagagctaacagtaggcaatcacctgcaaaagtacaatcgaaaaataaatatttgcattccccggagagccggccagtcacaggggagcgagggcagctgctggagctgtctaaagagagcagtgaagaagaagaggaggaggaggacgaggaggaggaagaagaggaggaagaagaggaagaggatgaagaggaggaagaagaggaagaagaagaagaagaagaagaaaatattcaaagctctcccccaagattgacgaaaccacagtcagttgccataaagagaaagaggccttttgtactaaagaagaaaaggggtcgtaaacgcaggaggatcaacagcagtgtaacaacagagaccatttcagagacgacagaagtactgaatgagccctttgacaactcagatgaagagaggccaatgccacagctggagcctacctgtgagattgaagtggaggaagatggcaggaagccagtcctgagaaaagcattccagcatcagcctgggaagaaaagacaaacagaggaagaggaaggaaaagacaatcattgcttcaagaatgctgacccttgtagaaacaatatgaatgatgattcaagtaacttgaaagaaggcagtaaagacaatcccgaacctctaaagtgcaaacaagtgtggccaaaaggaacaaagcgcggtctatctaagtggaggcaaaacaaagagaggaagaccggatttaaactgaatttgtacaccccgccagaaacacccatggagcctgacgagcaggtaacagtggaagaacagaaggagacttcagaaggaaaaaccagccccagtcccatcaggattgaggaggaggtcaaggaaactggggaagccctgttgcctcaagaggaaaacagaagggaagaaacatgtgcccctgtaagtccaaacacatcaccaggtgaaaaaccagaagatgatctcatcaaacctgaggaagaggaagaggaggaggaggaggaagaggaagaagaggaagaagaggaaggggaagaagaagaaggaggaggaaatgtagaaaaagatccagatggtgctaaaagccaagaaaaagaggaaccagaaatctccacggaaaaagaagactctgcacgtttggatgatcacgaagaggaggaggaagaggatgaagagccatcccacaacgaggaccatgatgccgatgacgaggatgacagccacatggagtctgccgaagtggagaaggaagagctgcccagagaaagcttcaaagaagtactggaaaaccaggagacttttttagaccttaatgtgcagcctggtcactcgaacccagaggtcttaatggactgtggcgtcgacctgacagcttcttgtaacagtgagcccaaggagcttgctggggaccctgaagctgtacccgaatctgacgaggagccacccccaggagaacaggcacagaagcaggaccaaaagaacagcaaggaagtcgatacagagttcaaagagggaaacccagcaaccatggaaatcgactctgagactgtccaggccgttcagtctttgacccaggagagcagcgaacaggacgacacctttcaggattgtgccgagactcaagaggcctgtagaagcctacagaactacacccgtgcagaccaaagtccacagattgccaccacgctcgacgattgccaacagtcggaccacagtagcccagtttcatccgtccactcccatcctggccagtccgtacgttctgtcaacagcccaagtgtccctgctctggaaaacagctacgcccaaatcagcccagatcaaagtgccatctcagtgccatctctgcagaacatggaaaccagtcccatgatggatgtcccatcagtttcagatcattcacagcaagtcgtagacagtggatttagtgacctgggcagtatcgagagcacaactgagaactacgaaaacccaagcagctacgattctactatgggaggcagcatctgtggaaacggctcttcacagaacagctgctcctatagcaacctcacctccagcagtctgacacagagcagctgtgctgtcacccagcagatgtccaacatcagcgggagctgcagcatgctgcagcaaaccagcatcagctcccctccgacctgcagcgtcaagtctcctcaaggctgtgtggtggagaggcctccgagcagcagccagcagctggctcagtgcagcatggctgctaacttcaccccacccatgcagctggctgaaatccccgagacgagcaacgccaacattggcttatacgagcgaatgggtcagagtgattttggggctgggcattacccgcagccgtcagccaccttcagccttgccaaactgcagcagttaactaatacacttattgatcattcattgccttacagccattccgctgctgtgacttcctatgcaaacagtgcctctttgtccacaccattaagtaacacagggcttgttcaactttctcagtctccacactccgtccctgggggaccccaagcacaagctaccatgaccccaccccccaacctgactcctcctccaatgaatctgccgccgcctcttttgcaacggaacatggctgcatcaaatattggcatctctcacagccaaagactgcaaacccagattgccagcaagggccacatctccatgagaaccaagtcagcgtctctgtcaccagccgctgccacccatcagtcacaaatctatgggcgctcccagactgtagccatgcagggtcctgcacggactttaacgatgcaaagaggcatgaacatgagtgtgaacctgatgccagcgccagcctacaatgtcaactctgtgaacatgaacatgaacaggcatctctgtcaccagccgctgccacccatcagtcacaaatctatgggcgctcccagaccgtagccatgcagggtcccgcacggactttaacgatgcagagaggcatgaacatgagtgtgaacctatgccctcacagccacctgtgggtccggc

SEQ ID NO: 317039 - DNA, 3600 bp, Homo sapiens
  misc_feature (3)..(6): n is a, c, g, or t
  misc_feature (8)..(8): n is a, c, g, or t
  misc_feature (3556)..(3556): n is a, c, g, or t
ggnnnnangcaacgacaacaacagggggacacaaaatggcggcggcttagctcctacccctggcggcggcggcagcggtggcggaggcgacggcacctcctccaggcggcagccgcagtttctcaggcagcggcagcgcccccggcaggcgcggtggcggtggcgcgcagccagatttgcctgaagacctggataatctccatttttgtcatgggactgttaaaaacgtttggaagttccaattctggtcttgatttcccagttaaagatgttcttcacccgaatgcagtctttcctgttggtaaaataagacaaccatcaacattgcctgtttgtctgcttttgaatctcttaaggatggatgtttgtaagatgttgcttaatacagtctggaatactctgtccatttgttgaattgtaaatgactttcaaatgtgcaagttctgttaaatacaaagagaacctctatgggtaacttttgtgttgaagaagtcatttgtcaaccatggtaaaacttgcaaacccactttatacagagtggattcttgaagctatacagaaaataaaaaagcaaaagcaaaggccctctgaagagagaatctgccatgcggtcagtacttcccatgggttggataagaagacagtctctgaacagctggaactcagtgttcaggatggctcagttctcaaagtcaccaacaaaggccttgcctcctataaggacccagacaaccctgggcgcttttcatcagttaaaccaggcacttttcctaagtcagccaaggggtctagaggatcatgtaatgatctccgcaatgtggattggaataaacttttaaggagagcaattgaaggacttgaggagccgaatggctcctccctgaagaacatagagaagtatctcagaagtcaaagtgatctcacaagcaccaccaacaacccagcctttcagcagcggctgcgactgggggccaaacgcgctgtgaataatgggaggttactgaaagacggaccgcagtacagggtcaattatgggagcttagatggcaaaggggcacctcagtatcccagtgcattcccatcctcgctcccacctgtcagccttctaccccatgagaaagaccagccccgtgctgatcccattccaatatgtagcttctgtttggggactaaagaatcaaatcgtgaaaagaaaccagaagaactcctctcttgtgcagattgtggcagtagtggacacccatcctgtttgaaattttgtcctgaattaacaacaaatgtaaaggccttaaggtggcagtgcatcgaatgcaagacatgcagtgcctgtagagtccaaggcagaaatgctgataatatgcttttttgtgattcctgtgatagaggatttcatatggaatgctgtgacccaccactttccagaatgccaaaagggatgtggatttgccaagtctgcagaccaaagaaaaagggaagaaaactacttcatgagaaagctgcacaaataaaacgacgatatgcaaaacccattggacgaccgaaaaataaattaaagcaacgattgttgtctgtaaccagtgatgaaggatccatgaatgcattcacaggaagggggtcacctggtaggggtcaaaagactaaagtctgtaccacaccttcatctggtcatgctgcatctgggaaggactcaagcagcagattggctgttacagaccccactcggcctggtgccaccaccaaaatcaccaccacctccacctacatttctgcctctacacttaaagttaacaagaaaaccaaagggctcattgatggccttactaagttttttacaccatcacctgatggtcgcagatcacgaggtgaaattatagacttttcaaagcactatcgtccaaggaaaaaggtctctcagaaacagtcatgcacttctcatgtgttggctacaggtaccacacaaaagctaaaacctccaccttcttcacttccacccccaacccccatctccggtcagagccccagttcacaaaagtccagcacggccacttcttctccctctccccagagttcttccagccagtgcagtgtgccctccctgagcagccttaccactaacagccagctgaaggcactctttgatgggctttctcatactataccactcagggacagtctcgcaaaaagggacaccccgagttatgcaccacccaaacgtatgcgtcgtaaaactgaattatcttccacggcaaaatctaaagcccacttctttggcaaaagagatattagaagtcggtttatttctcactcctcctcctctagctgggggatggctagaggaagtatttttaaagcaattgctcacttcaagcgaacaactttccttaaaaagcacaggatgctaggcagattaaaatataaagtgacccctcagatggggaccccctcaccagggaaggggagcttgacagacggaaggattaaacctgatcaggatgatgatactgaaataaaaataaacatcaaacaagaaagtgcagatgtaaatgtgattggaaacaaggatgtcgttactgaagaggatttggatgtttttaagcaggcccaggaactttcttgggagaaaatagagtgtgagagtggggtggaagactgtggccggtacccttctgtgattgaatttggtaaatatgaaatccaaacctggtactcctcgccttacccacaggaatatgcaagattaccaaagctttacctgtgtgaattctgtcttaaatatatgaaaagtaaaaatattttgctaagacactccaagaagtgtggatggtttcatcctccagcaaatgaaatttaccgaaggaaagacctttcagtatttgaggttgatgggaatatgagcaaaatttattgccaaaacctttgcttgttagccaagctcttcctggaccacaaaacgttgtattatgatgtcgagccattccttttttatgtccttacaaaaaatgatgaaaagggctgtcatctggttggatacctctctaaggaaaagctttgccagcagaagtataatgtctcctgcataatgatcatgccccagcaccaaaggcaaggatttggacggtttctcattgatttcagctatttgctttctagaagagaaggccaagcagggtctcctgaaaagcctctctccgatctgggccgtctctcctacctggcatattggaagagcgtcatcttggagtatctctaccaccaccatgagaggcacatcagcatcaaggcaattagcagagcgacgggcatgtgcccacatgacattgccaccactctgcagcacctccacatgatcgacaagagagatggcagatttgtcatcattagacgggaaaagttgatattgagccacatggaaaagctgaaaacctgttccagagccaatgaacttgatccagacagtctgaggtggaccccaattttaatttctaatgctgcagtgtctgaagaagagcgagaagctgagaaagaggctgagcggctaatggaacaagctagctgntacgagaaggagaaaccgtcgattcgagtaatcctggggtagcc

SEQ ID NO: 317040 - DNA, 460 bp, Homo sapiens
ccccgtgctgatcccattccaatatgtagcttctgtttggggactaaagaatcaaatcgtgaaaagaaaccagaagaactcctctcttgtgcagattgtggcagtagtggtaagttgtgtttttcctatgtgttgtacaatgacttcccattatcatagcttcatgctatttgtctctctattaaaactgtattgttatttaaggcagttatatggtaatagcataggctttaaattttaaaagaaaaagtaaggaatagagaaaaaagcgtgagtatgttagtactgacatatggatattatatatgcttatataatactatacatatttatgattaagcttttattttataccagcattggtaattcagtgtggagatgtctgcattataggtaaattccatgtagagaattctaagctttcaagctgagtacaaccccatctttaaaaattaatagc

SEQ ID NO: 317041 - DNA, 653 bp, Homo sapiens
gccctctgaagagagaatctgccatgcggtcagtacttcccatgggttggataagaagacagtctctgaacagctggaactcagtgttcaggatggctcagttctcaaagtcaccaacaaaggccttgcctcctataaggacccagacaaccctgggcgcttttcatcagttaaaccaggcacttttcctaagtcagccaaggggtctagaggatcatgtaatgatctccgcaatgtggattggaataaacttttaaggagagcaattgaaggacttgaggagccgaatggctcctccctgaagaacatagagaagtatctcagaagtcaaagtgatctcacaagcaccaccaacaacccagcctttcagcagcggctgcgactgggggccaaacgcgctgtgaataatgggaggttactgaaagacggaccgcagtacagggtcaattatgggagcttagatggcaaaggggcacctcagtatcccagtgcattcccatcctcgctcccacctgtcagccttctaccccatgagaaagaccaggtaagcgaaggagtaatgttcgtgcattctcactactgtccttttgtcttttacggtttcacttaagttttatgtggacaaaagttctgaataaagtttgataaaattg

SEQ ID NO: 317042 - DNA, 454 bp, Homo sapiens
agtatatatattattattttccttttctttctatttgacagaaaatagagtgtgagagtggggtggaagactgtggccggtacccttctgtgattgaatttggtaaatatgaaatccaaacctggtactcctcgccttacccacaggaatatgcaaggtaatggaataagtctggcaggtgtataacttgaatgtcacatatgtgagaaaggaaaattcttgattctaaagcaggaattagggatgattttaggaaataaattttggtagtcaatgccaagtgcttcccaaactattgcttttgccagcacctttttatggtattccttgttctcggtaaattccttatgctccttagttacatgggcattataaattttgccatttagcttctagattgtgctttctttccttggttaattggggaaatgttggttttgtatgaaaccaaatt

SEQ ID NO: 317043 - DNA, 4334 bp, Homo sapiens
  misc_feature (3)..(6): n is a, c, g, or t
  misc_feature (8)..(8): n is a, c, g, or t
ggnnnnangcaacgacaacaacagggggacacaaaatggcggcggcttagctcctacccctggcggcggcggcagcggtggcggaggcgacggcacctcctccaggcggcagccgcagtttctcaggcagcggcagcgcccccggcaggcgcggtggcggtggcgcgcagccagatttgcctgaagacctggataatctccatttttgtcatgggactgttaaaaacgtttggaagttccaattctggtcttgatttcccagttaaagatgttcttcacccgaatgcagtctttcctgttggtaaaataagacaaccatcaacattgcctgtttgtctgcttttgaatctcttaaggatggatgtttgtaagatgttgcttaatacagtctggaatactctgtccatttgttgaattgtaaatgactttcaaatgtgcaagttctgttaaatacaaagagaacctctatgggtaacttttgtgttgaagaagtcatttgtcaaccatggtaaaacttgcaaacccactttatacagagtggattcttgaagctatacagaaaataaaaaagcaaaagcaaaggccctctgaagagagaatctgccatgcggtcagtacttcccatgggttggataagaagacagtctctgaacagctggaactcagtgttcaggatggctcagttctcaaagtcaccaacaaaggccttgcctcctataaggacccagacaaccctgggcgcttttcatcagttaaaccaggcacttttcctaagtcagccaaggggtctagaggatcatgtaatgatctccgcaatgtggattggaataaacttttaaggagagcaattgaaggacttgaggagccgaatggctcctccctgaagaacatagagaagtatctcagaagtcaaagtgatctcacaagcaccaccaacaacccagcctttcagcagcggctgcgactgggggccaaacgcgctgtgaataatgggaggttactgaaagacggaccgcagtacagggtcaattatgggagcttagatggcaaaggggcacctcagtatcccagtgcattcccatcctcgctcccacctgtcagccttctaccccatgagaaagaccagccccgtgctgatcccattccaatatgtagcttctgtttggggactaaagaatcaaatcgtgaaaagaaaccagaagaactcctctcttgtgcagattgtggcagtagtggacacccatcctgtttgaaattttgtcctgaattaacaacaaatgtaaaggccttaaggtggcagtgcatcgaatgcaagacatgcagtgcctgtagagtccaaggcagaaatgctgataatatgcttttttgtgattcctgtgatagaggatttcatatggaatgctgtgacccaccactttccagaatgccaaaagggatgtggatttgccaagtctgcagaccaaagaaaaagggaagaaaactacttcatgagaaagctgcacaaataaaacgacgatatgcaaaacccattggacgaccgaaaaataaattaaagcaacgattgttgtctgtaaccagtgatgaaggatccatgaatgcattcacaggaagggggtcacctggtaggggtcaaaagactaaagtctgtaccacaccttcatctggtcatgctgcatctgggaaggactcaagcagcagattggctgttacagaccccactcggcctggtgccaccaccaaaatcaccaccacctccacctacatttctgcctctacacttaaagttaacaagaaaaccaaagggctcattgatggccttactaagttttttacaccatcacctgatggtcgcagatcacgaggtgaaattatagacttttcaaagcactatcgtccaaggaaaaaggtctctcagaaacagtcatgcacttctcatgtgttggctacaggtaccacacaaaagctaaaacctccaccttcttcacttccacccccaacccccatctccggtcagagccccagttcacaaaagtccagcacggccacttcttctccctctccccagagttcttccagccagtgcagtgtgccctccctgagcagccttaccactaacagccagctgaaggcactctttgatgggctttctcatactataccactcagggacagtctcgcaaaaagggacaccccgagttatgcaccacccaaacgtatgcgtcgtaaaactgaattatcttccacggcaaaatctaaagcccacttctttggcaaaagagatattagaagtcggtttatttctcactcctcctcctctagctgggggatggctagaggaagtatttttaaagcaattgctcacttcaagcgaacaactttccttaaaaagcacaggatgctaggcagattaaaatataaagtgacccctcagatggggaccccctcaccagggaaggggagcttgacagacggaaggattaaacctgatcaggatgatgatactgaaataaaaataaacatcaaacaagaaagtgcagatgtaaatgtgattggaaacaaggatgtcgttactgaagaggatttggatgtttttaagcaggcccaggaactttcttgggagaaaatagagtgtgagagtggggtggaagactgtggccggtacccttctgtgattgaatttggtaaatatgaaatccaaacctggtactcctcgccttacccacaggaatatgcaagattaccaaagctttacctgtgtgaattctgtcttaaatatatgaaaagtaaaaatattttgctaagacactccaagaagtgtggatggtttcatcctccagcaaatgaaatttaccgaaggaaagacctttcagtatttgaggttgatgggaatatgagcaaaatttattgccaaaacctttgcttgttagccaagctcttcctggaccacaaaacgttgtattatgatgtcgagccattccttttttatgtccttacaaaaaatgatgaaaagggctgtcatctggttggatacctctctaaggaaaagctttgccagcagaagtataatgtctcctgcataatgatcatgccccagcaccaaaggcaaggatttggacggtttctcattgatttcagctatttgctttctagaagagaaggccaagcagggtctcctgaaaagcctctctccgatctgggccgtctctcctacctggcatattggaagagcgtcatcttggagtatctctaccaccaccatgagaggcacatcagcatcaaggcaattagcagagcgacgggcatgtgcccacatgacattgccaccactctgcagcacctccacatgatcgacaagagagatggcagatttgtcatcattagacgggaaaagttgatattgagccacatggaaaagctgaaaacctgttccagagccaatgaacttgatccagacagtctgaggtggaccccaattttaatttctaatgctgcagtgtctgaagaagagcgagaagctgagaaagaggctgagcggctaatggaacaagctagctgctgggagaaggaggaacaagaaatcctgtcaactagagctaacagtaggcaatcacctgcaaaagtacaatcgaaaaataaatatttgcattccccggagagccggccagtcacaggggagcgagggcagctgctggagctgtctaaagagagcagtgaagaagaagaggaggaggaggacgaggaggaggaagaagaggaggaagaagaggaagaggatgaagaggaggaagaagaggaagaagaagaagaagaagaagaaaatattcaaagctctcccccaagattgacgaaaccacagtcagttgccataaagagaaagaggccttttgtactaaagaagaaaaggggtcgtaaacgcaggaggatcaacagcagtgtaacaacagagaccatttcagagacgacagaagtactgaatgagccctttgacaactcagatgaagagaggccaatgccacagctggagcctacctgtgagattgaagtggaggaagatggcaggaagccagtcctgagaaaagcattccagcatcagcctgggaagaaaagacaaacagaggaagaggaaggaaaagacaatcattgcttcaagaatgctgacccttgtagaaattttggatcattgtttgacttggaaaatgatcttcctgatgagctgatacccaatggaggagaattaggccttttaaacagtgggaaccttgttccagatgctgcttccaaacataaacaactgtcggagcttctacgaggaggcagcggctctagtatcaacc

SEQ ID NO: 317044 - DNA, 536 bp, Homo sapiens
atttaagtaataagtgcttattgtcagtggatgaaaaacttttttatactggccactgtttttggcagatgttgatgattgcttctcttacatgtgttgctgttttgttccctctttaggtacttgatgaagaagcagaagtttttatagtcaaaatgtggagattattgatatatgaaacagaagccaagaaaattggtcttgtgaagtaaaactttttatatttagagttccatttcagatttcttctttgccacccttttaaggactttgaatttttctttgtctttgaagacattgtgagatctgtaattttttttttttgtagaaaatgtgaattttttggtcctctaatttgttgttgccctgtgtactcccttggttgtaaagtcatctgaatccttggttctctttatactcaccaggtacaaattactggtatgttttataagccgcagctactgtacacagcctatctgatataatcttgttctgctgatttgtttcttgtaaatattaaaacgactccccaatta

SEQ ID NO: 317045 - DNA, 1077 bp, Homo sapiens
ttgatcttaggaataccttttctttagagctgagattaaaatttacattttatatttgtatagatttaagttgagtgggggagattttaaacagtaggtcagtggttaccagacttaccaaattttagatgcatggaagaactgtaaattcccataaagctaatctattcattgacccccaccattatgatagagatcatatggtgactaatgcaagatgaaactctcagcttggaaagtaacaaggaataggatgtaagtatgagcttctgttttttattatatttatggatgccccctcagaaaaatatgcaaaggggtaactggcttggaaatgggtatttatgcatagtaaatcccactcacgagttttgcctatttgaagcttctctcaatgacagtgcatctgtgaatgttcgctggtgttgaaaatgatgcttttgaacggtgcaatgcaaacactgcatgaaatgtattttgatggtcgagataataaggtgttgctggttcttactgatagactgagagatctttaactcagtgaaatgttaaatgttcattttctcttttattcttactttttcccattgctttcaaaatctgcagttcacaaataatgccaatgaatcagtgctgctgaacacttactatccagatgcccagcccttgctcacaaacacaatgctttttcaagaattaaatgtgtctaagagcacaaacataattctcccaaaattaattttgagagttgaaaaggtggtctatgggaaatcattttagatgaataattttggttaggtataatactgaaattcaggaccgagtaagcttaaaaatggtatatggttgtgtgtgtggtttaccccctttttgtttttatttatttgttaaaccctgtcatgttattggtaaattatgaggaaatcatgttttaagaaaaattcaaaaatatatttgctttaaagtttgggaatctgttaggcattttactgccttagtattatttcactggagggaatgttttgaattttcagaatgtcttttcaaaataaaaagaaatcaaaatgaaaaaccaaa

SEQ ID NO: 317046 - DNA, 685 bp, Homo sapiens
  misc_feature (69)..(69): n is a, c, g, or t
  misc_feature (77)..(77): n is a, c, g, or t
  misc_feature (659)..(660): n is a, c, g, or t
  misc_feature (673)..(673): n is a, c, g, or t
ctctagagaccccaacgtccatcttgcattgagcgcactcgtaacctggatcccagaagttcgcgaagncagtaccntttcctcagcggcggactgctgcagtaagaatgtcttttccacctcatttgaatcgccctcccatgggaatcccagcactcccaccagggatcccacccccgcagtttccaggatttcctccacctgtacctccagggaccccaatgattcctgtaccaatgagcattatggctcctgctccaactgtcttagtacccactgtgtctatggttggaaagcatttgggcgcaagaaaggatcatccaggcttaaaggctaaagaaaatgatgaaaattgtggtcctactaccactgtttttgttggcaacatttccgagaaagcttcagacatgcttataagacaactcttagctaaatgtggtttggttttgagctggaagagagtacaaggtgcttccggaaagcttcaagccttcggattctgtgagtacaaggagccagaatctaccctccgtgcactcagattattacatgacctgcaaattggagagaaaaagctactcgttaaagttgatgcaaagacaaaggcacagctggatgaatggaaagcaaagaagaaagcttctaatgggaatgcaganngacgtccggtacnggctcgattcga

SEQ ID NO: 317047 - DNA, 831 bp, Homo sapiens
actttgattccttgttagggttgtaagtgtatggtttctataagtggtatgtattcctgcattataagcactcgtagaaagcaaataggaaataagccatcattacagcccctaaactcccgattcttgcagtttggtatatttagcaatctgatgtttttgtttgtttgtttaatctacatacaattttgctttttctgagtggtagctatcacaattaacttaaaattgtattttgcctttactacgtaactgaattttcaactgtttaaaagagtcgttactatttgtgtacctattgagcaaaacagtctgaaaacttgtgaatggtttgcagatgtgtcgtatagtgtgctagtcctgaaatttagggaccagaattttttagctattaagaaaaagaaaatgaaaatgaagtagtatctcaggaatagttaaataaaaaaatgaagcttttctgatgttaagaacaaaaccaattctgtgtttaataggactacagagatgtttttgagaaaacatgtatgtttattaactcttgttgtagagtgattttgattttcttgcttgatttttctttcccctgaatttgctgttttgtttaagaatgcaaggccagaaactgtcactaatgacgatgaagaagccttggatgaagaaacaaagaggagagatcagatgattaaaggggctattgaagttttaattcgtgaatactccagcctgggcaactagagtgaaactctgtctccctgctgccaaaaaagaaaaaagaaatacctttcatgttccctccaagttctttgttaaaaaaaaataaaaaccaaagcc

SEQ ID NO: 317048 - DNA, 494 bp, Homo sapiens
cttaatatacatgtgttatgttccagaaggagagttgagagaatgtgggagagttggggaatgttgggaattcaaagagataatagatgagaattttcaggcctgattagtgacataaatctttatattaaggaaagagaaatcctgagcaggagaaaagcaaacacatttgagtacattgttctgaacagaatgaataaaaataaaaccactcttaaacacgttacaggtaaaaggcaaagaggatcttgaaatcaaccaaatataaagattacgtacaaaggaatggcaattaggctggaagaaaatacatcaacagcaataacagaagtgggatggcagtggaataatcttcaaaatgataagtattttatactgatggaacgtcgaattagaccatggattaataagaaaatcatagaatatataggtgaagaagaagctacattagttgattttgtttgttctaaggtcataatcaccgtcacgacatg

SEQ ID NO: 317049 - DNA, 4250 bp, Homo sapiens
gcagtgcacgccgggcaagaggaagacctccatcagctcgccgcgcagcgcggctgtatttgcggcctgtgcgagtaggcgcttgggcactcagtctccctggcgagcgacgggcagaaatctcgaaccagtggagcgcactcgtaacctggatcccagaaggtcgcgaaggcagtaccgtttcctcagcggcggactgctgcagtaagaatgtcttttccacctcatttgaatcgccctcccatgggaatcccagcactcccaccagggatcccacccccgcagtttccaggatttcctccacctgtacctccagggaccccaatgattcctgtaccaatgagcattatggctcctgctccaactgtcttagtacccactgtgtctatggttggaaagcatttgggcgcaagaaaggatcatccaggcttaaaggctaaagaaaatgatgaaaattgtggtcctactaccactgtttttgttggcaacatttccgagaaagcttcagacatgcttataagacaactcttagctaaatgtggtttggttttgagctggaagagagtacaaggtgcttccggaaagcttcaagccttcggattctgtgagtacaaggagccagaatctaccctccgtgcactcagattattacatgacctgcaaattggagagaaaaagctactcgttaaagttgatgcaaagacaaaggcacagctggatgaatggaaagcaaagaagaaagcttctaatgggaatgcaaggccagaaactgtcactaatgacgatgaagaagccttggatgaagaaacaaagaggagagatcagatgattaaaggggctattgaagttttaattcgtgaatactccagtgagctaaatgccccctcacaggaatctgattctcaccccaggaagaagaagaaggaaaagaaggaggacattttccgcagatttccagtggccccactgatcccttatccactcatcactaaggaggatataaatgctatagaaatggaagaagacaaaagagacctgatatctcgagagatcagcaaattcagagacacacataagaaactggaagaagagaaaggcaaaaaggaaaaagaaagacaggaaattgagaaagaacggagagaaagagagagggagcgtgaaagggaacgagaaaggcgagaacgggaacgagaaagggaaagagaacgtgaacgagaaaaggagaaagaacgggagcgggaacgagaacgggatagggaccgtgaccggacaaaagagagagaccgagatcgggatcgagagagagatcgtgaccgggatagagaaaggagctcagatcgtaataaggatcgcagtcgatcaagagaaaaaagcagagatcgtgaaagggaacgagagcgggaaagagagagagagagagaacgagagcgagaacgagaacgggagcgagagagagagcgagagagggaacgggagcgagaaagagaaaaagacaaaaaacgggaccgagaagaagatgaagaagatgcatacgaacgaagaaaacttgaaagaaaactccgagagaaagaagctgcttatcaagagcgccttaagaattgggaaatcagagaacgaaagaaaacccgggaatatgagaaagaagctgaaagagaagaagaaagaagaagagaaatggccaaagaagctaaacgactaaaagaattcttagaagactatgatgatgatagagatgaccccaaatattacagaggaagtgctcttcagaaaaggttgcgtgatagagaaaaggaaatggaagcagatgaacgagataggaagagagagaaggaggagcttgaggaaatcaggcagcgccttctggcagaagggcatccagatccagatgcagagctccagaggatggaacaagaggctgagaggcgcaggcagccacaaataaagcaagagccagaatcagaagaggaggaagaagaaaagcaagaaaaagaagaaaaacgagaagaacccatggaagaggaagaggagccagagcaaaagccttgtctgaaacctactctgaggcccatcagctctgctccatctgtttcctctgccagtggcaatgcaacacctaacactcctggggatgagtctccctgtggtattattattcctcatgaaaactcaccagatcaacagcaacctgaggagcataggccaaaaataggactaagtcttaaactgggtgcttccaatagtcctggtcagcctaattctgtgaagagaaagaaactacctgtagatagtgtctttaacaaatttgaggatgaagacagtgatgacgtaccccgaaaaaggaaactggttcccttggattatggtgaagatgataaaaatgcaaccaaaggcactgtaaacactgaagaaaagcgtaaacacattaagagtctcattgagaaaatccctacagccaaacctgagctcttcgcttatcccctggattggtctattgtggattctatactgatggaacgtcgaattagaccatggattaataagaaaatcatagaatatataggtgaagaagaagctacattagttgattttgtttgttctaaggttatggctcatagttcaccccagagcattttagatgatgttgccatggtacttgatgaagaagcagaagtttttatagtcaaaatgtggagattattgatatatgaaacagaagccaagaaaattggtcttgtgaagtaaaactttttatatttagagttccatttcagatttcttctttgccacccttttaaggactttgaatttttctttgtctttgaagacattgtgagatctgtaattttttttttttgtagaaaatgtgaattttttggtcctctaatttgttgttgccctgtgtactcccttggttgtaaagtcatctgaatccttggttctctttatactcaccaggtacaaattactggtatgttttataagccgcagctactgtacacagcctatctgatataatcttgttctgctgatttgtttcttgtaaatattaaaacgactccccaattattttgcagaattgcacttaatattgaaatgtactgtataggaaccaacatgaacaattttaattgaaaacaccagtcataaactattaccacccccactctcttttgatcagaaatggcaagcccttgtgaaggcatggagtttaaaattggaatgcaaaaattagcagacaatccattcctactgtatttctgtatgaatgtgtttgtgaatgtatgtgtaaaagtctttcttttccctaatttgctttggtggggtccttaaaacatttcccaactaaagaatagaattgtaaaggaaaagtggtactgttccaacctgaaatgtctgttataattaggttattagtttcccagagcatggtgttctcgtgtcgtgagcaatgtggtttgctaactggatggggttttcttattaataagatggctgcttcagcttctcttttaaaggaatgtggatcatagtgatttttccttttaattttattgctcagaaatgaggcatatcctaaaaatcctggagagctgtatttaatgcatttttgcactaattggtccttagtttaattctattgtatctgtttatttaacaaaaaattcatcataccaaaaagtgtaagtgaaaaccccctttaaaacaaaacaaaaaaatgaaataaaattaggcaaattgacagacagtgagagttttacaaacatgataggtattctgctcggcaatttgtaagtttacatgttatttaaggataaaggtaaatcattcaaggcagttaccaaccactaactatttgttttcatttttgtcttgtagaaggtttatatcttgttttaccttggctcattagtgtttaaaaatgtactgatgatgtgcttagagaaattcctggggctttcttcgttgtagatcagaatttcaccagggagtaaaattacctgaaaacgtaagaagttttaaacagcttttcacacaaattagatgcaactgttcccatgtctgagtacttatttaaaagaaaggtaaagattggcctgttagaaaaagcataatgtgagctttggattactggattttttttttttttaaacacacctggagaggacatttgaaaacactgttcttaccctcgaaccctgatgtggttccattatgtaaatatttcaaatattaaaaatgtatatatttga

SEQ ID NO: 317050 - DNA, 5077 bp, Homo sapiens
gcagtgcacgccgggcaagaggaagacctccatcagctcgccgcgcagcgcggctgtatttgcggcctgtgcgagtaggcgcttgggcactcagtctccctggcgagcgacgggcagaaatctcgaaccagtggagcgcactcgtaacctggatcccagaaggtcgcgaaggcagtaccgtttcctcagcggcggactgctgcagtaagaatgtcttttccacctcatttgaatcgccctcccatgggaatcccagcactcccaccagggatcccacccccgcagtttccaggatttcctccacctgtacctccagggaccccaatgattcctgtaccaatgagcattatggctcctgctccaactgtcttagtacccactgtgtctatggttggaaagcatttgggcgcaagaaaggatcatccaggcttaaaggctaaagaaaatgatgaaaattgtggtcctactaccactgtttttgttggcaacatttccgagaaagcttcagacatgcttataagacaactcttagctaaatgtggtttggttttgagctggaagagagtacaaggtgcttccggaaagcttcaagccttcggattctgtgagtacaaggagccagaatctaccctccgtgcactcagattattacatgacctgcaaattggagagaaaaagctactcgttaaagttgatgcaaagacaaaggcacagctggatgaatggaaagcaaagaagaaagcttctaatgggaatgcaaggccagaaactgtcactaatgacgatgaagaagccttggatgaagaaacaaagaggagagatcagatgattaaaggggctattgaagttttaattcgtgaatactccagtgagctaaatgccccctcacaggaatctgattctcaccccaggaagaagaagaaggaaaagaaggaggacattttccgcagatttccagtggccccactgatcccttatccactcatcactaaggaggatataaatgctatagaaatggaagaagacaaaagagacctgatatctcgagagatcagcaaattcagagacacacataagaaactggaagaagagaaaggcaaaaaggaaaaagaaagacaggaaattgagaaagaacggagagaaagagagagggagcgtgaaagggaacgagaaaggcgagaacgggaacgagaaagggaaagagaacgtgaacgagaaaaggagaaagaacgggagcgggaacgagaacgggatagggaccgtgaccggacaaaagagagagaccgagatcgggatcgagagagagatcgtgaccgggatagagaaaggagctcagatcgtaataaggatcgcagtcgatcaagagaaaaaagcagagatcgtgaaagggaacgagagcgggaaagagagagagagagagaacgagagcgagaacgagaacgggagcgagagagagagcgagagagggaacgggagcgagaaagagaaaaagacaaaaaacgggaccgagaagaagatgaagaagatgcatacgaacgaagaaaacttgaaagaaaactccgagagaaagaagctgcttatcaagagcgccttaagaattgggaaatcagagaacgaaagaaaacccgggaatatgagaaagaagctgaaagagaagaagaaagaagaagagaaatggccaaagaagctaaacgactaaaagaattcttagaagactatgatgatgatagagatgaccccaaatattacagaggaagtgctcttcagaaaaggttgcgtgatagagaaaaggaaatggaagcagatgaacgagataggaagagagagaaggaggagcttgaggaaatcaggcagcgccttctggcagaagggcatccagatccagatgcagagctccagaggatggaacaagaggctgagaggcgcaggcagccacaaataaagcaagagccagaatcagaagaggaggaagaagaaaagcaagaaaaagaagaaaaacgagaagaacccatggaagaggaagaggagccagagcaaaagccttgtctgaaacctactctgaggcccatcagctctgctccatctgtttcctctgccagtggcaatgcaacacctaacactcctggggatgagtctccctgtggtattattattcctcatgaaaactcaccagatcaacagcaacctgaggagcataggccaaaaataggactaagtcttaaactgggtgcttccaatagtcctggtcagcctaattctgtgaagagaaagaaactacctgtagatagtgtctttaacaaatttgaggatgaagacagtgatgacgtaccccgaaaaaggaaactggttcccttggattatggtgaagatgataaaaatgcaaccaaaggcactgtaaacactgaagaaaagcgtaaacacattaagagtctcattgagaaaatccctacagccaaacctgagctcttcgcttatcccctggattggtctattgtggattctatactgatggaacgtcgaattagaccatggattaataagaaaatcatagaatatataggtgaagaagaagctacattagttgattttgtttgttctaaggttatggctcatagttcaccccagagcattttagatgatgttgccatggtacttgatgaagaagcagaagtttttatagtcaaaatgtggagattattgatatatgaaacagaagccaagaaaattggtcttgtgaagtaaaactttttatatttagagttccatttcagatttcttctttgccacccttttaaggactttgaatttttctttgtctttgaagacattgtgagatctgtaattttttttttttgtagaaaatgtgaattttttggtcctctaatttgttgttgccctgtgtactcccttggttgtaaagtcatctgaatccttggttctctttatactcaccaggtacaaattactggtatgttttataagccgcagctactgtacacagcctatctgatataatcttgttctgctgatttgtttcttgtaaatattaaaacgactccccaattattttgcagaattgcacttaatattgaaatgtactgtataggaaccaacatgaacaattttaattgaaaacaccagtcataaactattaccacccccactctcttttgatcagaaatggcaagcccttgtgaaggcatggagtttaaaattggaatgcaaaaattagcagacaatccattcctactgtatttctgtatgaatgtgtttgtgaatgtatgtgtaaaagtctttcttttccctaatttgctttggtggggtccttaaaacatttcccaactaaagaatagaattgtaaaggaaaagtggtactgttccaacctgaaatgtctgttataattaggttattagtttcccagagcatggtgttctcgtgtcgtgagcaatgtggtttgctaactggatggggttttcttattaataagatggctgcttcagcttctcttttaaaggaatgtggatcatagtgatttttccttttaattttattgctcagaaatgaggcatatcctaaaaatcctggagagctgtatttaatgcatttttgcactaattggtccttagtttaattctattgtatctgtttatttaacaaaaaattcatcataccaaaaagtgtaagtgaaaaccccctttaaaacaaaacaaaaaaatgaaataaaattaggcaaattgacagacagtgagagttttacaaacatgataggtattctgctcggcaatttgtaagtttacatgttatttaaggataaaggtaaatcattcaaggcagttaccaaccactaactatttgttttcatttttgtcttgtagaaggtttatatcttgttttaccttggctcattagtgtttaaaaatgtactgatgatgtgcttagagaaattcctggggctttcttcgttgtagatcagaatttcaccagggagtaaaattacctgaaaacgtaagaagttttaaacagcttttcacacaaattagatgcaactgttcccatgtctgagtacttatttaaaagaaaggtaaagattggcctgttagaaaaagcataatgtgagctttggattactggattttttttttttttaaacacacctggagaggacatttgaaaacactgttcttaccctcgaaccctgatgtggttccattatgtaaatatttcaaatattaaaaatgtatatatttgatcctggggactcatattctttcagaatcatgtaaataaatggcatcatgttgtaattgtgtggtgcatactagaaaagttaaaaatatgggctgaactttttatggacttgatttttatgactattggtatctaaaggtcaaggaagccatttacattattttggatgaatctactatacatctatggaaatgtctcttttattttaaattctggtttctcaacggaaaatttcagaaaagatgccccttgccattttcgttaatttttcagtcttttcttagacacacccccagcctaagaccttgttcgaggagtttattgtgtctgtcttttcttaacatactgcactgttcttaagcatcatattgtgttgtttttatttagccactattaacatgaaggtttattcaggtagatttgatttcctttgcttcgtttcttctcctgctctgtcaactgtacttatcttaaagggccactctaaaaacaagggagatgtcgtaatctgaaacctttggggagatgtactctgtactgcataacatctccagtgaggtttgtgacaggacctcaactaaatatatgaatttgtgcaagttcatatattaaagtttctgcagcagagtgaaaattgttacagtaaatgtggtagaaactgttaatcgcttaatgccagtttaaatcatgttttgtaaccaagcttcagtaaaaggctttagattgtcagagttggttgatttttagaattgtatatataaagaattagacattaaacaggcatattctagtgtctgaaaatacacataagaaatttctattaaaaag

SEQ ID NO: 317051 - DNA, 4372 bp, Homo sapiens
gcagtgcacgccgggcaagaggaagacctccatcagctcgccgcgcagcgcggctgtatttgcggcctgtgcgagtaggcgcttgggcactcagtctccctggcgagcgacgggcagaaatctcgaaccagtggagcgcactcgtaacctggatcccagaaggtcgcgaaggcagtaccgtttcctcagcggcggacggagtcttactctgtcgttcaggttggagtgcagtggcgcgacctcggctcactgcaacatctgcctcccaggttcaagcaattctcctgcctcaccttccagagtagctgggattacagactgctgcagtaagaatgtcttttccacctcatttgaatcgccctcccatgggaatcccagcactcccaccagggatcccacccccgcagtttccaggatttcctccacctgtacctccagggaccccaatgattcctgtaccaatgagcattatggctcctgctccaactgtcttagtacccactgtgtctatggttggaaagcatttgggcgcaagaaaggatcatccaggcttaaaggctaaagaaaatgatgaaaattgtggtcctactaccactgtttttgttggcaacatttccgagaaagcttcagacatgcttataagacaactcttagctaaatgtggtttggttttgagctggaagagagtacaaggtgcttccggaaagcttcaagccttcggattctgtgagtacaaggagccagaatctaccctccgtgcactcagattattacatgacctgcaaattggagagaaaaagctactcgttaaagttgatgcaaagacaaaggcacagctggatgaatggaaagcaaagaagaaagcttctaatgggaatgcaaggccagaaactgtcactaatgacgatgaagaagccttggatgaagaaacaaagaggagagatcagatgattaaaggggctattgaagttttaattcgtgaatactccagtgagctaaatgccccctcacaggaatctgattctcaccccaggaagaagaagaaggaaaagaaggaggacattttccgcagatttccagtggccccactgatcccttatccactcatcactaaggaggatataaatgctatagaaatggaagaagacaaaagagacctgatatctcgagagatcagcaaattcagagacacacataagaaactggaagaagagaaaggcaaaaaggaaaaagaaagacaggaaattgagaaagaacggagagaaagagagagggagcgtgaaagggaacgagaaaggcgagaacgggaacgagaaagggaaagagaacgtgaacgagaaaaggagaaagaacgggagcgggaacgagaacgggatagggaccgtgaccggacaaaagagagagaccgagatcgggatcgagagagagatcgtgaccgggatagagaaaggagctcagatcgtaataaggatcgcagtcgatcaagagaaaaaagcagagatcgtgaaagggaacgagagcgggaaagagagagagagagagaacgagagcgagaacgagaacgggagcgagagagagagcgagagagggaacgggagcgagaaagagaaaaagacaaaaaacgggaccgagaagaagatgaagaagatgcatacgaacgaagaaaacttgaaagaaaactccgagagaaagaagctgcttatcaagagcgccttaagaattgggaaatcagagaacgaaagaaaacccgggaatatgagaaagaagctgaaagagaagaagaaagaagaagagaaatggccaaagaagctaaacgactaaaagaattcttagaagactatgatgatgatagagatgaccccaaatattacagaggaagtgctcttcagaaaaggttgcgtgatagagaaaaggaaatggaagcagatgaacgagataggaagagagagaaggaggagcttgaggaaatcaggcagcgccttctggcagaagggcatccagatccagatgcagagctccagaggatggaacaagaggctgagaggcgcaggcagccacaaataaagcaagagccagaatcagaagaggaggaagaagaaaagcaagaaaaagaagaaaaacgagaagaacccatggaagaggaagaggagccagagcaaaagccttgtctgaaacctactctgaggcccatcagctctgctccatctgtttcctctgccagtggcaatgcaacacctaacactcctggggatgagtctccctgtggtattattattcctcatgaaaactcaccagatcaacagcaacctgaggagcataggccaaaaataggactaagtcttaaactgggtgcttccaatagtcctggtcagcctaattctgtgaagagaaagaaactacctgtagatagtgtctttaacaaatttgaggatgaagacagtgatgacgtaccccgaaaaaggaaactggttcccttggattatggtgaagatgataaaaatgcaaccaaaggcactgtaaacactgaagaaaagcgtaaacacattaagagtctcattgagaaaatccctacagccaaacctgagctcttcgcttatcccctggattggtctattgtggattctatactgatggaacgtcgaattagaccatggattaataagaaaatcatagaatatataggtgaagaagaagctacattagttgattttgtttgttctaaggttatggctcatagttcaccccagagcattttagatgatgttgccatggtacttgatgaagaagcagaagtttttatagtcaaaatgtggagattattgatatatgaaacagaagccaagaaaattggtcttgtgaagtaaaactttttatatttagagttccatttcagatttcttctttgccacccttttaaggactttgaatttttctttgtctttgaagacattgtgagatctgtaattttttttttttgtagaaaatgtgaattttttggtcctctaatttgttgttgccctgtgtactcccttggttgtaaagtcatctgaatccttggttctctttatactcaccaggtacaaattactggtatgttttataagccgcagctactgtacacagcctatctgatataatcttgttctgctgatttgtttcttgtaaatattaaaacgactccccaattattttgcagaattgcacttaatattgaaatgtactgtataggaaccaacatgaacaattttaattgaaaacaccagtcataaactattaccacccccactctcttttgatcagaaatggcaagcccttgtgaaggcatggagtttaaaattggaatgcaaaaattagcagacaatccattcctactgtatttctgtatgaatgtgtttgtgaatgtatgtgtaaaagtctttcttttccctaatttgctttggtggggtccttaaaacatttcccaactaaagaatagaattgtaaaggaaaagtggtactgttccaacctgaaatgtctgttataattaggttattagtttcccagagcatggtgttctcgtgtcgtgagcaatgtggtttgctaactggatggggttttcttattaataagatggctgcttcagcttctcttttaaaggaatgtggatcatagtgatttttccttttaattttattgctcagaaatgaggcatatcctaaaaatcctggagagctgtatttaatgcatttttgcactaattggtccttagtttaattctattgtatctgtttatttaacaaaaaattcatcataccaaaaagtgtaagtgaaaaccccctttaaaacaaaacaaaaaaatgaaataaaattaggcaaattgacagacagtgagagttttacaaacatgataggtattctgctcggcaatttgtaagtttacatgttatttaaggataaaggtaaatcattcaaggcagttaccaaccactaactatttgttttcatttttgtcttgtagaaggtttatatcttgttttaccttggctcattagtgtttaaaaatgtactgatgatgtgcttagagaaattcctggggctttcttcgttgtagatcagaatttcaccagggagtaaaattacctgaaaacgtaagaagttttaaacagcttttcacacaaattagatgcaactgttcccatgtctgagtacttatttaaaagaaaggtaaagattggcctgttagaaaaagcataatgtgagctttggattactggattttttttttttttaaacacacctggagaggacatttgaaaacactgttcttaccctcgaaccctgatgtggttccattatgtaaatatttcaaatattaaaaatgtatatatttga

SEQ ID NO: 317052 - DNA, 4324 bp, Homo sapiens
gcagtgcacgccgggcaagaggaagacctccatcagctcgccgcgcagcgcggctgtatttgcggcctgtgcgagtaggcgcttgggcactcagtctccctggcgagcgacgggcagaaatctcgaaccagtggagcgcactcgtaacctggatcccagaaggtcgcgaaggcagtaccgtttcctcagcggcggactgctgcagtaagaatgtcttttccacctcatttgaatcgccctcccatgggaatcccagcactcccaccagggatcccacccccgcagtttccaggatttcctccacctgtacctccagggaccccaatgattcctgtaccaatgagcattatggctcctgctccaactgtcttagtacccactgtgtctatggttggaaagcatttgggcgcaagaaaggatcatccaggcttaaaggctaaagaaaatgatgaaaattgtggtcctactaccactgtttttgttggcaacatttccgagaaagcttcagacatgcttataagacaactcttagctaaatgtggtttggttttgagctggaagagagtacaaggtgcttccggaaagcttcaagccttcggattctgtgagtacaaggagccagaatctaccctccgtgcactcagattattacatgacctgcaaattggagagaaaaagctactcgttaaagttgatgcaaagacaaaggcacagctggatgaatggaaagcaaagaagaaagcttctaatgggaatgcaaggccagaaactgtcactaatgacgatgaagaagccttggatgaagaaacaaagaggagagatcagatgattaaaggggctattgaagttttaattcgtgaatactccagtgagctaaatgccccctcacaggaatctgattctcaccccaggaagaagaagaaggaaaagaaggaggacattttccgcagatttccagtggccccactgatcccttatccactcatcactaaggaggatataaatgctatagaaatggaagaagacaaaagagacctgatatctcgagagatcagcaaattcagagacacacataagaaactggaagaagagaaaggcaaaaaggaaaaagaaagacaggaaattgagaaagaacggagagaaagagagagggagcgtgaaagggaacgagaaaggcgagaacgggaacgagaaagggaaagagaacgtgaacgagaaaaggagaaagaacgggagcgggaacgagaacgggatagggaccgtgaccggacaaaagagagagaccgagatcgggatcgagagagagatcgtgaccgggatagagaaaggagctcagatcgtaataaggatcgcagtcgatcaagagaaaaaagcagagatcgtgaaagggaacgagagcgggaaagagagagagagagagaacgagagcgagaacgagaacgggagcgagagagagagcgagagagggaacgggagcgagaaagagaaaaagacaaaaaacgggaccgagaagaagatgaagaagatgcatacgaacgaagaaaacttgaaagaaaactccgagagaaagaagctgcttatcaagagcgccttaagaattgggaaatcagagaacgaaagaaaacccgggaatatgagaaagaagctgaaagagaagaagaaagaagaagagaaatggccaaagaagctaaacgactaaaagaattcttagaagactatgatgatgatagagatgaccccaaatattacagaggaagtgctcttcagaaaaggttgcgtgatagagaaaaggaaatggaagcagatgaacgagataggaagagagagaaggaggagcttgaggaaatcaggcagcgccttctggcagaagggcatccagatccagatgcagagctccagaggatggaacaagaggctgagaggcgcaggcagccacaaataaagcaagagccagaatcagaagaggaggaagaagaaaagcaagaaaaagaagaaaaacgagaagaacccatggaagaggaagaggagccagagcaaaagccttgtctgaaacctactctgaggcccatcagctctgctccatctgtttcctctgccagtggcaatgcaacacctaacactcctggggatgagtctccctgtggtattattattcctcatgaaaactcaccagatcaacagcaacctgaggagcataggccaaaaataggactaagtcttaaactggttttactagtgctcctatatctgcagctgcctcgagttctgagaagaagtgaaaagtttaattttctagcacttgtgcttccaatagtcctggtcagcctaattctgtgaagagaaagaaactacctgtagatagtgtctttaacaaatttgaggatgaagacagtgatgacgtaccccgaaaaaggaaactggttcccttggattatggtgaagatgataaaaatgcaaccaaaggcactgtaaacactgaagaaaagcgtaaacacattaagagtctcattgagaaaatccctacagccaaacctgagctcttcgcttatcccctggattggtctattgtggattctatactgatggaacgtcgaattagaccatggattaataagaaaatcatagaatatataggtgaagaagaagctacattagttgattttgtttgttctaaggttatggctcatagttcaccccagagcattttagatgatgttgccatggtacttgatgaagaagcagaagtttttatagtcaaaatgtggagattattgatatatgaaacagaagccaagaaaattggtcttgtgaagtaaaactttttatatttagagttccatttcagatttcttctttgccacccttttaaggactttgaatttttctttgtctttgaagacattgtgagatctgtaattttttttttttgtagaaaatgtgaattttttggtcctctaatttgttgttgccctgtgtactcccttggttgtaaagtcatctgaatccttggttctctttatactcaccaggtacaaattactggtatgttttataagccgcagctactgtacacagcctatctgatataatcttgttctgctgatttgtttcttgtaaatattaaaacgactccccaattattttgcagaattgcacttaatattgaaatgtactgtataggaaccaacatgaacaattttaattgaaaacaccagtcataaactattaccacccccactctcttttgatcagaaatggcaagcccttgtgaaggcatggagtttaaaattggaatgcaaaaattagcagacaatccattcctactgtatttctgtatgaatgtgtttgtgaatgtatgtgtaaaagtctttcttttccctaatttgctttggtggggtccttaaaacatttcccaactaaagaatagaattgtaaaggaaaagtggtactgttccaacctgaaatgtctgttataattaggttattagtttcccagagcatggtgttctcgtgtcgtgagcaatgtggtttgctaactggatggggttttcttattaataagatggctgcttcagcttctcttttaaaggaatgtggatcatagtgatttttccttttaattttattgctcagaaatgaggcatatcctaaaaatcctggagagctgtatttaatgcatttttgcactaattggtccttagtttaattctattgtatctgtttatttaacaaaaaattcatcataccaaaaagtgtaagtgaaaaccccctttaaaacaaaacaaaaaaatgaaataaaattaggcaaattgacagacagtgagagttttacaaacatgataggtattctgctcggcaatttgtaagtttacatgttatttaaggataaaggtaaatcattcaaggcagttaccaaccactaactatttgttttcatttttgtcttgtagaaggtttatatcttgttttaccttggctcattagtgtttaaaaatgtactgatgatgtgcttagagaaattcctggggctttcttcgttgtagatcagaatttcaccagggagtaaaattacctgaaaacgtaagaagttttaaacagcttttcacacaaattagatgcaactgttcccatgtctgagtacttatttaaaagaaaggtaaagattggcctgttagaaaaagcataatgtgagctttggattactggattttttttttttttaaacacacctggagaggacatttgaaaacactgttcttaccctcgaaccctgatgtggttccattatgtaaatatttcaaatattaaaaatgtatatatttga

SEQ ID NO: 317053 - DNA, 3973 bp, Homo sapiens
ctggggtgagaatcagattcctgtgagggggcatttagctcactggagtattcacgaattaaacttcaatagcccctttaatcatctgatctctcctctttgtttcttcatccaaggcttcttcatcgtcattagtgacagtttctggccttgcattcccattagaagctttcttctttgctttccctactaccactgtttttgttggcaacatttccgagaaagcttcagacatgcttataagacaactcttagctaaatgtggtttggttttgagctggaagagagtacaaggtgcttccggaaagcttcaagccttcggattctgtgagtacaaggagccagaatctaccctccgtgcactcagattattacatgacctgcaaattggagagaaaaagctactcgttaaagttgatgcaaagacaaaggcacagctggatgaatggaaagcaaagaagaaagcttctaatgggaatgcaaggccagaaactgtcactaatgacgatgaagaagccttggatgaagaaacaaagaggagagatcagatgattaaaggggctattgaagttttaattcgtgaatactccagtgagctaaatgccccctcacaggaatctgattctcaccccaggaagaagaagaaggaaaagaaggaggacattttccgcagatttccagtggccccactgatcccttatccactcatcactaaggaggatataaatgctatagaaatggaagaagacaaaagagacctgatatctcgagagatcagcaaattcagagacacacataagaaactggaagaagagaaaggcaaaaaggaaaaagaaagacaggaaattgagaaagaacggagagaaagagagagggagcgtgaaagggaacgagaaaggcgagaacgggaacgagaaagggaaagagaacgtgaacgagaaaaggagaaagaacgggagcgggaacgagaacgggatagggaccgtgaccggacaaaagagagagaccgagatcgggatcgagagagagatcgtgaccgggatagagaaaggagctcagatcgtaataaggatcgcagtcgatcaagagaaaaaagcagagatcgtgaaagggaacgagagcgggaaagagagagagagagagaacgagagcgagaacgagaacgggagcgagagagagagcgagagagggaacgggagcgagaaagagaaaaagacaaaaaacgggaccgagaagaagatgaagaagatgcatacgaacgaagaaaacttgaaagaaaactccgagagaaagaagctgcttatcaagagcgccttaagaattgggaaatcagagaacgaaagaaaacccgggaatatgagaaagaagctgaaagagaagaagaaagaagaagagaaatggccaaagaagctaaacgactaaaagaattcttagaagactatgatgatgatagagatgaccccaaatattacagaggaagtgctcttcagaaaaggttgcgtgatagagaaaaggaaatggaagcagatgaacgagataggaagagagagaaggaggagcttgaggaaatcaggcagcgccttctggcagaagggcatccagatccagatgcagagctccagaggatggaacaagaggctgagaggcgcaggcagccacaaataaagcaagagccagaatcagaagaggaggaagaagaaaagcaagaaaaagaagaaaaacgagaagaacccatggaagaggaagaggagccagagcaaaagccttgtctgaaacctactctgaggcccatcagctctgctccatctgtttcctctgccagtggcaatgcaacacctaacactcctggggatgagtctccctgtggtattattattcctcatgaaaactcaccagatcaacagcaacctgaggagcataggccaaaaataggactaagtcttaaactgggtgcttccaatagtcctggtcagcctaattctgtgaagagaaagaaactacctgtagatagtgtctttaacaaatttgaggatgaagacagtgatgacgtaccccgaaaaaggaaactggttcccttggattatggtgaagatgataaaaatgcaaccaaaggcactgtaaacactgaagaaaagcgtaaacacattaagagtctcattgagaaaatccctacagccaaacctgagctcttcgcttatcccctggattggtctattgtggattctatactgatggaacgtcgaattagaccatggattaataagaaaatcatagaatatataggtgaagaagaagctacattagttgattttgtttgttctaaggttatggctcatagttcaccccagagcattttagatgatgttgccatggtacttgatgaagaagcagaagtttttatagtcaaaatgtggagattattgatatatgaaacagaagccaagaaaattggtcttgtgaagtaaaactttttatatttagagttccatttcagatttcttctttgccacccttttaaggactttgaatttttctttgtctttgaagacattgtgagatctgtaattttttttttttgtagaaaatgtgaattttttggtcctctaatttgttgttgccctgtgtactcccttggttgtaaagtcatctgaatccttggttctctttatactcaccaggtacaaattactggtatgttttataagccgcagctactgtacacagcctatctgatataatcttgttctgctgatttgtttcttgtaaatattaaaacgactccccaattattttgcagaattgcacttaatattgaaatgtactgtataggaaccaacatgaacaattttaattgaaaacaccagtcataaactattaccacccccactctcttttgatcagaaatggcaagcccttgtgaaggcatggagtttaaaattggaatgcaaaaattagcagacaatccattcctactgtatttctgtatgaatgtgtttgtgaatgtatgtgtaaaagtctttcttttccctaatttgctttggtggggtccttaaaacatttcccaactaaagaatagaattgtaaaggaaaagtggtactgttccaacctgaaatgtctgttataattaggttattagtttcccagagcatggtgttctcgtgtcgtgagcaatgtggtttgctaactggatggggttttcttattaataagatggctgcttcagcttctcttttaaaggaatgtggatcatagtgatttttccttttaattttattgctcagaaatgaggcatatcctaaaaatcctggagagctgtatttaatgcatttttgcactaattggtccttagtttaattctattgtatctgtttatttaacaaaaaattcatcataccaaaaagtgtaagtgaaaaccccctttaaaacaaaacaaaaaaatgaaataaaattaggcaaattgacagacagtgagagttttacaaacatgataggtattctgctcggcaatttgtaagtttacatgttatttaaggataaaggtaaatcattcaaggcagttaccaaccactaactatttgttttcatttttgtcttgtagaaggtttatatcttgttttaccttggctcattagtgtttaaaaatgtactgatgatgtgcttagagaaattcctggggctttcttcgttgtagatcagaatttcaccagggagtaaaattacctgaaaacgtaagaagttttaaacagcttttcacacaaattagatgcaactgttcccatgtctgagtacttatttaaaagaaaggtaaagattggcctgttagaaaaagcataatgtgagctttggattactggattttttttttttttaaacacacctggagaggacatttgaaaacactgttcttaccctcgaaccctgatgtggttccattatgtaaatatttcaaatattaaaaatgtatatatttga

SEQ ID NO: 317054 - DNA, 3066 bp, Homo sapiens
gcagtgcacgccgggcaagaggaagacctccatcagctcgccgcgcagcgcggctgtatttgcggcctgtgcgagtaggcgcttgggcactcagtctccctggcgagcgacgggcagaaatctcgaaccagtggagcgcactcgtaacctggatcccagaaggtcgcgaaggcagtaccgtttcctcagcggcggactgctgcagtaagaatgtcttttccacctcatttgaatcgccctcccatgggaatcccagcactcccaccagggatcccacccccgcagtttccaggatttcctccacctgtacctccagggaccccaatgattcctgtaccaatgagcattatggctcctgctccaactgtcttagtacccactgtgtctatggttggaaagcatttgggcgcaagaaaggatcatccaggcttaaaggctaaagaaaatgatgaaaattgtggtcctactaccactgtttttgttggcaacatttccgagaaagcttcagacatgcttataagacaactcttagctaaatgtggtttggttttgagctggaagagagtacaaggtgcttccggaaagcttcaagccttcggattctgtgagtacaaggagccagaatctaccctccgtgcactcagattattacatgacctgcaaattggagagaaaaagctactcgttaaagttgatgcaaagacaaaggcacagctggatgaatggaaagcaaagaagaaagcttctaatgggaatgcaaggccagaaactgtcactaatgacgatgaagaagccttggatgaagaaacaaagaggagagatcagatgattaaaggggctattgaagttttaattcgtgaatactccagtgagctaaatgccccctcacaggaatctgattctcaccccaggaagaagaagaaggaaaagaaggaggacattttccgcagatttccagtggccccactgatcccttatccactcatcactaaggaggatataaatgctatagaaatggaagaagacaaaagagacctgatatctcgagagatcagcaaattcagagacacacataagaaactggaagaagagaaaggcaaaaaggaaaaagaaagacaggaaattgagaaagaacggagagaaagagagagggagcgtgaaagggaacgagaaaggcgagaacgggaacgagaaagggaaagagaacgtgaacgagaaaaggagaaagaacgggagcgggaacgagaacgggatagggaccgtgaccggacaaaagagagagaccgagatcgggatcgagagagagatcgtgaccgggatagagaaaggagctcagatcgtaataaggatcgcagtcgatcaagagaaaaaagcagagatcgtgaaagggaacgagagcgggaaagagagagagagagagaacgagagcgagaacgagaacgggagcgagagagagagcgagagagggaacgggagcgagaaagagaaaaagacaaaaaacgggaccgagaagaagatgaagaagatgcatacgaacgaagaaaacttgaaagaaaactccgagagaaagaagctgcttatcaagagcgccttaagaattgggaaatcagagaacgaaagaaaacccgggaatatgagaaagaagctgaaagagaagaagaaagaagaagagaaatggccaaagaagctaaacgactaaaagaattcttagaagactatgatgatgatagagatgaccccaaatattacagaggaagtgctcttcagaaaaggttgcgtgatagagaaaaggaaatggaagcagatgaacgagataggaagagagagaaggaggagcttgaggaaatcaggcagcgccttctggcagaagggcatccagatccagatgcagagctccagaggatggaacaagaggctgagaggcgcaggcagccacaaataaagcaagagccagaatcagaagaggaggaagaagaaaagcaagaaaaagaagaaaaacgagaagaacccatggaagaggaagaggagccagagcaaaagccttgtctgaaacctactctgaggcccatcagctctgctccatctgtttcctctgccagtggcaatgcaacacctaacactcctggggatgagtctccctgtggtattattattcctcatgaaaactcaccagatcaacagcaacctgaggagcataggccaaaaataggactaagtcttaaactgggtgcttccaatagtcctggtcagcctaattctgtgaagagaaagaaactacctgtagatagtgtctttaacaaatttgaggatgaagacagtgatgacgtaccccgaaaaaggaaactggttcccttggattatggtgaagatgataaaaatgcaaccaaaggcactgtaaacactgaagaaaagcgtaaacacattaagagtctcattgagaaaatccctacagccaaacctgagctcttcgcttatcccctggattggtctattgtggattctatactgatggaacgtcgaattagaccatggattaataagaaaatcatagaatatataggtgaagaagaagctacattagttgattttgtttgttctaaggttatggctcatagttcaccccagagcattttagatgatgttgccatggtacttgatgaagaagcagaagtttttatagtcaaaatgtggagattattgatatatgaaacagaagccaagaaaattggtcttgtgaagtaaaactttttatatttagagttccatttcagatttcttctttgccacccttttaaggactttgaatttttctttgtctttgaagacattgtgagatctgtaattttttttttttgtagaaaatgtgaattttttggtcctctaatttgttgttgccctgtgtactcccttggttgtaaagtcatctgaatccttggttctctttatactcaccaggtacaaattactggtatgttttataagccgcagctactgtacacagcctatctgatataatcttgttctgctgatttgtttcttgtaaatattaaaacgactccccaatta

SEQ ID NO: 317055 - DNA, 3241 bp, Homo sapiens
ggacatattggcgtactacgcctgagtctctccagcagaatcatcaaactgcgagactcacagtatggaaactggaagaagagaaaggcaaaaaggaaaaagaaagacaggaaattgagaaagaacggagagaaagagagagggagcgtgaaagggaacgagaaaggcgagaacgggaacgagaaagggaaagagaacgtgaacgagaaaaggagaaagaacgggagcgggaacgagaacgggatagggaccgtgaccggacaaaagagagagaccgagatcgggatcgagagagagatcgtgaccgggatagagaaaggagctcagatcgtaataaggatcgcagtcgatcaagagaaaaaagcagagatcgtgaaagggaacgagagcgggaaagagagagagagagagaacgagagcgagaacgagaacgggagcgagagagagagcgagagagggaacgggagcgagaaagagaaaaagacaaaaaacgggaccgagaagaagatgaagaagatgcatacgaacgaagaaaacttgaaagaaaactccgagagaaagaagctgcttatcaagagcgccttaagaattgggaaatcagagaacgaaagaaaacccgggaatatgagaaagaagctgaaagagaagaagaaagaagaagagaaatggccaaagaagctaaacgactaaaagaattcttagaagactatgatgatgatagagatgaccccaaatattacagaggaagtgctcttcagaaaaggttgcgtgatagagaaaaggaaatggaagcagatgaacgagataggaagagagagaaggaggagcttgaggaaatcaggcagcgccttctggcagaagggcatccagatccagatgcagagctccagaggatggaacaagaggctgagaggcgcaggcagccacaaataaagcaagagccagaatcagaagaggaggaagaagaaaagcaagaaaaagaagaaaaacgagaagaacccatggaagaggaagaggagccagagcaaaagccttgtctgaaacctactctgaggcccatcagctctgctccatctgtttcctctgccagtggcaatgcaacacctaacactcctggggatgagtctccctgtggtattattattcctcatgaaaactcaccagatcaacagcaacctgaggagcataggccaaaaataggactaagtcttaaactgggtgcttccaatagtcctggtcagcctaattctgtgaagagaaagaaactacctgtagatagtgtctttaacaaatttgaggatgaagacagtgatgacgtaccccgaaaaaggaaactggttcccttggattatggtgaagatgataaaaatgcaaccaaaggcactgtaaacactgaagaaaagcgtaaacacattaagagtctcattgagaaaatccctacagccaaacctgagctcttcgcttatcccctggattggtctattgtggattctatactgatggaacgtcgaattagaccatggattaataagaaaatcatagaatatataggtgaagaagaagctacattagttgattttgtttgttctaaggttatggctcatagttcaccccagagcattttagatgatgttgccatggtacttgatgaagaagcagaagtttttatagtcaaaatgtggagattattgatatatgaaacagaagccaagaaaattggtcttgtgaagtaaaactttttatatttagagttccatttcagatttcttctttgccacccttttaaggactttgaatttttctttgtctttgaagacattgtgagatctgtaattttttttttttgtagaaaatgtgaattttttggtcctctaatttgttgttgccctgtgtactcccttggttgtaaagtcatctgaatccttggttctctttatactcaccaggtacaaattactggtatgttttataagccgcagctactgtacacagcctatctgatataatcttgttctgctgatttgtttcttgtaaatattaaaacgactccccaattattttgcagaattgcacttaatattgaaatgtactgtataggaaccaacatgaacaattttaattgaaaacaccagtcataaactattaccacccccactctcttttgatcagaaatggcaagcccttgtgaaggcatggagtttaaaattggaatgcaaaaattagcagacaatccattcctactgtatttctgtatgaatgtgtttgtgaatgtatgtgtaaaagtctttcttttccctaatttgctttggtggggtccttaaaacatttcccaactaaagaatagaattgtaaaggaaaagtggtactgttccaacctgaaatgtctgttataattaggttattagtttcccagagcatggtgttctcgtgtcgtgagcaatgtggtttgctaactggatggggttttcttattaataagatggctgcttcagcttctcttttaaaggaatgtggatcatagtgatttttccttttaattttattgctcagaaatgaggcatatcctaaaaatcctggagagctgtatttaatgcatttttgcactaattggtccttagtttaattctattgtatctgtttatttaacaaaaaattcatcataccaaaaagtgtaagtgaaaaccccctttaaaacaaaacaaaaaaatgaaataaaattaggcaaattgacagacagtgagagttttacaaacatgataggtattctgctcggcaatttgtaagtttacatgttatttaaggataaaggtaaatcattcaaggcagttaccaaccactaactatttgttttcatttttgtcttgtagaaggtttatatcttgttttaccttggctcattagtgtttaaaaatgtactgatgatgtgcttagagaaattcctggggctttcttcgttgtagatcagaatttcaccagggagtaaaattacctgaaaacgtaagaagttttaaacagcttttcacacaaattagatgcaactgttcccatgtctgagtacttatttaaaagaaaggtaaagattggcctgttagaaaaagcataatgtgagctttggattactggattttttttttttttaaacacacctggagaggacatttgaaaacactgttcttaccctcgaaccctgatgtggttccattatgtaaatatttcaaatattaaaaatgtatatatttga

SEQ ID NO: 317056 - DNA, 3203 bp, Homo sapiens
cgacgcttgcttcatggcctacacgttcgaaaacggcatcttcatcggccgatgaagatgccgttttcgcaggaaattgagaaagaacggagagaaagagagagggagcgtgaaagggaacgagaaaggcgagaacgggaacgagaaagggaaagagaacgtgaacgagaaaaggagaaagaacgggagcgggaacgagaacgggatagggaccgtgaccggacaaaagagagagaccgagatcgggatcgagagagagatcgtgaccgggatagagaaaggagctcagatcgtaataaggatcgcagtcgatcaagagaaaaaagcagagatcgtgaaagggaacgagagcgggaaagagagagagagagagaacgagagcgagaacgagaacgggagcgagagagagagcgagagagggaacgggagcgagaaagagaaaaagacaaaaaacgggaccgagaagaagatgaagaagatgcatacgaacgaagaaaacttgaaagaaaactccgagagaaagaagctgcttatcaagagcgccttaagaattgggaaatcagagaacgaaagaaaacccgggaatatgagaaagaagctgaaagagaagaagaaagaagaagagaaatggccaaagaagctaaacgactaaaagaattcttagaagactatgatgatgatagagatgaccccaaatattacagaggaagtgctcttcagaaaaggttgcgtgatagagaaaaggaaatggaagcagatgaacgagataggaagagagagaaggaggagcttgaggaaatcaggcagcgccttctggcagaagggcatccagatccagatgcagagctccagaggatggaacaagaggctgagaggcgcaggcagccacaaataaagcaagagccagaatcagaagaggaggaagaagaaaagcaagaaaaagaagaaaaacgagaagaacccatggaagaggaagaggagccagagcaaaagccttgtctgaaacctactctgaggcccatcagctctgctccatctgtttcctctgccagtggcaatgcaacacctaacactcctggggatgagtctccctgtggtattattattcctcatgaaaactcaccagatcaacagcaacctgaggagcataggccaaaaataggactaagtcttaaactgggtgcttccaatagtcctggtcagcctaattctgtgaagagaaagaaactacctgtagatagtgtctttaacaaatttgaggatgaagacagtgatgacgtaccccgaaaaaggaaactggttcccttggattatggtgaagatgataaaaatgcaaccaaaggcactgtaaacactgaagaaaagcgtaaacacattaagagtctcattgagaaaatccctacagccaaacctgagctcttcgcttatcccctggattggtctattgtggattctatactgatggaacgtcgaattagaccatggattaataagaaaatcatagaatatataggtgaagaagaagctacattagttgattttgtttgttctaaggttatggctcatagttcaccccagagcattttagatgatgttgccatggtacttgatgaagaagcagaagtttttatagtcaaaatgtggagattattgatatatgaaacagaagccaagaaaattggtcttgtgaagtaaaactttttatatttagagttccatttcagatttcttctttgccacccttttaaggactttgaatttttctttgtctttgaagacattgtgagatctgtaattttttttttttgtagaaaatgtgaattttttggtcctctaatttgttgttgccctgtgtactcccttggttgtaaagtcatctgaatccttggttctctttatactcaccaggtacaaattactggtatgttttataagccgcagctactgtacacagcctatctgatataatcttgttctgctgatttgtttcttgtaaatattaaaacgactccccaattattttgcagaattgcacttaatattgaaatgtactgtataggaaccaacatgaacaattttaattgaaaacaccagtcataaactattaccacccccactctcttttgatcagaaatggcaagcccttgtgaaggcatggagtttaaaattggaatgcaaaaattagcagacaatccattcctactgtatttctgtatgaatgtgtttgtgaatgtatgtgtaaaagtctttcttttccctaatttgctttggtggggtccttaaaacatttcccaactaaagaatagaattgtaaaggaaaagtggtactgttccaacctgaaatgtctgttataattaggttattagtttcccagagcatggtgttctcgtgtcgtgagcaatgtggtttgctaactggatggggttttcttattaataagatggctgcttcagcttctcttttaaaggaatgtggatcatagtgatttttccttttaattttattgctcagaaatgaggcatatcctaaaaatcctggagagctgtatttaatgcatttttgcactaattggtccttagtttaattctattgtatctgtttatttaacaaaaaattcatcataccaaaaagtgtaagtgaaaaccccctttaaaacaaaacaaaaaaatgaaataaaattaggcaaattgacagacagtgagagttttacaaacatgataggtattctgctcggcaatttgtaagtttacatgttatttaaggataaaggtaaatcattcaaggcagttaccaaccactaactatttgttttcatttttgtcttgtagaaggtttatatcttgttttaccttggctcattagtgtttaaaaatgtactgatgatgtgcttagagaaattcctggggctttcttcgttgtagatcagaatttcaccagggagtaaaattacctgaaaacgtaagaagttttaaacagcttttcacacaaattagatgcaactgttcccatgtctgagtacttatttaaaagaaaggtaaagattggcctgttagaaaaagcataatgtgagctttggattactggattttttttttttttaaacacacctggagaggacatttgaaaacactgttcttaccctcgaaccctgatgtggttccattatgtaaatatttcaaatattaaaaatgtatatatttga

SEQ ID NO: 317057 - DNA, 2710 bp, Homo sapiens
aacatagtgataaatgacaagataatgcttgttatacatttacatgtagagagcacactctggtgtgttccgtagatacagaacattaagacattctttaacctcttagcatgcaggttgtaatgttgaaaagaggtgctgttggagatgtcatgtttacttctcaatgatcggagtattaaatgaagccttttatcattcacttttacagaggaagtgctcttcagaaaaggttgcgtgatagagaaaaggaaatggaagcagatgaacgagataggaagagagagaaggaggagcttgaggaaatcaggcagcgccttctggcagaagggcatccagatccagatgcagagctccagaggatggaacaagaggctgagaggcgcaggcagccacaaataaagcaagagccagaatcagaagaggaggaagaagaaaagcaagaaaaagaagaaaaacgagaagaacccatggaagaggaagaggagccagagcaaaagccttgtctgaaacctactctgaggcccatcagctctgctccatctgtttcctctgccagtggcaatgcaacacctaacactcctggggatgagtctccctgtggtattattattcctcatgaaaactcaccagatcaacagcaacctgaggagcataggccaaaaataggactaagtcttaaactgggtgcttccaatagtcctggtcagcctaattctgtgaagagaaagaaactacctgtagatagtgtctttaacaaatttgaggatgaagacagtgatgacgtaccccgaaaaaggaaactggttcccttggattatggtgaagatgataaaaatgcaaccaaaggcactgtaaacactgaagaaaagcgtaaacacattaagagtctcattgagaaaatccctacagccaaacctgagctcttcgcttatcccctggattggtctattgtggattctatactgatggaacgtcgaattagaccatggattaataagaaaatcatagaatatataggtgaagaagaagctacattagttgattttgtttgttctaaggttatggctcatagttcaccccagagcattttagatgatgttgccatggtacttgatgaagaagcagaagtttttatagtcaaaatgtggagattattgatatatgaaacagaagccaagaaaattggtcttgtgaagtaaaactttttatatttagagttccatttcagatttcttctttgccacccttttaaggactttgaatttttctttgtctttgaagacattgtgagatctgtaattttttttttttgtagaaaatgtgaattttttggtcctctaatttgttgttgccctgtgtactcccttggttgtaaagtcatctgaatccttggttctctttatactcaccaggtacaaattactggtatgttttataagccgcagctactgtacacagcctatctgatataatcttgttctgctgatttgtttcttgtaaatattaaaacgactccccaattattttgcagaattgcacttaatattgaaatgtactgtataggaaccaacatgaacaattttaattgaaaacaccagtcataaactattaccacccccactctcttttgatcagaaatggcaagcccttgtgaaggcatggagtttaaaattggaatgcaaaaattagcagacaatccattcctactgtatttctgtatgaatgtgtttgtgaatgtatgtgtaaaagtctttcttttccctaatttgctttggtggggtccttaaaacatttcccaactaaagaatagaattgtaaaggaaaagtggtactgttccaacctgaaatgtctgttataattaggttattagtttcccagagcatggtgttctcgtgtcgtgagcaatgtggtttgctaactggatggggttttcttattaataagatggctgcttcagcttctcttttaaaggaatgtggatcatagtgatttttccttttaattttattgctcagaaatgaggcatatcctaaaaatcctggagagctgtatttaatgcatttttgcactaattggtccttagtttaattctattgtatctgtttatttaacaaaaaattcatcataccaaaaagtgtaagtgaaaaccccctttaaaacaaaacaaaaaaatgaaataaaattaggcaaattgacagacagtgagagttttacaaacatgataggtattctgctcggcaatttgtaagtttacatgttatttaaggataaaggtaaatcattcaaggcagttaccaaccactaactatttgttttcatttttgtcttgtagaaggtttatatcttgttttaccttggctcattagtgtttaaaaatgtactgatgatgtgcttagagaaattcctggggctttcttcgttgtagatcagaatttcaccagggagtaaaattacctgaaaacgtaagaagttttaaacagcttttcacacaaattagatgcaactgttcccatgtctgagtacttatttaaaagaaaggtaaagattggcctgttagaaaaagcataatgtgagctttggattactggattttttttttttttaaacacacctggagaggacatttgaaaacactgttcttaccctcgaaccctgatgtggttccattatgtaaatatttcaaatattaaaaatgtatatatttga

SEQ ID NO: 317058 - DNA, 2246 bp, Homo sapiens
  misc_feature (1993)..(1993): n is a, c, g, or t
gcagtgcacgccgggcaagaggaagacctccatcagctcgccgcgcagcgcggctgtatttgcggcctgtgcgagtaggcgcttgggcactcagtctccctggcgagcgacgggcagaaatctcgaaccagtggagcgcactcgtaacctggatcccagaaggtcgcgaaggcagtaccgtttcctcagcggcggactgctgcagtaagaatgtcttttccacctcatttgaatcgccctcccatgggaatcccagcactcccaccagggatcccacccccgcagtttccaggatttcctccacctgtacctccagggaccccaatgattcctgtaccaatgagcattatggctcctgctccaactgtcttagtacccactgtgtctatggttggaaagcatttgggcgcaagaaaggatcatccaggcttaaaggctaaagaaaatgatgaaaattgtggtcctactaccactgtttttgttggcaacatttccgagaaagcttcagacatgcttataagacaactcttagctaaatgtggtttggttttgagctggaagagagtacaaggtgcttccggaaagcttcaagccttcggattctgtgagtacaaggagccagaatctaccctccgtgcactcagattattacatgacctgcaaattggagagaaaaagctactcgttaaagttgatgcaaagacaaaggcacagctggatgaatggaaagcaaagaagaaagcttctaatgggaatgcaaggccagaaactgtcactaatgacgatgaagaagccttggatgaagaaacaaagaggagagatcagatgattaaaggggctattgaagttttaattcgtgaatactccagtgagctaaatgccccctcacaggaatctgattctcaccccaggaagaagaagaaggaaaagaaggaggacattttccgcagatttccagtggccccactgatcccttatccactcatcactaaggaggatataaatgctatagaaatggaagaagacaaaagagacctgatatctcgagagatcagcaaattcagagacacacataagaaactggaagaagagaaaggcaaaaaggaaaaagaaagacaggaaattgagaaagaacggagagaaagagagagggagcgtgaaagggaacgagaaaggcgagaacgggaacgagaaagggaaagagaacgtgaacgagaaaaggagaaagaacgggagcgggaacgagaacgggatagggaccgtgaccggacaaaagagagagaccgagatcgggatcgagagagagatcgtgaccgggatagagaaaggagctcagatcgtaataaggatcgcagtcgatcaagagaaaaaagcagagatcgtgaaagggaacgagagcgggaaagagagagagagagagaacgagagcgagaacgagaacgggagcgagagagagagcgagagagggaacgggagcgagaaagagaaaaagacaaaaaacgggaccgagaagaagatgaagaagatgcatacgaacgaagaaaacttgaaagaaaactccgagagaaagaagctgcttatcaagagcgccttaagaattgggaaatcagagaacgaaagaaaacccgggaatatgagaaagaagctgaaagagaagaagaaagaagaagagaaatggccaaagaagctaaacgactaaaagaattcttagaagactatgatgatgatagagatgaccccaaatattacagaggaagtgctcttcagaaaaggttgcgtgatagagaaaaggaaatggaagcagatgaacgagataggaagagagagaaggaggagcttgaggaaatcaggcagcgccttctggcagaagggcatccagatccagatgcagagctccagaggatggaacaagaggctgagaggcgcaggcagccacaaataaagcaagagccagaatcagaagaggaggaagaagatgcatacgaacgaaganaacttgaaagaaaactccgagagaaagaagctgcttatcaagagcgccttaagacttgggaaatcagagaacgaaagaaaacccgggaatatgagaaagaagctgaaagagaagaagacagaagaagagaaatggccaaagaagctaaacgactaaaagaattcttagaagatcataataaatatagggttgatgcatccaccctaaatttattatgtaaatataaaccaaattgtcatggcttactgagcta

SEQ ID NO: 317059 - DNA, 2170 bp, Homo sapiens
  misc_feature (1917)..(1917): n is a, c, g, or t
gcagtgcacgccgggcaagaggaagacctccatcagctcgccgcgcagcgcggctgtatttgcggcctgtgcgagtaggcgcttgggcactcagtctccctggcgagcgacgggcagaaatctcgaaccagtggagcgcactcgtaacctggatcccagaaggtcgcgaaggcagtaccgtttcctcagcggcggactgctgcagtaagaatgtcttttccacctcatttgaatcgccctcccatgggaatcccagcactcccaccagggatcccacccccgcagtttccaggatttcctccacctgtacctccagggaccccaatgattcctgtaccaatgagcattatggctcctgctccaactgtcttagtacccactgtgtctatggttggaaagcatttgggcgcaagaaaggatcatccaggcttaaaggctaaagaaaatgatgaaaattgtggtcctactaccactgtttttgttggcaacatttccgagaaagcttcagacatgcttataagacaactcttagctaaatgtggtttggttttgagctggaagagagtacaaggtgcttccggaaagcttcaagccttcggattctgtgagtacaaggagccagaatctaccctccgtgcactcagattattacatgacctgcaaattggagagaaaaagctactcgttaaagttgatgcaaagacaaaggcacagctggatgaatggaaagcaaagaagaaagcttctaatgggaatgcaaggccagaaactgtcactaatgacgatgaagaagccttggatgaagaaacaaagaggagagatcagatgattaaaggggctattgaagttttaattcgtgaatactccagtgagctaaatgccccctcacaggaatctgattctcaccccaggaagaagaagaaggaaaagaaggaggacattttccgcagatttccagtggccccactgatcccttatccactcatcactaaggaggatataaatgctatagaaatggaagaagacaaaagagacctgatatctcgagagatcagcaaattcagagacacacataagaaactggaagaagagaaaggcaaaaaggaaaaagaaagacaggaaattgagaaagaacggagagaaagagagagggagcgtgaaagggaacgagaaaggcgagaacgggaacgagaaagggaaagagaacgtgaacgagaaaaggagaaagaacgggagcgggaacgagaacgggatagggaccgtgaccggacaaaagagagagaccgagatcgggatcgagagagagatcgtgaccgggatagagaaaggagctcagatcgtaataaggatcgcagtcgatcaagagaaaaaagcagagatcgtgaaagggaacgagagcgggaaagagagagagagagagaacgagagcgagaacgagaacgggagcgagagagagagcgagagagggaacgggagcgagaaagagaaaaagacaaaaaacgggaccgagaagaagatgaagaagatgcatacgaacgaagaaaacttgaaagaaaactccgagagaaagaagctgcttatcaagagcgccttaagaattgggaaatcagagaacgaaagaaaacccgggaatatgagaaagaagctgaaagagaagaagaaagaagaagagaaatggccaaagaagctaaacgactaaaagaattcttagaagactatgatgatgatagagatgaccccaaatattacagaggaagtgctcttcagaaaaggttgcgtgatagagagagagagaacgagagcgagaacgagaacgggagcgagagagagagcgagagagggaacgggagcgagaaagagaaaaagacaaaaaacgggaccgagaagaagatgaagaagatgcatacgaacgaaganaacttgaaagaaaactccgagagaaagaagctgcttatcaagagcgccttaagacttgggaaatcagagaacgaaagaaaacccgggaatatgagaaagaagctgaaagagaagaagacagaagaagagaaatggccaaagaagctaaacgactaaaagaattcttagaagatcataataaatatagggttgatgcatccaccctaaatttattatgtaaatataaaccaaattgtcatggcttactgagcta

SEQ ID NO: 317060 - DNA, 1816 bp, Homo sapiens
  misc_feature (1697)..(1697): n is a, c, g, or t
  misc_feature (1721)..(1721): n is a, c, g, or t
  misc_feature (1731)..(1731): n is a, c, g, or t
  misc_feature (1774)..(1774): n is a, c, g, or t
  misc_feature (1797)..(1797): n is a, c, g, or t
gcagtgcacgccgggcaagaggaagacctccatcagctcgccgcgcagcgcggctgtatttgcggcctgtgcgagtaggcgcttgggcactcagtctccctggcgagcgacgggcagaaatctcgaaccagtggagcgcactcgtaacctggatcccagaaggtcgcgaaggcagtaccgtttcctcagcggcggactgctgcagtaagaatgtcttttccacctcatttgaatcgccctcccatgggaatcccagcactcccaccagggatcccacccccgcagtttccaggatttcctccacctgtacctccagggaccccaatgattcctgtaccaatgagcattatggctcctgctccaactgtcttagtacccactgtgtctatggttggaaagcatttgggcgcaagaaaggatcatccaggcttaaaggctaaagaaaatgatgaaaattgtggtcctactaccactgtttttgttggcaacatttccgagaaagcttcagacatgcttataagacaactcttagctaaatgtggtttggttttgagctggaagagagtacaaggtgcttccggaaagcttcaagccttcggattctgtgagtacaaggagccagaatctaccctccgtgcactcagattattacatgacctgcaaattggagagaaaaagctactcgttaaagttgatgcaaagacaaaggcacagctggatgaatggaaagcaaagaagaaagcttctaatgggaatgcaaggccagaaactgtcactaatgacgatgaagaagccttggatgaagaaacaaagaggagagatcagatgattaaaggggctattgaagttttaattcgtgaatactccagtgagctaaatgccccctcacaggaatctgattctcaccccaggaagaagaagaaggaaaagaaggaggacattttccgcagatttccagtggccccactgatcccttatccactcatcactaaggaggatataaatgctatagaaatggaagaagacaaaagagacctgatatctcgagagatcagcaaattcagagacacacataagaaactggaagaagagaaaggcaaaaaggaaaaagaaagacaggaaattgagaaagaacggagagaaagagagagggagcgtgaaagggaacgagaaaggcgagaacgggaacgagaaagggaaagagaacgtgaacgagaaaaggagaaagaacgggagcgggaacgagaacgggatagggaccgtgaccggacaaaagagagagaccgagatcgggatcgagagagagatcgtgaccgggatagagaaaggagctcagatcgtaataaggatcgcagtcgatcaagagaaaaaagcagagatcgtgaaagggaacgagagcgggaaagagagagagagagagaacgagagcgagaacgagaacgggagcgagagagagagcgagagagggaacgggagcgagaaagagaaaaagacaaaaaacgggaccgagaagaagatgaagaagatgcatacgaacgaagaaaacttgaaagaaaactccgagagaaagaagctgcttatcaagagcgccttaagaattgggaaatcagagaacgaaagaaaacccgggaatatgagaaagaagctgaaagagaagaagaaagaagaagagaaatgggcgaagaagctaaaacganttaaaaagatttttttaggaagantttttgttgnttgattaggaggttgaccccaattttttaccagagggaattgntttttcaggaaaagttttccttntttggagaaaagggaattt

SEQ ID NO: 317061 - DNA, 2385 bp, Homo sapiens
atttccttccttctttattttcttcccttcacccctgcaaatacctgtattgtgctttaaagaaaaaaatttatatttgtgcttggttaggtagatagaagattactaaaaaatgcctttctagctcacgattgttttcatagttttactagtgctcctatatctgcagctgcctcgagttctgagaagaagtgaaaagtttaattttctagcacttgtgagtagtgagttattttttacagttgggatctttctctaagatttgtggaagtatattttgcattgcttttgagggatggtgggttatgaaatgaaacatttggaaattaagtcatcttgctaagagagtgtttttactgtaggtgcttccaatagtcctggtcagcctaattctgtgaagagaaagaaactacctgtagatagtgtctttaacaaatttgaggatgaagacagtgatgacgtaccccgaaaaaggaaactggttcccttggattatggtgaagatgataaaaatgcaaccaaaggcactgtaaacactgaagaaaagcgtaaacacattaagagtctcattgagaaaatccctacagccaaacctgagctcttcgcttatcccctggattggtctattgtggattctatactgatggaacgtcgaattagaccatggattaataagaaaatcatagaatatataggtgaagaagaagctacattagttgattttgtttgttctaaggttatggctcatagttcaccccagagcattttagatgatgttgccatggtacttgatgaagaagcagaagtttttatagtcaaaatgtggagattattgatatatgaaacagaagccaagaaaattggtcttgtgaagtaaaactttttatatttagagttccatttcagatttcttctttgccacccttttaaggactttgaatttttctttgtctttgaagacattgtgagatctgtaattttttttttttgtagaaaatgtgaattttttggtcctctaatttgttgttgccctgtgtactcccttggttgtaaagtcatctgaatccttggttctctttatactcaccaggtacaaattactggtatgttttataagccgcagctactgtacacagcctatctgatataatcttgttctgctgatttgtttcttgtaaatattaaaacgactccccaattattttgcagaattgcacttaatattgaaatgtactgtataggaaccaacatgaacaattttaattgaaaacaccagtcataaactattaccacccccactctcttttgatcagaaatggcaagcccttgtgaaggcatggagtttaaaattggaatgcaaaaattagcagacaatccattcctactgtatttctgtatgaatgtgtttgtgaatgtatgtgtaaaagtctttcttttccctaatttgctttggtggggtccttaaaacatttcccaactaaagaatagaattgtaaaggaaaagtggtactgttccaacctgaaatgtctgttataattaggttattagtttcccagagcatggtgttctcgtgtcgtgagcaatgtggtttgctaactggatggggttttcttattaataagatggctgcttcagcttctcttttaaaggaatgtggatcatagtgatttttccttttaattttattgctcagaaatgaggcatatcctaaaaatcctggagagctgtatttaatgcatttttgcactaattggtccttagtttaattctattgtatctgtttatttaacaaaaaattcatcataccaaaaagtgtaagtgaaaaccccctttaaaacaaaacaaaaaaatgaaataaaattaggcaaattgacagacagtgagagttttacaaacatgataggtattctgctcggcaatttgtaagtttacatgttatttaaggataaaggtaaatcattcaaggcagttaccaaccactaactatttgttttcatttttgtcttgtagaaggtttatatcttgttttaccttggctcattagtgtttaaaaatgtactgatgatgtgcttagagaaattcctggggctttcttcgttgtagatcagaatttcaccagggagtaaaattacctgaaaacgtaagaagttttaaacagcttttcacacaaattagatgcaactgttcccatgtctgagtacttatttaaaagaaaggtaaagattggcctgttagaaaaagcataatgtgagctttggattactggattttttttttttttaaacacacctggagaggacatttgaaaacactgttcttaccctcgaaccctgatgtggttccattatgtaaatatttcaaatattaaaaatgtatatatttga

SEQ ID NO: 317062 - DNA, 1638 bp, Homo sapiens
gcagtgcacgccgggcaagaggaagacctccatcagctcgccgcgcagcgcggctgtatttgcggcctgtgcgagtaggcgcttgggcactcagtctccctggcgagcgacgggcagaaatctcgaaccagtggagcgcactcgtaacctggatcccagaaggtcgcgaaggcagtaccgtttcctcagcggcggactgctgcagtaagaatgtcttttccacctcatttgaatcgccctcccatgggaatcccagcactcccaccagggatcccacccccgcagtttccaggatttcctccacctgtacctccagggaccccaatgattcctgtaccaatgagcattatggctcctgctccaactgtcttagtacccactgtgtctatggttggaaagcatttgggcgcaagaaaggatcatccaggcttaaaggctaaagaaaatgatgaaaattgtggtcctactaccactgtttttgttggcaacatttccgagaaagcttcagacatgcttataagacaactcttagctaaatgtggtttggttttgagctggaagagagtacaaggtgcttccggaaagcttcaagccttcggattctgtgagtacaaggagccagaatctaccctccgtgcactcagattattacatgacctgcaaattggagagaaaaagctactcgttaaagttgatgcaaagacaaaggcacagctggatgaatggaaagcaaagaagaaagcttctaatgggaatgcaaggccagaaactgtcactaatgacgatgaagaagccttggatgaagaaacaaagaggagagatcagatgattaaaggggctattgaagttttaattcgtgaatactccagtgagctaaatgccccctcacaggaatctgattctcaccccaggaagaagaagaaggaaaagaaggaggacattttccgcagatttccagtggccccactgatcccttatccactcatcactaaggaggatataaatgctatagaaatggaagaagacaaaagagacctgatatctcgagagatcagcaaattcagagacacacataagaaactggaagaagagaaaggcaaaaaggaaaaagaaagacaggaaattgagaaagaacggagagaaagagagagggagcgtgaaagggaacgagaaaggcgagaacgggaacgagaaagggaaagagaacgtgaacgagaaaaggagaaagaacgggagcgggaacgagaacgggatagggaccgtgaccggacaaaagagagagaccgagatcgggatcgagagagagatcgtgaccgggatagagaaaggagctcagatcgtaataaggatcgcagtcgatcaagagaaaaaagcagagatcgtgaaagggaacgagagcgggaaagagagagagagagagaacgagagcgagaacgagaacgggagcgagagagagagcgagagagggaacgggagcgagaaagagaaaaagacaaaaaacgggaccgagaagaagatgaagaagatgcatacgaacgaagaaaacttgaaagaaaactccgagagaaagaagctgcttatcaagagcgccttaagaattgggaaatcagagaacatataaaaaaaataataataaaa

SEQ ID NO: 317063 - DNA, 1377 bp, Homo sapiens
gcagtgcacgccgggcaagaggaagacctccatcagctcgccgcgcagcgcggctgtatttgcggcctgtgcgagtaggcgcttgggcactcagtctccctggcgagcgacgggcagaaatctcgaaccagtggagcgcactcgtaacctggatcccagaaggtcgcgaaggcagtaccgtttcctcagcggcggactgctgcagtaagaatgtcttttccacctcatttgaatcgccctcccatgggaatcccagcactcccaccagggatcccacccccgcagtttccaggatttcctccacctgtacctccagggaccccaatgattcctgtaccaatgagcattatggctcctgctccaactgtcttagtacccactgtgtctatggttggaaagcatttgggcgcaagaaaggatcatccaggcttaaaggctaaagaaaatgatgaaaattgtggtcctactaccactgtttttgttggcaacatttccgagaaagcttcagacatgcttataagacaactcttagctaaatgtggtttggttttgagctggaagagagtacaaggtgcttccggaaagcttcaagccttcggattctgtgagtacaaggagccagaatctaccctccgtgcactcagattattacatgacctgcaaattggagagaaaaagctactcgttaaagttgatgcaaagacaaaggcacagctggatgaatggaaagcaaagaagaaagcttctaatgggaatgcaaggccagaaactgtcactaatgacgatgaagaagccttggatgaagaaacaaagaggagagatcagatgattaaaggggctattgaagttttaattcgtgaatactccagtgagctaaatgccccctcacaggaatctgattctcaccccaggaagaagaagaaggaaaagaaggaggacattttccgcagatttccagtggccccactgatcccttatccactcatcactaaggaggatataaatgctatagaaatggaagaagacaaaagagacctgatatctcgagagatcagcaaattcagagacacacataagaaactggaagaagagaaaggcaaaaaggaaaaagaaagacaggaaattgagaaagaacggagagaaagagagagggagcgtgaaagggaacgagaaaggcgagaacgggaacgagaaagggaaagagaacgtgaacgagaaaaggagaaagaacgggagcaatttggcagtctccagaaaaccagaacacatggtcccaataactacagctaaaaggtgaatgtcagtatttggaagtttccttatagcagtaaactctgaagcacttcacattatatgccttgctttagtttatcagtg

SEQ ID NO: 317064 - DNA, 1167 bp, Homo sapiens
gcagtgcacgccgggcaagaggaagacctccatcagctcgccgcgcagcgcggctgtatttgcggcctgtgcgagtaggcgcttgggcactcagtctccctggcgagcgacgggcagaaatctcgaaccagtggagcgcactcgtaacctggatcccagaaggtcgcgaaggcagtaccgtttcctcagcggcggactgctgcagtaagaatgtcttttccacctcatttgaatcgccctcccatgggaatcccagcactcccaccagggatcccacccccgcagtttccaggatttcctccacctgtacctccagggaccccaatgattcctgtaccaatgagcattatggctcctgctccaactgtcttagtacccactgtgtctatggttggaaagcatttgggcgcaagaaaggatcatccaggcttaaaggctaaagaaaatgatgaaaattgtggtcctactaccactgtttttgttggcaacatttccgagaaagcttcagacatgcttataagacaactcttagctaaatgtggtttggttttgagctggaagagagtacaaggtgcttccggaaagcttcaagccttcggattctgtgagtacaaggagccagaatctaccctccgtgcactcagattattacatgacctgcaaattggagagaaaaagctactcgttaaagttgatgcaaagacaaaggcacagctggatgaatggaaagcaaagaagaaagcttctaatgggaatgcaaggccagaaactgtcactaatgacgatgaagaagccttggatgaagaaacaaagaggagagatcagatgattaaaggggctattgaagttttaattcgtgaatactccagtgagctaaatgccccctcacaggaatctgattctcaccccaggaagaagaagaaggaaaagaaggaggacattttccgcagatttccagtggccccactgatcccttatccactcatcactaaggaggatataaatgctatagaaatggaagaagacaaaagagacctgatatctcgagagatcagcaaattcagagacacacataagagatcatatggtgactaatgcaagatgaaactctcagcttggaaagtaacaaggaataggataaactggaagaagagaaaggcaaaaagg

SEQ ID NO: 317065 - DNA, 745 bp, Homo sapiens
gcagtgcacgccgggcaagaggaagacctccatcagctcgccgcgcagcgcggctgtatttgcggcctgtgcgagtaggcgcttgggcactcagtctccctggcgagcgacgggcagaaatctcgaaccagtggagcgcactcgtaacctggatcccagaaggtcgcgaaggcagtaccgtttcctcagcggcggactgctgcagtaagaatgtcttttccacctcatttgaatcgccctcccatgggaatcccagcactcccaccagggatcccacccccgcagtttccaggatttcctccacctgtacctccagggaccccaatgattcctgtaccaatgagcattatggctcctgctccaactgtcttagtacccactgtgtctatggttggaaagcatttgggcgcaagaaaggatcatccaggcttaaaggctaaagaaaatgatgaaaattgtggtcctactaccactgtttttgttggcaacatttccgagaaagcttcagacatgcttataagacaactcttagctaaatgtggtttggttttgagctggaagagagtacaaggtgcttccggaaagcttcaagccttcggattctgtgagtacaaggagccagaatctaccctccgtgcactcagattattacatgacctgcaaattggagagaaaaagctactcgttaaagttgatgcaaagacaaaggcacagaatgcagtgagcacagctgcagtcggtaaca

SEQ ID NO: 317066 - DNA, 282 bp, Homo sapiens
tgtattttcagtaaagacagcgtttcaccatgttggccaagctggtctcaaactcctgacctcagatgatctgcccaccgcggcctcccaaagtgctgggattacaggcatgagccaccatacctggccttttctcttttcataaagatattttacaagaggtaatgtaaaacaaaaatcaagttgaatggtgtagagttgtagttaatcagattattgtttgggttttagatggaacaagaggctgagaggcgcaggcagccacaaataaagcaagagcca

SEQ ID NO: 317067 - DNA, 379 bp, Homo sapiens
agaccatggattaataagaaaatcatagaatatataggtgaagaagaagctacattagttgattttgtttgttctaaggttagtcttctattctcttccatgccagcatttattttatatattaaaatattagacacttcttaaaagagcagaaattttacagagtcaagttccatgatggtttaggttcagttaagtgatttatatctgcttttttaaagttatttttatttttggtgtgtttttttttattcactgcagtggatgcagatttatgtctgctttaatgaacctttccatccaacttcagactcctcacaccacatgtttttatttcagtggtcgaggaggatggaattgctggttactgccaattgtg

SEQ ID NO: 317068 - DNA, 4978 bp, Homo sapiens
gcagtgcacgccgggcaagaggaagacctccatcagctcgccgcgcagcgcggctgtatttgcggcctgtgcgagtaggcgcttgggcactcagtctccctggcgagcgacgggcagaaatctcgaaccagtggagcgcactcgtaacctggatcccagaaggtcgcgaaggcagtaccgtttcctcagcggcggactgctgcagtaagaatgtcttttccacctcatttgaatcgccctcccatgggaatcccagcactcccaccagggatcccacccccgcagtttccaggatttcctccacctgtacctccagggaccccaatgattcctgtaccaatgagcattatggctcctgctccaactgtcttagtacccactgtgtctatggttggaaagcatttgggcgcaagaaaggatcatccaggcttaaaggctaaagaaaatgatgaaaattgtggtcctactaccactgtttttgttggcaacatttccgagaaagcttcagacatgcttataagacaactcttagctaaatgtggtttggttttgagctggaagagagtacaaggtgcttccggaaagcttcaagccttcggattctgtgagtacaaggagccagaatctaccctccgtgcactcagattattacatgacctgcaaattggagagaaaaagctactcgttaaagttgatgcaaagacaaaggcacagctggatgaatggaaagcaaagaagaaagcttctaatgggaatgcaaggccagaaactgtcactaatgacgatgaagaagccttggatgaagaaacaaagaggagagatcagatgattaaaggggctattgaagttttaattcgtgaatactccagtgagctaaatgccccctcacaggaatctgattctcaccccaggaagaagaagaaggaaaagaaggaggacattttccgcagatttccagtggccccactgatcccttatccactcatcactaaggaggatataaatgctatagaaatggaagaagacaaaagagacctgatatctcgagagatcagcaaattcagagacacacataagaaactggaagaagagaaaggcaaaaaggaaaaagaaagacaggaaattgagaaagaacggagagaaagagagagggagcgtgaaagggaacgagaaaggcgagaacgggaacgagaaagggaaagagaacgtgaacgagaaaaggagaaagaacgggagcgggaacgagaacgggatagggaccgtgaccggacaaaagagagagaccgagatcgggatcgagagagagatcgtgaccgggatagagaaaggagctcagatcgtaataaggatcgcagtcgatcaagagaaaaaagcagagatcgtgaaagggaacgagagcgggaaagagagagagagagagaacgagagcgagaacgagaacgggagcgagagagagagcgagagagggaacgggagcgagaaagagaaaaagacaaaaaacgggaccgagaagaagatgaagaagatgcatacgaacgaagaaaacttgaaagaaaactccgagagaaagaagctgcttatcaagagcgccttaagaattgggaaatcagagaacgaaagaaaacccgggaatatgagaaagaagctgaaagagaagaagaaagaagaagagaaatggccaaagaagctaaacgactaaaagaattcttagaagactatgatgatgatagagatgaccccaaatattacagaggaagtgctcttcagaaaaggttgcgtgatagagaaaaggaaatggaagcagatgaacgagataggaagagagagaaggaggagcttgaggaaatcaggcagcgccttctggcagaagggcatccagatccagatgcagagctccagaggatggaacaagaggctgagaggcgcaggcagccacaaataaagcaagagccagaatcagaagaggaggaagaagaaaagcaagaaaaagaagaaaaacgagaagaacccatggaagaggaagaggagccagagcaaaagccttgtctgaaacctactctgaggcccatcagctctgctccatctgtttcctctgccagtggcaatgcaacacctaacactcctggggatgagtctccctgtggtattattattcctcatgaaaactcaccagatcaacagcaacctgaggagcataggccaaaaataggactaagtcttaaactgggtgcttccaatagtcctggtcagcctaattctgtgaagagaaagaaactacctgtagatagtgtctttaacaaatttgaggatgaagacagtgatgacgtaccccgaaaaaggaaactggttcccttggattatggtgaagatgataaaaatgcaaccaaaggcactgtaaacactgaagaaaagcgtaaacacattaagagtctcattgagaaaatccctacagccaaacctgagctcttcgcttatcccctggattggtctattgtggattctatactgatggaacgtcgaattagaccatggattaataagaaaatcatagaatatataggtgaagaagaagctacattagttgattttgtttgttctaaggttatggctcatagttcaccccagagcattttagatgatgttgccatggtacttgatgaagaagcagaagtttttatagtcaaaatgtggagattattgatatatgaaacagaagccaagaaaattggtcttgtgaagtaaaactttttatatttagagttccatttcagatttcttctttgccacccttttaaggactttgaatttttctttgtctttgaagacattgtgagatctgtaattttttttttttgtagaaaatgtgaattttttggtcctctaatttgttgttgccctgtgtactcccttggttgtaaagtcatctgaatccttggttctctttatactcaccaggtacaaattactggtatgttttataagccgcagctactgtacacagcctatctgatataatcttgttctgctgatttgtttcttgtaaatattaaaacgactccccaattattttgcagaattgcacttaatattgaaatgtactgtataggaaccaacatgaacaattttaattgaaaacaccagtcataaactattaccacccccactctcttttgatcagaaatggcaagcccttgtgaaggcatggagtttaaaattggaatgcaaaaattagcagacaatccattcctactgtatttctgtatgaatgtgtttgtgaatgtatgtgtaaaagtctttcttttccctaatttgctttggtggggtccttaaaacatttcccaactaaagaatagaattgtaaaggaaaagtggtactgttccaacctgaaatgtctgttataattaggttattagtttcccagagcatggtgttctcgtgtcgtgagcaatgtggtttgctaactggatggggttttcttattaataagatggctgcttcagcttctcttttaaaggaatgtggatcatagtgatttttccttttaattttattgctcagaaatgaggcatatcctaaaaatcctggagagctgtatttaatgcatttttgcactaattggtccttagtttaattctattgtatctgtttatttaacaaaaaattcatcataccaaaaagtgtaagtgaaaaccccctttaaaacaaaacaaaaaaatgaaataaaattaggcaaattgacagacagtgagagttttacaaacatgataggtattctgctcggcaatttgtaagtttacatgttatttaaggataaaggtaaatcattcaaggcagttaccaaccactaactatttgttttcatttttgtcttgtagaaggtttatatcttgttttaccttggctcattagtgtttaaaaatgtactgatgatgtgcttagagaaattcctggggctttcttcgttgtagatcagaatttcaccagggagtaaaattacctgaaaacgtaagaagttttaaacagcttttcacacaaattagatgcaactgttcccatgtctgagtacttatttaaaagaaaggtaaagattggcctgttagaaaaagcataatgtgagctttggattactggattttttttttttttaaacacacctggagaggacatttgaaaacactgttcttaccctcgaaccctgatgtggttccattatgtaaatatttcaaatattaaaaatgtatatatttgatcctggggactcatattctttcagaatcatgtaaataaatggcatcatgttgtaattgtgtggtgcatactagaaaagttaaaaatatgggctgaactttttatggacttgatttttatgactattggtatctaaaggtcaaggaagccatttacattattttggatgaatctactatacatctatggaaatgtctcttttattttaaattctggtttctcaacggaaaatttcagaaaagatgccccttgccattttcgttaatttttcagtcttttcttagacacacccccagcctaagaccttgttcgaggagtttattgtgtctgtcttttcttaacatactgcactgttcttaagcatcatattgtgttgtttttatttagccactattaacatgaaggtttattcaggtagatttgatttcctttgcttcgtttcttctcctgctctgtcaactgtacttatcttaaagggccactctaaaaacaagggagatgtcgtaatctgaaacctttggggagatgtactctgtactgcataacatctccagtgaggtttgtgacaggacctcaactaaatatatgaatttgtgcaagttcatatattaaagtttctgcagcagagtgaaaattgttacagtaaatgtggtagaaactgttaatcgcttaatgccagtttaaatcatgttttgtaaccaagcttcagtaaaaggctttagattgtca

SEQ ID NO: 317069 - DNA, 4304 bp, Homo sapiens
gcagtgcacgccgggcaagaggaagacctccatcagctcgccgcgcagcgcggctgtatttgcggcctgtgcgagtaggcgcttgggcactcagtctccctggcgagcgacgggcagaaatctcgaaccagtggagcgcactcgtaacctggatcccagaaggtcgcgaaggcagtaccgtttcctcagcggcggactgctgcagtaagaatgtcttttccacctcatttgaatcgccctcccatgggaatcccagcactcccaccagggatcccacccccgcagtttccaggatttcctccacctgtacctccagggaccccaatgattcctgtaccaatgagcattatggctcctgctccaactgtcttagtacccactgtgtctatggttggaaagcatttgggcgcaagaaaggatcatccaggcttaaaggctaaagaaaatgatgaaaattgtggtcctactaccactgtttttgttggcaacatttccgagaaagcttcagacatgcttataagacaactcttagctaaatgtggtttggttttgagctggaagagagtacaaggtgcttccggaaagcttcaagccttcggattctgtgagtacaaggagccagaatctaccctccgtgcactcagattattacatgacctgcaaattggagagaaaaagctactcgttaaagttgatgcaaagacaaaggcacagctggatgaatggaaagcaaagaagaaagcttctaatgggaatgcaaggccagaaactgtcactaatgacgatgaagaagccttggatgaagaaacaaagaggagagatcagatgattaaaggggctattgaagttttaattcgtgaatactccagtgagctaaatgccccctcacaggaatctgattctcaccccaggaagaagaagaaggaaaagaaggaggacattttccgcagatttccagtggccccactgatcccttatccactcatcactaaggaggatataaatgctatagaaatggaagaagacaaaagagacctgatatctcgagagatcagcaaattcagagacacacataagaaactggaagaagagaaaggcaaaaaggaaaaagaaagacaggaaattgagaaagaacggagagaaagagagagggagcgtgaaagggaacgagaaaggcgagaacgggaacgagaaagggaaagagaacgtgaacgagaaaaggagaaagaacgggagcgggaacgagaacgggatagggaccgtgaccggacaaaagagagagaccgagatcgggatcgagagagagatcgtgaccgggatagagaaaggagctcagatcgtaataaggatcgcagtcgatcaagagaaaaaagcagagatcgtgaaagggaacgagagcgggaaagagagagagagagagaacgagagcgagaacgagaacgggagcgagagagagagcgagagagggaacgggagcgagaaagagaaaaagacaaaaaacgggaccgagaagaagatgaagaagatgcatacgaacgaagaaaacttgaaagaaaactccgagagaaagaagctgcttatcaagagcgccttaagaattgggaaatcagagaacgaaagaaaacccgggaatatgagaaagaagctgaaagagaagaagaaagaagaagagaaatggccaaagaagctaaacgactaaaagaattcttagaagactatgatgatgatagagatgaccccaaatattacagaggaagtgctcttcagaaaaggttgcgtgatagagaaaaggaaatggaagcagatgaacgagataggaagagagagaaggaggagcttgaggaaatcaggcagcgccttctggcagaagggcatccagatccagatgcagagctccagaggatggaacaagaggctgagaggcgcaggcagccacaaataaagcaagagccagaatcagaagaggaggaagaagaaaagcaagaaaaagaagaaaaacgagaagaacccatggaagaggaagaggagccagagcaaaagccttgtctgaaacctactctgaggcccatcagctctgctccatctgtttcctctgccagtggcaatgcaacacctaacactcctggggatgagtctccctgtggtattattattcctcatgaaaactcaccagatcaacagcaacctgaggagcataggccaaaaataggactaagtcttaaactgggtgcttccaatagtcctggtcagcctaattctgtgaagagaaagaaactacctgtagatagtgtctttaacaaatttgaggatgaagacagtgatgacgtaccccgaaaaaggaaactggttcccttggattatggtgaagatgataaaaatgcaaccaaaggcactgtaaacactgaagaaaagcgtaaacacattaagagtctcattgagaaaatccctacagccaaacctgagctcttcgcttatcccctggattggtctattgtggattctatactgatggaacgtcgaattagaccatggattaataagaaaatcatagaatatataggtgaagaagaagctacattagttgattttgtttgttctaaggttatggctcatagttcaccccagagcattttagatgatgttgccatggtacttgatgaagaagcagaagtttttatagtcaaaatgtggagattattgatatatgaaacagaagccaagaaaattggtcttgtgaagtaaaactttttatatttagagttccatttcagatttcttctttgccacccttttaaggactttgaatttttctttgtctttgaagacattgtgagatctgtaattttttttttttgtagaaaatgtgaattttttggtcctctaatttgttgttgccctgtgtactcccttggttgtaaagtcatctgaatccttggttctctttatactcaccaggtacaaattactggtatgttttataagccgcagctactgtacacagcctatctgatataatcttgttctgctgatttgtttcttgtaaatattaaaacgactccccaattattttgcagaattgcacttaatattgaaatgtactgtataggaaccaacatgaacaattttaattgaaaacaccagtcataaactattaccacccccactctcttttgatcagaaatggcaagcccttgtgaaggcatggagtttaaaattggaatgcaaaaattagcagacaatccattcctactgtatttctgtatgaatgtgtttgtgaatgtatgtgtaaaagtctttcttttccctaatttgctttggtggggtccttaaaacatttcccaactaaagaatagaattgtaaaggaaaagtggtactgttccaacctgaaatgtctgttataattaggttattagtttcccagagcatggtgttctcgtgtcgtgagcaatgtggtttgctaactggatggggttttcttattaataagatggctgcttcagcttctcttttaaaggaatgtggatcatagtgatttttccttttaattttattgctcagaaatgaggcatatcctaaaaatcctggagagctgtatttaatgcatttttgcactaattggtccttagtttaattctattgtatctgtttatttaacaaaaaattcatcataccaaaaagtgtaagtgaaaaccccctttaaaacaaaacaaaaaaatgaaataaaattaggcaaattgacagacagtgagagttttacaaacatgataggtattctgctcggcaatttgtaagtttacatgttatttaaggataaaggtaaatcattcaaggcagttaccaaccactaactatttgttttcatttttgtcttgtagaaggtttatatcttgttttaccttggctcattagtgtttaaaaatgtactgatgatgtgcttagagaaattcctggggctttcttcgttgtagatcagaatttcaccagggagtaaaattacctgaaaacgtaagaagttttaaacagcttttcacacaaattagatgcaactgttcccatgtctgagtacttatttaaaagaaaggtaaagattggcctgttagaaaaagcataatgtgagctttggattactggattttttttttttttaaacacacctggagaggacatttgaaaacactgttcttaccctcgaaccctgatgtggttccattatgtaaatatttcaaatattaaaaatgtatatatttgatcctggggactcatattctttcagaatcatgtaaataaatggcatcatgttgta

SEQ ID NO: 317070 - DNA, 4469 bp, Homo sapiens
gcagtgcacgccgggcaagaggaagacctccatcagctcgccgcgcagcgcggctgtatttgcggcctgtgcgagtaggcgcttgggcactcagtctccctggcgagcgacgggcagaaatctcgaaccagtggagcgcactcgtaacctggatcccagaaggtcgcgaaggcagtaccgtttcctcagcggcggactgctgcagtaagaatgtcttttccacctcatttgaatcgccctcccatgggaatcccagcactcccaccagggatcccacccccgcagtttccaggatttcctccacctgtacctccagggaccccaatgattcctgtaccaatgagcattatggctcctgctccaactgtcttagtacccactgtgtctatggttggaaagcatttgggcgcaagaaaggatcatccaggcttaaaggctaaagaaaatgatgaaaattgtggtcctactaccactgtttttgttggcaacatttccgagaaagcttcagacatgcttataagacaactcttagctaaatgtggtttggttttgagctggaagagagtacaaggtgcttccggaaagcttcaagccttcggattctgtgagtacaaggagccagaatctaccctccgtgcactcagattattacatgacctgcaaattggagagaaaaagctactcgttaaagttgatgcaaagacaaaggcacagctggatgaatggaaagcaaagaagaaagcttctaatgggaatgcaaggccagaaactgtcactaatgacgatgaagaagccttggatgaagaaacaaagaggagagatcagatgattaaaggggctattgaagttttaattcgtgaatactccagtgagctaaatgccccctcacaggaatctgattctcaccccaggaagaagaagaaggaaaagaaggaggacattttccgcagatttccagtggccccactgatcccttatccactcatcactaaggaggatataaatgctatagaaatggaagaagacaaaagagacctgatatctcgagagatcagcaaattcagagacacacataagaaactggaagaagagaaaggcaaaaaggaaaaagaaagacaggaaattgagaaagaacggagagaaagagagagggagcgtgaaagggaacgagaaaggcgagaacgggaacgagaaagggaaagagaacgtgaacgagaaaaggagaaagaacgggagcgggaacgagaacgggatagggaccgtgaccggacaaaagagagagaccgagatcgggatcgagagagagatcgtgaccgggatagagaaaggagctcagatcgtaataaggatcgcagtcgatcaagagaaaaaagcagagatcgtgaaagggaacgagagcgggaaagagagagagagagagaacgagagcgagaacgagaacgggagcgagagagagagcgagagagggaacgggagcgagaaagagaaaaagacaaaaaacgggaccgagaagaagatgaagaagatgcatacgaacgaagaaaacttgaaagaaaactccgagagaaagaagctgcttatcaagagcgccttaagaattgggaaatcagagaacgaaagaaaacccgggaatatgagaaagaagctgaaagagaagaagaaagaagaagagaaatggccaaagaagctaaacgactaaaagaattcttagaagactatgatgatgatagagatgaccccaaatattacagaggaagtgctcttcagaaaaggttgcgtgatagagaaaaggaaatggaagcagatgaacgagataggaagagagagaaggaggagcttgaggaaatcaggcagcgccttctggcagaagggcatccagatccagatgcagagctccagaggatggaacaagaggctgagaggcgcaggcagccacaaataaagcaagagccagaatcagaagaggaggaagaagaaaagcaagaaaaagaagaaaaacgagaagaacccatggaagaggaagaggagccagagcaaaagccttgtctgaaacctactctgaggcccatcagctctgctccatctgtttcctctgccagtggcaatgcaacacctaacactcctggggatgagtctccctgtggtattattattcctcatgaaaactcaccagatcaacagcaacctgaggagcataggccaaaaataggactaagtcttaaactggttttactagtgctcctatatctgcagctgcctcgagttctgagaagaagtgaaaagtttaattttctagcacttgtgagtagtgagttattttttacagttgggatctttctctaagatttgtggaagtatattttgcattgcttttgagggatggtgggttatgaaatgaaacatttggaaattaagtcatcttgctaagagagtgtttttactgtaggtgcttccaatagtcctggtcagcctaattctgtgaagagaaagaaactacctgtagatagtgtctttaacaaatttgaggatgaagacagtgatgacgtaccccgaaaaaggaaactggttcccttggattatggtgaagatgataaaaatgcaaccaaaggcactgtaaacactgaagaaaagcgtaaacacattaagagtctcattgagaaaatccctacagccaaacctgagctcttcgcttatcccctggattggtctattgtggattctatactgatggaacgtcgaattagaccatggattaataagaaaatcatagaatatataggtgaagaagaagctacattagttgattttgtttgttctaaggttatggctcatagttcaccccagagcattttagatgatgttgccatggtacttgatgaagaagcagaagtttttatagtcaaaatgtggagattattgatatatgaaacagaagccaagaaaattggtcttgtgaagtaaaactttttatatttagagttccatttcagatttcttctttgccacccttttaaggactttgaatttttctttgtctttgaagacattgtgagatctgtaattttttttttttgtagaaaatgtgaattttttggtcctctaatttgttgttgccctgtgtactcccttggttgtaaagtcatctgaatccttggttctctttatactcaccaggtacaaattactggtatgttttataagccgcagctactgtacacagcctatctgatataatcttgttctgctgatttgtttcttgtaaatattaaaacgactccccaattattttgcagaattgcacttaatattgaaatgtactgtataggaaccaacatgaacaattttaattgaaaacaccagtcataaactattaccacccccactctcttttgatcagaaatggcaagcccttgtgaaggcatggagtttaaaattggaatgcaaaaattagcagacaatccattcctactgtatttctgtatgaatgtgtttgtgaatgtatgtgtaaaagtctttcttttccctaatttgctttggtggggtccttaaaacatttcccaactaaagaatagaattgtaaaggaaaagtggtactgttccaacctgaaatgtctgttataattaggttattagtttcccagagcatggtgttctcgtgtcgtgagcaatgtggtttgctaactggatggggttttcttattaataagatggctgcttcagcttctcttttaaaggaatgtggatcatagtgatttttccttttaattttattgctcagaaatgaggcatatcctaaaaatcctggagagctgtatttaatgcatttttgcactaattggtccttagtttaattctattgtatctgtttatttaacaaaaaattcatcataccaaaaagtgtaagtgaaaaccccctttaaaacaaaacaaaaaaatgaaataaaattaggcaaattgacagacagtgagagttttacaaacatgataggtattctgctcggcaatttgtaagtttacatgttatttaaggataaaggtaaatcattcaaggcagttaccaaccactaactatttgttttcatttttgtcttgtagaaggtttatatcttgttttaccttggctcattagtgtttaaaaatgtactgatgatgtgcttagagaaattcctggggctttcttcgttgtagatcagaatttcaccagggagtaaaattacctgaaaacgtaagaagttttaaacagcttttcacacaaattagatgcaactgttcccatgtctgagtacttatttaaaagaaaggtaaagattggcctgttagaaaaagcataatgtgagctttggattactggattttttttttttttaaacacacctggagaggacatttgaaaacactgttcttaccctcgaaccctgatgtggttccattatgtaaatatttcaaatattaaaaatgtatatatttga

SEQ ID NO: 317071 - DNA, 5053 bp, Homo sapiens
ctttgcatgttttggtatgagtttattaaataaccacagactgtcagggtatcagcgtggcagggggcgtccatttacagcacggatgagtctgaagagagaataaggtaagatttatgattttttaatctgtcctttcctcttcatgactttcttacataattttagactcacctcatttcccttctccagtctttctttaaaaatatacatgtatatgtttacatgtatacctgtatttgtatacatgtgtgtatatatatatatatatatatctcatatataaacttcaggaaacatttagtatggactagattcactcactttttcatttacttagaaccaaacttttgaaatgagttctgaaacaaatggttatttatataactgaatataaggagcacagtgaaataagcaagaattaaaaattgaggaattctacaggaaaaattagtattggaacatgtatgccattgaggtaagttttatatagtctagcctcattttacaatataaatttttatattcattggaactgtttcagaaatgagatttttccccctttaatagctgttagtttctgtcctctttctatcatatcttatttcatccctttgtaatttcaatgtattcagttttgactttgcccgtattctacttcgatatagactggcacagcaactgaatatattgctcatacattagctttcctttcataacctgctataagttctctgatccatgaggaagagaaaaagagtatctgacaggtaagattgctttttaaagttgttttaaatgcattacatgactgagaaaagaaaaatgcacattttattgttgcagtttaaaatttcattttggtgaaactaaacgtgaaacaaaagggataaatgtgttttgttttgttttgttttacctgtttggggtatttttttctgagtttgtgtagaaaccgtgtggtacactggtaatcttgtcagggtacaaacttggtctgactttgttatttggtttatttgtgaaccatgtacttgctcttcctcccagaaacatagcttgtaggcaaggttaatccagtgtggcgatccatgtcctagcacagcatctgtaagttaatgcacaatcgttccttccaaggatggatttatcattgtaaatatattttcattgtcttacaggcataatgggcataagtatgttgcttttaaatattttaaattaaactattacagttacatatattttgcttgaagtgagtgattttcaaactttttgtatttggtgggctgtccatcttgtaatggtgggagtaaatgtttccatagatgataaggcagttcttggctgaattcagcttgtgtttcttttggagggtgggcaaatcagagggcagagattatttagttgcattataggtattcttctataccacttgccctttgaaaccctcaacttgaggtaatgtgcagtctggggttttaattagtattaataatcttgtggatttacagaaatctataatgcacagagttgagttttaaccaatgatcgtattcatagaaaatatttcgaaccaccacattcttcatggtcattttagttagtacatagtcattgagtggccagccacacctgacacaatctcccagcatccaagattggagattcctggtctgtgtagagtatatggttttgcacgaaatctttctagtcttgtgattgcttcagtttaatttgtcacataaaaccacaagtatttaatattaatgtatcagtggtttggtgtttttgttcccagtactgggctttgcgccgggaaaaatctgaatactggagctacagagttaactctaaaagtgcttttattggtttctagaaaactggaagaagagaaaggcaaaaaggaaaaagaaagacaggaaattgagaaagaacggagagaaagagagagggagcgtgaaagggaacgagaaaggcgagaacgggaacgagaaagggaaagagaacgtgaacgagaaaaggagaaagaacgggagcgggaacgagaacgggatagggaccgtgaccggacaaaagagagagaccgagatcgggatcgagagagagatcgtgaccgggatagagaaaggagctcagatcgtaataaggatcgcagtcgatcaagagaaaaaagcagagatcgtgaaagggaacgagagcgggaaagagagagagagagagaacgagagcgagaacgagaacgggagcgagagagagagcgagagagggaacgggagcgagaaagagaaaaagacaaaaaacgggaccgagaagaagatgaagaagatgcatacgaacgaagaaaacttgaaagaaaactccgagagaaagaagctgcttatcaagagcgccttaagaattgggaaatcagagaacgaaagaaaacccgggaatatgagaaagaagctgaaagagaagaagaaagaagaagagaaatggccaaagaagctaaacgactaaaagaattcttagaagactatgatgatgatagagatgaccccaaatattacagaggaagtgctcttcagaaaaggttgcgtgatagagaaaaggaaatggaagcagatgaacgagataggaagagagagaaggaggagcttgaggaaatcaggcagcgccttctggcagaagggcatccagatccagatgcagagctccagaggatggaacaagaggctgagaggcgcaggcagccacaaataaagcaagagccagaatcagaagaggaggaagaagaaaagcaagaaaaagaagaaaaacgagaagaacccatggaagaggaagaggagccagagcaaaagccttgtctgaaacctactctgaggcccatcagctctgctccatctgtttcctctgccagtggcaatgcaacacctaacactcctggggatgagtctccctgtggtattattattcctcatgaaaactcaccagatcaacagcaacctgaggagcataggccaaaaataggactaagtcttaaactgggtgcttccaatagtcctggtcagcctaattctgtgaagagaaagaaactacctgtagatagtgtctttaacaaatttgaggatgaagacagtgatgacgtaccccgaaaaaggaaactggttcccttggattatggtgaagatgataaaaatgcaaccaaaggcactgtaaacactgaagaaaagcgtaaacacattaagagtctcattgagaaaatccctacagccaaacctgagctcttcgcttatcccctggattggtctattgtggattctatactgatggaacgtcgaattagaccatggattaataagaaaatcatagaatatataggtgaagaagaagctacattagttgattttgtttgttctaaggttatggctcatagttcaccccagagcattttagatgatgttgccatggtacttgatgaagaagcagaagtttttatagtcaaaatgtggagattattgatatatgaaacagaagccaagaaaattggtcttgtgaagtaaaactttttatatttagagttccatttcagatttcttctttgccacccttttaaggactttgaatttttctttgtctttgaagacattgtgagatctgtaattttttttttttgtagaaaatgtgaattttttggtcctctaatttgttgttgccctgtgtactcccttggttgtaaagtcatctgaatccttggttctctttatactcaccaggtacaaattactggtatgttttataagccgcagctactgtacacagcctatctgatataatcttgttctgctgatttgtttcttgtaaatattaaaacgactccccaattattttgcagaattgcacttaatattgaaatgtactgtataggaaccaacatgaacaattttaattgaaaacaccagtcataaactattaccacccccactctcttttgatcagaaatggcaagcccttgtgaaggcatggagtttaaaattggaatgcaaaaattagcagacaatccattcctactgtatttctgtatgaatgtgtttgtgaatgtatgtgtaaaagtctttcttttccctaatttgctttggtggggtccttaaaacatttcccaactaaagaatagaattgtaaaggaaaagtggtactgttccaacctgaaatgtctgttataattaggttattagtttcccagagcatggtgttctcgtgtcgtgagcaatgtggtttgctaactggatggggttttcttattaataagatggctgcttcagcttctcttttaaaggaatgtggatcatagtgatttttccttttaattttattgctcagaaatgaggcatatcctaaaaatcctggagagctgtatttaatgcatttttgcactaattggtccttagtttaattctattgtatctgtttatttaacaaaaaattcatcataccaaaaagtgtaagtgaaaaccccctttaaaacaaaacaaaaaaatgaaataaaattaggcaaattgacagacagtgagagttttacaaacatgataggtattctgctcggcaatttgtaagtttacatgttatttaaggataaaggtaaatcattcaaggcagttaccaaccactaactatttgttttcatttttgtcttgtagaaggtttatatcttgttttaccttggctcattagtgtttaaaaatgtactgatgatgtgcttagagaaattcctggggctttcttcgttgtagatcagaatttcaccagggagtaaaattacctgaaaacgtaagaagttttaaacagcttttcacacaaattagatgcaactgttcccatgtctgagtacttatttaaaagaaaggtaaagattggcctgttagaaaaagcataatgtgagctttggattactggattttttttttttttaaacacacctggagaggacatttgaaaacactgttcttaccctcgaaccctgatgtggttccattatgtaaatatttcaaatattaaaaatgtatatatttga

SEQ ID NO: 317072 - DNA, 4103 bp, Homo sapiens
actttgattccttgttagggttgtaagtgtatggtttctataagtggtatgtattcctgcattataagcactcgtagaaagcaaataggaaataagccatcattacagcccctaaactcccgattcttgcagtttggtatatttagcaatctgatgtttttgtttgtttgtttaatctacatacaattttgctttttctgagtggtagctatcacaattaacttaaaattgtattttgcctttactacgtaactgaattttcaactgtttaaaagagtcgttactatttgtgtacctattgagcaaaacagtctgaaaacttgtgaatggtttgcagatgtgtcgtatagtgtgctagtcctgaaatttagggaccagaattttttagctattaagaaaaagaaaatgaaaatgaagtagtatctcaggaatagttaaataaaaaaatgaagcttttctgatgttaagaacaaaaccaattctgtgtttaataggactacagagatgtttttgagaaaacatgtatgtttattaactcttgttgtagagtgattttgattttcttgcttgatttttctttcccctgaatttgctgttttgtttaagaatgcaaggccagaaactgtcactaatgacgatgaagaagccttggatgaagaaacaaagaggagagatcagatgattaaaggggctattgaagttttaattcgtgaatactccagtgagctaaatgccccctcacaggaatctgattctcaccccaggaagaagaagaaggaaaagaaggaggacattttccgcagatttccagtggccccactgatcccttatccactcatcactaaggaggatataaatgctatagaaatggaagaagacaaaagagacctgatatctcgagagatcagcaaattcagagacacacataagaaactggaagaagagaaaggcaaaaaggaaaaagaaagacaggaaattgagaaagaacggagagaaagagagagggagcgtgaaagggaacgagaaaggcgagaacgggaacgagaaagggaaagagaacgtgaacgagaaaaggagaaagaacgggagcgggaacgagaacgggatagggaccgtgaccggacaaaagagagagaccgagatcgggatcgagagagagatcgtgaccgggatagagaaaggagctcagatcgtaataaggatcgcagtcgatcaagagaaaaaagcagagatcgtgaaagggaacgagagcgggaaagagagagagagagagaacgagagcgagaacgagaacgggagcgagagagagagcgagagagggaacgggagcgagaaagagaaaaagacaaaaaacgggaccgagaagaagatgaagaagatgcatacgaacgaagaaaacttgaaagaaaactccgagagaaagaagctgcttatcaagagcgccttaagaattgggaaatcagagaacgaaagaaaacccgggaatatgagaaagaagctgaaagagaagaagaaagaagaagagaaatggccaaagaagctaaacgactaaaagaattcttagaagactatgatgatgatagagatgaccccaaatattacagaggaagtgctcttcagaaaaggttgcgtgatagagaaaaggaaatggaagcagatgaacgagataggaagagagagaaggaggagcttgaggaaatcaggcagcgccttctggcagaagggcatccagatccagatgcagagctccagaggatggaacaagaggctgagaggcgcaggcagccacaaataaagcaagagccagaatcagaagaggaggaagaagaaaagcaagaaaaagaagaaaaacgagaagaacccatggaagaggaagaggagccagagcaaaagccttgtctgaaacctactctgaggcccatcagctctgctccatctgtttcctctgccagtggcaatgcaacacctaacactcctggggatgagtctccctgtggtattattattcctcatgaaaactcaccagatcaacagcaacctgaggagcataggccaaaaataggactaagtcttaaactgggtgcttccaatagtcctggtcagcctaattctgtgaagagaaagaaactacctgtagatagtgtctttaacaaatttgaggatgaagacagtgatgacgtaccccgaaaaaggaaactggttcccttggattatggtgaagatgataaaaatgcaaccaaaggcactgtaaacactgaagaaaagcgtaaacacattaagagtctcattgagaaaatccctacagccaaacctgagctcttcgcttatcccctggattggtctattgtggattctatactgatggaacgtcgaattagaccatggattaataagaaaatcatagaatatataggtgaagaagaagctacattagttgattttgtttgttctaaggttatggctcatagttcaccccagagcattttagatgatgttgccatggtacttgatgaagaagcagaagtttttatagtcaaaatgtggagattattgatatatgaaacagaagccaagaaaattggtcttgtgaagtaaaactttttatatttagagttccatttcagatttcttctttgccacccttttaaggactttgaatttttctttgtctttgaagacattgtgagatctgtaattttttttttttgtagaaaatgtgaattttttggtcctctaatttgttgttgccctgtgtactcccttggttgtaaagtcatctgaatccttggttctctttatactcaccaggtacaaattactggtatgttttataagccgcagctactgtacacagcctatctgatataatcttgttctgctgatttgtttcttgtaaatattaaaacgactccccaattattttgcagaattgcacttaatattgaaatgtactgtataggaaccaacatgaacaattttaattgaaaacaccagtcataaactattaccacccccactctcttttgatcagaaatggcaagcccttgtgaaggcatggagtttaaaattggaatgcaaaaattagcagacaatccattcctactgtatttctgtatgaatgtgtttgtgaatgtatgtgtaaaagtctttcttttccctaatttgctttggtggggtccttaaaacatttcccaactaaagaatagaattgtaaaggaaaagtggtactgttccaacctgaaatgtctgttataattaggttattagtttcccagagcatggtgttctcgtgtcgtgagcaatgtggtttgctaactggatggggttttcttattaataagatggctgcttcagcttctcttttaaaggaatgtggatcatagtgatttttccttttaattttattgctcagaaatgaggcatatcctaaaaatcctggagagctgtatttaatgcatttttgcactaattggtccttagtttaattctattgtatctgtttatttaacaaaaaattcatcataccaaaaagtgtaagtgaaaaccccctttaaaacaaaacaaaaaaatgaaataaaattaggcaaattgacagacagtgagagttttacaaacatgataggtattctgctcggcaatttgtaagtttacatgttatttaaggataaaggtaaatcattcaaggcagttaccaaccactaactatttgttttcatttttgtcttgtagaaggtttatatcttgttttaccttggctcattagtgtttaaaaatgtactgatgatgtgcttagagaaattcctggggctttcttcgttgtagatcagaatttcaccagggagtaaaattacctgaaaacgtaagaagttttaaacagcttttcacacaaattagatgcaactgttcccatgtctgagtacttatttaaaagaaaggtaaagattggcctgttagaaaaagcataatgtgagctttggattactggattttttttttttttaaacacacctggagaggacatttgaaaacactgttcttaccctcgaaccctgatgtggttccattatgtaaatatttcaaatattaaaaatgtatatatttga

SEQ ID NO: 317073 - DNA, 3301 bp, Homo sapiens
aacgggagcgagaaagagaaaaagacaaaaaacgggaccgagaagaagatgaagaagatgcatacgaacgaagaaaacttgaaagaaaactccgagagaaagaagctgcttatcaagagcgccttaagaaactggaagaagagaaaggcaaaaaggaaaaagaaagacaggaaattgagaaagaacggagagaaagagagagggagcgtgaaagggaacgagaaaggcgagaacgggaacgagaaagggaaagagaacgtgaacgagaaaaggagaaagaacgggagcgggaacgagaacgggatagggaccgtgaccggacaaaagagagagaccgagatcgggatcgagagagagatcgtgaccgggatagagaaaggagctcagatcgtaataaggatcgcagtcgatcaagagaaaaaagcagagatcgtgaaagggaacgagagcgggaaagagagagagagagagaacgagagcgagaacgagaacgggagcgagagagagagcgagagagggaacgggagcgagaaagagaaaaagacaaaaaacgggaccgagaagaagatgaagaagatgcatacgaacgaagaaaacttgaaagaaaactccgagagaaagaagctgcttatcaagagcgccttaagaattgggaaatcagagaacgaaagaaaacccgggaatatgagaaagaagctgaaagagaagaagaaagaagaagagaaatggccaaagaagctaaacgactaaaagaattcttagaagactatgatgatgatagagatgaccccaaatattacagaggaagtgctcttcagaaaaggttgcgtgatagagaaaaggaaatggaagcagatgaacgagataggaagagagagaaggaggagcttgaggaaatcaggcagcgccttctggcagaagggcatccagatccagatgcagagctccagaggatggaacaagaggctgagaggcgcaggcagccacaaataaagcaagagccagaatcagaagaggaggaagaagaaaagcaagaaaaagaagaaaaacgagaagaacccatggaagaggaagaggagccagagcaaaagccttgtctgaaacctactctgaggcccatcagctctgctccatctgtttcctctgccagtggcaatgcaacacctaacactcctggggatgagtctccctgtggtattattattcctcatgaaaactcaccagatcaacagcaacctgaggagcataggccaaaaataggactaagtcttaaactgggtgcttccaatagtcctggtcagcctaattctgtgaagagaaagaaactacctgtagatagtgtctttaacaaatttgaggatgaagacagtgatgacgtaccccgaaaaaggaaactggttcccttggattatggtgaagatgataaaaatgcaaccaaaggcactgtaaacactgaagaaaagcgtaaacacattaagagtctcattgagaaaatccctacagccaaacctgagctcttcgcttatcccctggattggtctattgtggattctatactgatggaacgtcgaattagaccatggattaataagaaaatcatagaatatataggtgaagaagaagctacattagttgattttgtttgttctaaggttatggctcatagttcaccccagagcattttagatgatgttgccatggtacttgatgaagaagcagaagtttttatagtcaaaatgtggagattattgatatatgaaacagaagccaagaaaattggtcttgtgaagtaaaactttttatatttagagttccatttcagatttcttctttgccacccttttaaggactttgaatttttctttgtctttgaagacattgtgagatctgtaattttttttttttgtagaaaatgtgaattttttggtcctctaatttgttgttgccctgtgtactcccttggttgtaaagtcatctgaatccttggttctctttatactcaccaggtacaaattactggtatgttttataagccgcagctactgtacacagcctatctgatataatcttgttctgctgatttgtttcttgtaaatattaaaacgactccccaattattttgcagaattgcacttaatattgaaatgtactgtataggaaccaacatgaacaattttaattgaaaacaccagtcataaactattaccacccccactctcttttgatcagaaatggcaagcccttgtgaaggcatggagtttaaaattggaatgcaaaaattagcagacaatccattcctactgtatttctgtatgaatgtgtttgtgaatgtatgtgtaaaagtctttcttttccctaatttgctttggtggggtccttaaaacatttcccaactaaagaatagaattgtaaaggaaaagtggtactgttccaacctgaaatgtctgttataattaggttattagtttcccagagcatggtgttctcgtgtcgtgagcaatgtggtttgctaactggatggggttttcttattaataagatggctgcttcagcttctcttttaaaggaatgtggatcatagtgatttttccttttaattttattgctcagaaatgaggcatatcctaaaaatcctggagagctgtatttaatgcatttttgcactaattggtccttagtttaattctattgtatctgtttatttaacaaaaaattcatcataccaaaaagtgtaagtgaaaaccccctttaaaacaaaacaaaaaaatgaaataaaattaggcaaattgacagacagtgagagttttacaaacatgataggtattctgctcggcaatttgtaagtttacatgttatttaaggataaaggtaaatcattcaaggcagttaccaaccactaactatttgttttcatttttgtcttgtagaaggtttatatcttgttttaccttggctcattagtgtttaaaaatgtactgatgatgtgcttagagaaattcctggggctttcttcgttgtagatcagaatttcaccagggagtaaaattacctgaaaacgtaagaagttttaaacagcttttcacacaaattagatgcaactgttcccatgtctgagtacttatttaaaagaaaggtaaagattggcctgttagaaaaagcataatgtgagctttggattactggattttttttttttttaaacacacctggagaggacatttgaaaacactgttcttaccctcgaaccctgatgtggttccattatgtaaatatttcaaatattaaaaatgtatatatttga

SEQ ID NO: 317074 - DNA, 3032 bp, Homo sapiens
ccaacatgaacaattttaattgaaaacaccagtcataaactattaccacccccactcatcactaaggaggatataaatgctatagaaatggaagaagacaaaagagacctgatatctcgagagatcagcaaattcagagacacacataagaaactggaagaagagaaaggcaaaaaggaaaaagaaagacaggaaattgagaaagaacggagagaaagagagagggagcgtgaaagggaacgagagagggaacgggagcgagaaagagaaaaagacaaaaaacgggaccgagaagaagatgaagaagatgcatacgaacgaagaaaacttgaaagaaaactccgagagaaagaagctgcttatcaagagcgccttaagaattgggaaatcagagaacgaaagaaaacccgggaatatgagaaagaagctgaaagagaagaagaaagaagaagagaaatggccaaagaagctaaacgactaaaagaattcttagaagactatgatgatgatagagatgaccccaaatattacagaggaagtgctcttcagaaaaggttgcgtgatagagaaaaggaaatggaagcagatgaacgagataggaagagagagaaggaggagcttgaggaaatcaggcagcgccttctggcagaagggcatccagatccagatgcagagctccagaggatggaacaagaggctgagaggcgcaggcagccacaaataaagcaagagccagaatcagaagaggaggaagaagaaaagcaagaaaaagaagaaaaacgagaagaacccatggaagaggaagaggagccagagcaaaagccttgtctgaaacctactctgaggcccatcagctctgctccatctgtttcctctgccagtggcaatgcaacacctaacactcctggggatgagtctccctgtggtattattattcctcatgaaaactcaccagatcaacagcaacctgaggagcataggccaaaaataggactaagtcttaaactgggtgcttccaatagtcctggtcagcctaattctgtgaagagaaagaaactacctgtagatagtgtctttaacaaatttgaggatgaagacagtgatgacgtaccccgaaaaaggaaactggttcccttggattatggtgaagatgataaaaatgcaaccaaaggcactgtaaacactgaagaaaagcgtaaacacattaagagtctcattgagaaaatccctacagccaaacctgagctcttcgcttatcccctggattggtctattgtggattctatactgatggaacgtcgaattagaccatggattaataagaaaatcatagaatatataggtgaagaagaagctacattagttgattttgtttgttctaaggttatggctcatagttcaccccagagcattttagatgatgttgccatggtacttgatgaagaagcagaagtttttatagtcaaaatgtggagattattgatatatgaaacagaagccaagaaaattggtcttgtgaagtaaaactttttatatttagagttccatttcagatttcttctttgccacccttttaaggactttgaatttttctttgtctttgaagacattgtgagatctgtaattttttttttttgtagaaaatgtgaattttttggtcctctaatttgttgttgccctgtgtactcccttggttgtaaagtcatctgaatccttggttctctttatactcaccaggtacaaattactggtatgttttataagccgcagctactgtacacagcctatctgatataatcttgttctgctgatttgtttcttgtaaatattaaaacgactccccaattattttgcagaattgcacttaatattgaaatgtactgtataggaaccaacatgaacaattttaattgaaaacaccagtcataaactattaccacccccactctcttttgatcagaaatggcaagcccttgtgaaggcatggagtttaaaattggaatgcaaaaattagcagacaatccattcctactgtatttctgtatgaatgtgtttgtgaatgtatgtgtaaaagtctttcttttccctaatttgctttggtggggtccttaaaacatttcccaactaaagaatagaattgtaaaggaaaagtggtactgttccaacctgaaatgtctgttataattaggttattagtttcccagagcatggtgttctcgtgtcgtgagcaatgtggtttgctaactggatggggttttcttattaataagatggctgcttcagcttctcttttaaaggaatgtggatcatagtgatttttccttttaattttattgctcagaaatgaggcatatcctaaaaatcctggagagctgtatttaatgcatttttgcactaattggtccttagtttaattctattgtatctgtttatttaacaaaaaattcatcataccaaaaagtgtaagtgaaaaccccctttaaaacaaaacaaaaaaatgaaataaaattaggcaaattgacagacagtgagagttttacaaacatgataggtattctgctcggcaatttgtaagtttacatgttatttaaggataaaggtaaatcattcaaggcagttaccaaccactaactatttgttttcatttttgtcttgtagaaggtttatatcttgttttaccttggctcattagtgtttaaaaatgtactgatgatgtgcttagagaaattcctggggctttcttcgttgtagatcagaatttcaccagggagtaaaattacctgaaaacgtaagaagttttaaacagcttttcacacaaattagatgcaactgttcccatgtctgagtacttatttaaaagaaaggtaaagattggcctgttagaaaaagcataatgtgagctttggattactggattttttttttttttaaacacacctggagaggacatttgaaaacactgttcttaccctcgaaccctgatgtggttccattatgtaaatatttcaaatattaaaaatgtatatatttga

SEQ ID NO: 317075 - DNA, 2730 bp, Homo sapiens
atgtttgtcttaaaattatgtgaagagaaattcctataagtctccctcttactcttggtttatgtctgggtcagaaaaatctgtttacacaaaaaagggaagagtaatctttattacttgtatgttaattttatacattgtccttatttcctcaaaggccaaagaagctaaacgactaaaagaattcttagaagactatgatgatgatagagatgaccccaaatattacagaggaagtgctcttcagaaaaggttgcgtgatagagaaaaggaaatggaagcagatgaacgagataggaagagagagaaggaggagcttgaggaaatcaggcagcgccttctggcagaagggcatccagatccagatgcagagctccagaggatggaacaagaggctgagaggcgcaggcagccacaaataaagcaagagccagaatcagaagaggaggaagaagaaaagcaagaaaaagaagaaaaacgagaagaacccatggaagaggaagaggagccagagcaaaagccttgtctgaaacctactctgaggcccatcagctctgctccatctgtttcctctgccagtggcaatgcaacacctaacactcctggggatgagtctccctgtggtattattattcctcatgaaaactcaccagatcaacagcaacctgaggagcataggccaaaaataggactaagtcttaaactgggtgcttccaatagtcctggtcagcctaattctgtgaagagaaagaaactacctgtagatagtgtctttaacaaatttgaggatgaagacagtgatgacgtaccccgaaaaaggaaactggttcccttggattatggtgaagatgataaaaatgcaaccaaaggcactgtaaacactgaagaaaagcgtaaacacattaagagtctcattgagaaaatccctacagccaaacctgagctcttcgcttatcccctggattggtctattgtggattctatactgatggaacgtcgaattagaccatggattaataagaaaatcatagaatatataggtgaagaagaagctacattagttgattttgtttgttctaaggttatggctcatagttcaccccagagcattttagatgatgttgccatggtacttgatgaagaagcagaagtttttatagtcaaaatgtggagattattgatatatgaaacagaagccaagaaaattggtcttgtgaagtaaaactttttatatttagagttccatttcagatttcttctttgccacccttttaaggactttgaatttttctttgtctttgaagacattgtgagatctgtaattttttttttttgtagaaaatgtgaattttttggtcctctaatttgttgttgccctgtgtactcccttggttgtaaagtcatctgaatccttggttctctttatactcaccaggtacaaattactggtatgttttataagccgcagctactgtacacagcctatctgatataatcttgttctgctgatttgtttcttgtaaatattaaaacgactccccaattattttgcagaattgcacttaatattgaaatgtactgtataggaaccaacatgaacaattttaattgaaaacaccagtcataaactattaccacccccactctcttttgatcagaaatggcaagcccttgtgaaggcatggagtttaaaattggaatgcaaaaattagcagacaatccattcctactgtatttctgtatgaatgtgtttgtgaatgtatgtgtaaaagtctttcttttccctaatttgctttggtggggtccttaaaacatttcccaactaaagaatagaattgtaaaggaaaagtggtactgttccaacctgaaatgtctgttataattaggttattagtttcccagagcatggtgttctcgtgtcgtgagcaatgtggtttgctaactggatggggttttcttattaataagatggctgcttcagcttctcttttaaaggaatgtggatcatagtgatttttccttttaattttattgctcagaaatgaggcatatcctaaaaatcctggagagctgtatttaatgcatttttgcactaattggtccttagtttaattctattgtatctgtttatttaacaaaaaattcatcataccaaaaagtgtaagtgaaaaccccctttaaaacaaaacaaaaaaatgaaataaaattaggcaaattgacagacagtgagagttttacaaacatgataggtattctgctcggcaatttgtaagtttacatgttatttaaggataaaggtaaatcattcaaggcagttaccaaccactaactatttgttttcatttttgtcttgtagaaggtttatatcttgttttaccttggctcattagtgtttaaaaatgtactgatgatgtgcttagagaaattcctggggctttcttcgttgtagatcagaatttcaccagggagtaaaattacctgaaaacgtaagaagttttaaacagcttttcacacaaattagatgcaactgttcccatgtctgagtacttatttaaaagaaaggtaaagattggcctgttagaaaaagcataatgtgagctttggattactggattttttttttttttaaacacacctggagaggacatttgaaaacactgttcttaccctcgaaccctgatgtggttccattatgtaaatatttcaaatattaaaaatgtatatatttga

SEQ ID NO: 317076 - DNA, 1766 bp, Homo sapiens
gcagtgcacgccgggcaagaggaagacctccatcagctcgccgcgcagcgcggctgtatttgcggcctgtgcgagtaggcgcttgggcactcagtctccctggcgagcgacgggcagaaatctcgaaccagtggagcgcactcgtaacctggatcccagaaggtcgcgaaggcagtaccgtttcctcagcggcggactgctgcagtaagaatgtcttttccacctcatttgaatcgccctcccatgggaatcccagcactcccaccagggatcccacccccgcagtttccaggatttcctccacctgtacctccagggaccccaatgattcctgtaccaatgagcattatggctcctgctccaactgtcttagtacccactgtgtctatggttggaaagcatttgggcgcaagaaaggatcatccaggcttaaaggctaaagaaaatgatgaaaattgtggtcctactaccactgtttttgttggcaacatttccgagaaagcttcagacatgcttataagacaactcttagctaaatgtggtttggttttgagctggaagagagtacaaggtgcttccggaaagcttcaagccttcggattctgtgagtacaaggagccagaatctaccctccgtgcactcagattattacatgacctgcaaattggagagaaaaagctactcgttaaagttgatgcaaagacaaaggcacagctggatgaatggaaagcaaagaagaaagcttctaatgggaatgcaaggccagaaactgtcactaatgacgatgaagaagccttggatgaagaaacaaagaggagagatcagatgattaaaggggctattgaagttttaattcgtgaatactccagtgagctaaatgccccctcacaggaatctgattctcaccccaggaagaagaagaaggaaaagaaggaggacattttccgcagatttccagtggccccactgatcccttatccactcatcactaaggaggatataaatgctatagaaatggaagaagacaaaagagacctgatatctcgagagatcagcaaattcagagacacacataagaaactggaagaagagaaaggcaaaaaggaaaaagaaagacaggaaattgagaaagaacggagagaaagagagagggagcgtgaaagggaacgagaaaggcgagaacgggaacgagaaagggaaagagaacgtgaacgagaaaaggagaaagaacgggagcgggaacgagaacgggatagggaccgtgaccggacaaaagagagagaccgagatcgggatcgagagagagatcgtgaccgggatagagaaaggagctcagatcgtaataaggatcgcagtcgatcaagagaaaaaagcagagatcgtgaaagggaacgagagcgggaaagagagagagagagagaacgagagcgagaacgagaacgggagcgagagagagagcgagagagggaacgggagcgagaaagagaaaaagacaaaaaacgggaccgagaagaagatgaagaagatgcatacgaacgaagaaaacttgaaagaaaactccgagagaaagaagctgcttatcaagagcgccttaagaattgggaaatcagagaacgaaagaaaacccgggaatatgagaaagaagctgaaagagaagaagaaagaagaagagaaatggccaaagaagctaaacgactaaaagaattcttagaagactatgatgatgatagacatattcccctcctttgaaacctagcattaaatgg

SEQ ID NO: 317077 - DNA, 2331 bp, Homo sapiens
atttccttccttctttattttcttcccttcacccctgcaaatacctgtattgtgctttaaagaaaaaaatttatatttgtgcttggttaggtagatagaagattactaaaaaatgcctttctagctcacgattgttttcatagttttactagtgctcctatatctgcagctgcctcgagttctgagaagaagtgaaaagtttaattttctagcacttgtgagtagtgagttattttttacagttgggatctttctctaagatttgtggaagtatattttgcattgcttttgagggatggtgggttatggtgcttccaatagtcctggtcagcctaattctgtgaagagaaagaaactacctgtagatagtgtctttaacaaatttgaggatgaagacagtgatgacgtaccccgaaaaaggaaactggttcccttggattatggtgaagatgataaaaatgcaaccaaaggcactgtaaacactgaagaaaagcgtaaacacattaagagtctcattgagaaaatccctacagccaaacctgagctcttcgcttatcccctggattggtctattgtggattctatactgatggaacgtcgaattagaccatggattaataagaaaatcatagaatatataggtgaagaagaagctacattagttgattttgtttgttctaaggttatggctcatagttcaccccagagcattttagatgatgttgccatggtacttgatgaagaagcagaagtttttatagtcaaaatgtggagattattgatatatgaaacagaagccaagaaaattggtcttgtgaagtaaaactttttatatttagagttccatttcagatttcttctttgccacccttttaaggactttgaatttttctttgtctttgaagacattgtgagatctgtaattttttttttttgtagaaaatgtgaattttttggtcctctaatttgttgttgccctgtgtactcccttggttgtaaagtcatctgaatccttggttctctttatactcaccaggtacaaattactggtatgttttataagccgcagctactgtacacagcctatctgatataatcttgttctgctgatttgtttcttgtaaatattaaaacgactccccaattattttgcagaattgcacttaatattgaaatgtactgtataggaaccaacatgaacaattttaattgaaaacaccagtcataaactattaccacccccactctcttttgatcagaaatggcaagcccttgtgaaggcatggagtttaaaattggaatgcaaaaattagcagacaatccattcctactgtatttctgtatgaatgtgtttgtgaatgtatgtgtaaaagtctttcttttccctaatttgctttggtggggtccttaaaacatttcccaactaaagaatagaattgtaaaggaaaagtggtactgttccaacctgaaatgtctgttataattaggttattagtttcccagagcatggtgttctcgtgtcgtgagcaatgtggtttgctaactggatggggttttcttattaataagatggctgcttcagcttctcttttaaaggaatgtggatcatagtgatttttccttttaattttattgctcagaaatgaggcatatcctaaaaatcctggagagctgtatttaatgcatttttgcactaattggtccttagtttaattctattgtatctgtttatttaacaaaaaattcatcataccaaaaagtgtaagtgaaaaccccctttaaaacaaaacaaaaaaatgaaataaaattaggcaaattgacagacagtgagagttttacaaacatgataggtattctgctcggcaatttgtaagtttacatgttatttaaggataaaggtaaatcattcaaggcagttaccaaccactaactatttgttttcatttttgtcttgtagaaggtttatatcttgttttaccttggctcattagtgtttaaaaatgtactgatgatgtgcttagagaaattcctggggctttcttcgttgtagatcagaatttcaccagggagtaaaattacctgaaaacgtaagaagttttaaacagcttttcacacaaattagatgcaactgttcccatgtctgagtacttatttaaaagaaaggtaaagattggcctgttagaaaaagcataatgtgagctttggattactggattttttttttttttaaacacacctggagaggacatttgaaaacactgttcttaccctcgaaccctgatgtggttccattatgtaaatatttcaaatattaaaaatgtatatatttga

SEQ ID NO: 317078 - DNA, 1500 bp, Homo sapiens
gcagtgcacgccgggcaagaggaagacctccatcagctcgccgcgcagcgcggctgtatttgcggcctgtgcgagtaggcgcttgggcactcagtctccctggcgagcgacgggcagaaatctcgaaccagtggagcgcactcgtaacctggatcccagaaggtcgcgaaggcagtaccgtttcctcagcggcggactgctgcagtaagaatgtcttttccacctcatttgaatcgccctcccatgggaatcccagcactcccaccagggatcccacccccgcagtttccaggatttcctccacctgtacctccagggaccccaatgattcctgtaccaatgagcattatggctcctgctccaactgtcttagtacccactgtgtctatggttggaaagcatttgggcgcaagaaaggatcatccaggcttaaaggctaaagaaaatgatgaaaattgtggtcctactaccactgtttttgttggcaacatttccgagaaagcttcagacatgcttataagacaactcttagctaaatgtggtttggttttgagctggaagagagtacaaggtgcttccggaaagcttcaagccttcggattctgtgagtacaaggagccagaatctaccctccgtgcactcagattattacatgacctgcaaattggagagaaaaagctactcgttaaagttgatgcaaagacaaaggcacagctggatgaatggaaagcaaagaagaaagcttctaatgggaatgcaaggccagaaactgtcactaatgacgatgaagaagccttggatgaagaaacaaagaggagagatcagatgattaaaggggctattgaagttttaattcgtgaatactccagtgagctaaatgccccctcacaggaatctgattctcaccccaggaagaagaagaaggaaaagaaggaggacattttccgcagatttccagtggccccactgatcccttatccactcatcactaaggaggatataaatgctatagaaatggaagaagacaaaagagacctgatatctcgagagatcagcaaattcagagacacacataagaaactggaagaagagaaaggcaaaaaggaaaaagaaagacaggaaattgagaaagaacggagagaaagagagagggagcgtgaaagggaacgagaaaggcgagaacgggaacgagaaagggaaagagaacgtgaacgagaaaaggagaaagaacgggagcgggaacgagaacgggatagggaccgtgaccggacaaaagagagagaccgagatcgggatcgagagagagatcgtgaccgggatagagaaaggaggacattttccgcagatttccagtggccccactgatcccttatccactcatcactaaggaggatataaatgctatagaaatggaagaagacaaaagagacctgatatctcgagagatcagcaaattcagagacacacataagaaactggaagaagagaaaggcaaaaagg

SEQ ID NO: 317079 - DNA, 1961 bp, Homo sapiens
gcagtgcacgccgggcaagaggaagacctccatcagctcgccgcgcagcgcggctgtatttgcggcctgtgcgagtaggcgcttgggcactcagtctccctggcgagcgacgggcagaaatctcgaaccagtggagcgcactcgtaacctggatcccagaaggtcgcgaaggcagtaccgtttcctcagcggcggactgctgcagtaagaatgtcttttccacctcatttgaatcgccctcccatgggaatcccagcactcccaccagggatcccacccccgcagtttccaggatttcctccacctgtacctccagggaccccaatgattcctgtaccaatgagcattatggctcctgctccaactgtcttagtacccactgtgtctatggttggaaagcatttgggcgcaagaaaggatcatccaggcttaaaggctaaagaaaatgatgaaaattgtggtcctactaccactgtttttgttggcaacatttccgagaaagcttcagacatgcttataagacaactcttagctaaatgtggtttggttttgagctggaagagagtacaaggtgcttccggaaagcttcaagccttcggattctgtgagtacaaggagccagaatctaccctccgtgcactcagattattacatgacctgcaaattggagagaaaaagctactcgttaaagttgatgcaaagacaaaggcacagctggatgaatggaaagcaaagaagaaagcttctaatgggaatgcaaggccagaaactgtcactaatgacgatgaagaagccttggatgaagaaacaaagaggagagatcagatgattaaaggggctattgaagttttaattcgtgaatactccagtgagctaaatgccccctcacaggaatctgattctcaccccaggaagaagaagaaggaaaagaaggaggacattttccgcagatttccagtggccccactgatcccttatccactcatcactaaggaggatataaatgctatagaaatggaagaagacaaaagagacctgatatctcgagagatcagcaaattcagagacacacataagagatcatatggtgactaatgcaagatgaaactctcagcttggaaagtaacaaggaataggatgtaagtatgagcttctgttttttattatatttatggatgccccctcagaaaaatatgcaaaggggtaactggcttggaaatgggtatttatgcatagtaaatcccactcacgagttttgcctatttgaagcttctctcaatgacagtgcatctgtgaatgttcgctggtgttgaaaatgatgcttttgaacggtgcaatgcaaacactgcatgaaatgtattttgatggtcgagataataaggtgttgctggttcttactgatagactgagagatctttaactcagtgaaatgttaaatgttcattttctcttttattcttactttttcccattgctttcaaaatctgcagttcacaaataatgccaatgaatcagtgctgctgaacacttactatccagatgcccagcccttgctcacaaacacaatgctttttcaagaattaaatgtgtctaagagcacaaacataattctcccaaaattaattttgagagttgaaaaggtggtctatgggaaatcattttagatgaataattttggttaggtataatactgaaattcaggaccgagtaagcttaaaaatggtatatggttgtgtgtgtggtttaccccctttttgtttttatttatttgttaaaccctgtcatgttattggtaaattatgaggaaatcatgttttaagaaaaattcaaaaatatatttgctttaaagtttgggaatctgttaggcattttactgccttagtattatttcactggagggaatgttttgaattttcagaatgtcttttcaaaataaaaagaaatcaaaatgaaaaaccaaa

SEQ ID NO: 317080 - DNA, 1369 bp, Homo sapiens
gcagtgcacgccgggcaagaggaagacctccatcagctcgccgcgcagcgcggctgtatttgcggcctgtgcgagtaggcgcttgggcactcagtctccctggcgagcgacgggcagaaatctcgaaccagtggagcgcactcgtaacctggatcccagaaggtcgcgaaggcagtaccgtttcctcagcggcggactgctgcagtaagaatgtcttttccacctcatttgaatcgccctcccatgggaatcccagcactcccaccagggatcccacccccgcagtttccaggatttcctccacctgtacctccagggaccccaatgattcctgtaccaatgagcattatggctcctgctccaactgtcttagtacccactgtgtctatggttggaaagcatttgggcgcaagaaaggatcatccaggcttaaaggctaaagaaaatgatgaaaattgtggtcctactaccactgtttttgttggcaacatttccgagaaagcttcagacatgcttataagacaactcttagctaaatgtggtttggttttgagctggaagagagtacaaggtgcttccggaaagcttcaagccttcggattctgtgagtacaaggagccagaatctaccctccgtgcactcagattattacatgacctgcaaattggagagaaaaagctactcgttaaagttgatgcaaagacaaaggcacagctggatgaatggaaagcaaagaagaaagcttctaatgggaatgcaaggccagaaactgtcactaatgacgatgaagaagccttggatgaagaaacaaagaggagagatcagatgattaaaggggctattgaagttttaattcgtgaatactccagtgagctaaatgccccctcacaggaatctgattctcaccccaggaagaagaagaaggaaaagaaggaggacattttccgcagatttccagtggccccactgatcccttatccactcatcactaaggaggatataaatgctatagaaatggaagaagacaaaagagacctgatatctcgagagatcagcaaattcagagacacacataaggtagtattcttgtcttttcacttgataccaatctagactttttacagaatccaaagcaaagagacaaaaaaaatcaaccttaaattagaatataattttaaatgttttttataggtttaattgatatttagatagaaaaaagaaacagaagaccaataccatattaaagtggtccttgacatgttgtgcttagttttttcagttactgactattctgcagtcatctcactttaatatgaatagaagctaattttatttttagatttcaacataaacatcaaggtcagactta

SEQ ID NO: 317081 - DNA, 650 bp, Homo sapiens
gcagtgcacgccgggcaagaggaagacctccatcagctcgccgcgcagcgcggctgtatttgcggcctgtgcgagtaggcgcttgggcactcagtctccctggcgagcgacgggcagaaatctcgaaccagtggagcgcactcgtaacctggatcccagaaggtcgcgaaggcagtaccgtttcctcagcggcggactgctgcagtaagaatgtcttttccacctcatttgaatcgccctcccatgggaatcccagcactcccaccagggatcccacccccgcagtttccaggatttcctccacctgtacctccagggaccccaatgattcctgtaccaatgagcattatggctcctgctccaactgtcttagtacccactgtgtctatggttggaaagcatttgggcgcaagaaaggatcatccaggcttaaaggctaaagaaaatgatgaaaattgtggtcctactaccactgtttttgttggcaacatttccgagaaagcttcagacatgcttataagacaactcttagctaaatgtggtttggttttgagctggaagagagtacaaggtgcttccggaaagcttcaaggtatgtcatttttttccttatttgctgaaatcactttaactaacctgtgtgcttaaat

SEQ ID NO: 317082 - DNA, 271 bp, Homo sapiens
aatggatggatgcatggatggatggatagtggatggatagatggttgggtaggtgggtggatggagggatggagggatggatggataatagatggatgcatagatggatgcatgcatggatggatggatagatgggtgagcagatggaaggatgaatgctttgatggatgggtgatgcagagaggcaggaacagcctcgggcctcattctgggctcccattctctttcagcactttcattcaccctactattctttataacttatttttgt

SEQ ID NO: 317083 - DNA, 301 bp, Homo sapiens
ttcatgaatacaatactttaattgcactgtacaaacacaacacggctgggacaccaacgaatgaaaaaagtcattaactgtgaacatttttttttttttttttttttttttttgggggggggatttttttttttttcccccggttgggggaaaagggccccttttgggcccccctttccctttgggggaaagggtttttcgggccctaaccccccggggggggggggccccccgggggaaaaccccccccggggggccccgggcctaattttgaaaaatgggccatgggtttttcccgggg

SEQ ID NO: 317084 - DNA, 403 bp, Homo sapiens
tagcatttgacatttaatgatggggtaaataaccttggttagaattaaaataataaaatacaaactaattttatttaattattcaagcccaggccatacataaaagcactgaggatcaaacataaatatccacaagggtgccagtgacagccaacaggcatgtgcaaaccacctctcacaatacgttttaaagatcaagcagtctttcaaagcacagtcatccatttgccgtggttttgtagcactgatattatacatattttatatatagttccattaactgaatgtcaaagctgcctgtgtgacacctaagaaaattcagtgagagcaatactaagacataaagatttttgttggatgggttggactttggagggccacggaccattatctaaggtttttt

SEQ ID NO: 317085 - DNA, 502 bp, Homo sapiens
gttgtctttcaccatgtgaatggagaagttcctggttcttcatatgccaaatgattttggattaaatccgacacatcttaaatattatgttgtgagattctgggtcttgtttaatcctgtggtgaatatgaatagttttttttagcagtctgattagtcagactgaaagtttaaaactgcagtggttccaatgtcaagtcagttttaaaagccttgcaatgttatttggatctactccatctgcacatcagctggtggtcagtttgggatcaccaaactgggtggagatctgtcttttagttcaactctctcttttatcttattacattttattttattgtggtaagaacttttaacatgtaatataccttcttgacagagttttaagtatacattattgttgattatagttaaaaggttgtacagaagatctctagagcttattcatcttgattaattgaaacttaatgccccttgattagtaactccccattttcctccc

SEQ ID NO: 317086 - DNA, 3175 bp, Homo sapiens
tgccccctcctaccgccccctgccctgccctgccctcccctcgcccggcgcggtcccgtccgcctctcgctcgcctcccgcctcccctcggtcttccgaggcgcccgggctcccggcgcggcggcggagggggcgggcaggccggcgggcggtgatgtggcgggactctttatgcgctgcggcaggatacgcgctcggcgctgggacgcgactgcgctcagttctctcctctcggaagctgcagccatgatggaagtttgagagttgagccgctgtgaggcgaggccgggctcaggcgagggagatgagagacggcggcggccgcggcccggagcccctctcagcgcctgtgagcagccgcgggggcagcgccctcggggagccggccggcctgcggcggcggcagcggcggcgtttctcgcctcctcttcgtcttttctaaccgtgcagcctcttcctcggcttctcctgaaagggaaggtggaagccgtgggctcgggcgggagccggctgaggcgcggcggcggcggcggcacctcccgctcctggagcgggggggagaagcggcggcggcggcggccgcggcggctgcagctccagggagggggtctgagtcgcctgtcaccatttccagggctgggaacgccggagagttggtctctccccttctactgcctccaacacggcggcggcggcggcggcacatccagggacccgggccggttttaaacctcccgtccgccgccgccgcaccccccgtggcccgggctccggaggccgccggcggaggcagccgttcggaggattattcgtcttctccccattccgctgccgccgctgccaggcctctggctgctgaggagaagcaggcccagtcgctgcaaccatccagcagccgccgcagcagccattacccggctgcggtccagagccaagcggcggcagagcgaggggcatcagctaccgccaagtccagagccatttccatcctgcagaagaagccccgccaccagcagcttctgccatctctctcctcctttttcttcagccacaggctcccagacatgacagccatcatcaaagagatcgttagcagaaacaaaaggagatatcaagaggatggattcgacttagacttgacctatatttatccaaacattattgctatgggatttcctgcagaaagacttgaaggcgtatacaggaacaatattgatgatgtagtaaggtttttggattcaaagcataaaaaccattacaagatatacaatctttgtgctgaaagacattatgacaccgccaaatttaattgcagagttgcacaatatccttttgaagaccataacccaccacagctagaacttatcaaacccttttgtgaagatcttgaccaatggctaagtgaagatgacaatcatgttgcagcaattcactgtaaagctggaaagggacgaactggtgtaatgatatgtgcatatttattacatcggggcaaatttttaaaggcacaagaggccctagatttctatggggaagtaaggaccagagacaaaaagggagtaactattcccagtcagaggcgctatgtgtattattatagctacctgttaaagaatcatctggattatagaccagtggcactgttgtttcacaagatgatgtttgaaactattccaatgttcagtggcggaacttgcaatcctcagtttgtggtctgccagctaaaggtgaagatatattcctccaattcaggacccacacgacgggaagacaagttcatgtactttgagttccctcagccgttacctgtgtgtggtgatatcaaagtagagttcttccacaaacagaacaagatgctaaaaaaggacaaaatgtttcacttttgggtaaatacattcttcataccaggaccagaggaaacctcagaaaaagtagaaaatggaagtctatgtgatcaagaaatcgatagcatttgcagtatagagcgtgcagataatgacaaggaatatctagtacttactttaacaaaaaatgatcttgacaaagcaaataaagacaaagccaaccgatacttttctccaaattttaaggtgaagctgtacttcacaaaaacagtagaggagccgtcaaatccagaggctagcagttcaacttctgtaacaccagatgttagtgacaatgaacctgatcattatagatattctgacaccactgactctgatccagagaatgaaccttttgatgaagatcagcatacacaaattacaaaagtctgaatttttttttatcaagagggataaaacaccatgaaaataaacttgaataaactgaaaatggacctttttttttttaatggcaataggacattgtgtcagattaccagttataggaacaattctcttttcctgaccaatcttgttttaccctatacatccacagggttttgacacttgttgtccagttgaaaaaaggttgtgtagctgtgtcatgtatatacctttttgtgtcaaaaggacatttaaaattcaattaggattaataaagatggcactttcccgttttattccagttttataaaaagtggagacagactgatgtgtatacgtaggaattttttccttttgtgttctgtcaccaactgaagtggctaaagagctttgtgatatactggttcacatcctacccctttgcacttgtggcaacagataagtttgcagttggctaagagaggtttccgaagggttttgctacattctaatgcatgtattcgggttaggggaatggagggaatgctcagaaaggaaataattttatgctggactctggaccatataccatctccagctatttacacacacctttctttagcatgctacagttattaatctggacattcgaggaattggccgctgtcactgcttgttgtttgcgcatttttttttaaagcatattggtgctagaaaaggcagctaaaggaagtgaatctgtattggggtacaggaatgaaccttctgcaacatcttaagatccacaaatgaagggatataaaaataatgtcataggtaagaaacacagcaacaatgacttaaccatataaatgtggaggctatcaacaaagaatgggcttgaaacattataaaaattgacaatgatttattaaatatgttttctcaat

SEQ ID NO: 317087 - DNA, 555 bp, Homo sapiens
taaatgtttatgtaactttgaaaaaaaagcctttgaagaaaataattgaatgctgtctgggagacagatttctttcagcacttaaagtacataacacactacttttacttttcccacttgattttaaattatcagggttattaagaccttaaaattattttaccaggtttttacatgtgagctgtgacatgactggcattttctttgatttcagcgtatgttggtctctacacatgaaatttgtgtgacttaaaactttctctaaaactgtacttttagttatgatatgcatagaaagcagtatcaaatattgcgtcaaatgactaataacacttaatttctagagttgtggttttattgagccaaaagttgatatgaaaaaaagtcagtaaggaaagtcagtgaagtgcttgcttttttgataattgcactcccaataattttgatattccaacgtacttggtttgcttgttttcacgttaatgttttctgtttattggagtgggaaggcattaaaattgtcattgaagactttgtctttgaaaaaaagtagta

SEQ ID NO: 317088 - DNA, 582 bp, Homo sapiens
gcaaaatggaataaaaaatctgttaaaaatatatttcactaaatagtttaagatgagtcatatttgtgggttttcattttaaattttctttctctaggtgaagctgtacttcacaaaaacagtagaggagccgtcaaatccagaggctagcagttcaacttctgtaacaccagatgttagtgacaatgaacctgatcattatagatattctgacaccactgactctgatccagagaatgaaccttttgatgaagatcagcatacacaaattacaaaagtctgaatttttttttatcaagagggataaaacaccatgaaaataaacttgaataaactgaaaatggacctttttttttttaatggcaataggacattgtgtcagattaccagttataggaacaattctcttttcctgaccaatcttgttttaccctatacatccacagggttttgacacttgttgtccagttgaaaaaaggttgtgtagctgtgtcatgtatatacctttttgtgtcaaaaggacatttaaaattcaattaggattaataaagatggcactttcccgttttattccagttttat

SEQ ID NO: 317089 - DNA, 5578 bp, Homo sapiens
  misc_feature (3791)..(3791): n is a, c, g, or t
tgccccctcctaccgccccctgccctgccctgccctcccctcgcccggcgcggtcccgtccgcctctcgctcgcctcccgcctcccctcggtcttccgaggcgcccgggctcccggcgcggcggcggagggggcgggcaggccggcgggcggtgatgtggcgggactctttatgcgctgcggcaggatacgcgctcggcgctgggacgcgactgcgctcagttctctcctctcggaagctgcagccatgatggaagtttgagagttgagccgctgtgaggcgaggccgggctcaggcgagggagatgagagacggcggcggccgcggcccggagcccctctcagcgcctgtgagcagccgcgggggcagcgccctcggggagccggccggcctgcggcggcggcagcggcggcgtttctcgcctcctcttcgtcttttctaaccgtgcagcctcttcctcggcttctcctgaaagggaaggtggaagccgtgggctcgggcgggagccggctgaggcgcggcggcggcggcggcacctcccgctcctggagcgggggggagaagcggcggcggcggcggccgcggcggctgcagctccagggagggggtctgagtcgcctgtcaccatttccagggctgggaacgccggagagttggtctctccccttctactgcctccaacacggcggcggcggcggcggcacatccagggacccgggccggttttaaacctcccgtccgccgccgccgcaccccccgtggcccgggctccggaggccgccggcggaggcagccgttcggaggattattcgtcttctccccattccgctgccgccgctgccaggcctctggctgctgaggagaagcaggcccagtcgctgcaaccatccagcagccgccgcagcagccattacccggctgcggtccagagccaagcggcggcagagcgaggggcatcagctaccgccaagtccagagccatttccatcctgcagaagaagccccgccaccagcagcttctgccatctctctcctcctttttcttcagccacaggctcccagacatgacagccatcatcaaagagatcgttagcagaaacaaaaggagatatcaagaggatggattcgacttagacttgacctatatttatccaaacattattgctatgggatttcctgcagaaagacttgaaggcgtatacaggaacaatattgatgatgtagtaaggtttttggattcaaagcataaaaaccattacaagatatacaatctttgtgctgaaagacattatgacaccgccaaatttaattgcagagttgcacaatatccttttgaagaccataacccaccacagctagaacttatcaaacccttttgtgaagatcttgaccaatggctaagtgaagatgacaatcatgttgcagcaattcactgtaaagctggaaagggacgaactggtgtaatgatatgtgcatatttattacatcggggcaaatttttaaaggcacaagaggccctagatttctatggggaagtaaggaccagagacaaaaagggagtaactattcccagtcagaggcgctatgtgtattattatagctacctgttaaagaatcatctggattatagaccagtggcactgttgtttcacaagatgatgtttgaaactattccaatgttcagtggcggaacttgcaatcctcagtttgtggtctgccagctaaaggtgaagatatattcctccaattcaggacccacacgacgggaagacaagttcatgtactttgagttccctcagccgttacctgtgtgtggtgatatcaaagtagagttcttccacaaacagaacaagatgctaaaaaaggacaaaatgtttcacttttgggtaaatacattcttcataccaggaccagaggaaacctcagaaaaagtagaaaatggaagtctatgtgatcaagaaatcgatagcatttgcagtatagagcgtgcagataatgacaaggaatatctagtacttactttaacaaaaaatgatcttgacaaagcaaataaagacaaagccaaccgatacttttctccaaattttaaggtgaagctgtacttcacaaaaacagtagaggagccgtcaaatccagaggctagcagttcaacttctgtaacaccagatgttagtgacaatgaacctgatcattatagatattctgacaccactgactctgatccagagaatgaaccttttgatgaagatcagcatacacaaattacaaaagtctgaatttttttttatcaagagggataaaacaccatgaaaataaacttgaataaactgaaaatggacctttttttttttaatggcaataggacattgtgtcagattaccagttataggaacaattctcttttcctgaccaatcttgttttaccctatacatccacagggttttgacacttgttgtccagttgaaaaaaggttgtgtagctgtgtcatgtatatacctttttgtgtcaaaaggacatttaaaattcaattaggattaataaagatggcactttcccgttttattccagttttataaaaagtggagacagactgatgtgtatacgtaggaattttttccttttgtgttctgtcaccaactgaagtggctaaagagctttgtgatatactggttcacatcctacccctttgcacttgtggcaacagataagtttgcagttggctaagagaggtttccgaagggttttgctacattctaatgcatgtattcgggttaggggaatggagggaatgctcagaaaggaaataattttatgctggactctggaccatataccatctccagctatttacacacacctttctttagcatgctacagttattaatctggacattcgaggaattggccgctgtcactgcttgttgtttgcgcatttttttttaaagcatattggtgctagaaaaggcagctaaaggaagtgaatctgtattggggtacaggaatgaaccttctgcaacatcttaagatccacaaatgaagggatataaaaataatgtcataggtaagaaacacagcaacaatgacttaaccatataaatgtggaggctatcaacaaagaatgggcttgaaacattataaaaattgacaatgatttattaaatatgttttctcaattgtaacgacttctccatctcctgtgtaatcaaggccagtgctaaaattcagatgctgttagtacctacatcagtcaacaacttacacttattttactagttttcaatcataatacctgctgtggatgcttcatgtgctgcctgcaagcttcttttttctcattaaatataaaatattttgtaatgctgcacagaaattttcaatttgagattctacagtaagcgttttttttctttgaagatttatgatgcacttattcaatagctgtcagccgttccacccttttgaccttacacattctattacaatgaattttgcagttttgcacattttttaaatgtcattaactgttagggaattttacttgaatactgaatacatataatgtttatattaaaaaggacatttgtgttaaaaaggaaattagagttgcagtaaactttcaatgctgcacacaaaaaaaagacatttgatttttcagtagaaattgtcctacatgtgctttattgatttgctattgaaagaatagggttttttttttttttttttttttttttttaaatgtgcagtgttgaatcatttcttcatagtgctcccccgagttgggactagggcntcaatttcacttcttaaaaaaaatcatcatatatttgatatgcccagactgcatacgattttaagcggagtacaactactattgtaaagctaatgtgaagatattattaaaaaggtttttttttccagaaatttggtgtcttcaaattataccttcaccttgacatttgaatatccagccattttgtttcttaatggtataaaattccattttcaataacttattggtgctgaaattgttcactagctgtggtctgacctagttaatttacaaatacagattgaataggacctactagagcagcatttatagagtttgatggcaaatagattaggcagaacttcatctaaaatattcttagtaaataatgttgacacgttttccataccttgtcagtttcattcaacaatttttaaatttttaacaaagctcttaggatttacacatttatatttaaacattgatatatagagtattgattgattgctcataagttaaattggtaaagttagagacaactattctaacacctcaccattgaaatttatatgccaccttgtctttcataaaagctgaaaattgttacctaaaatgaaaatcaacttcatgttttgaagatagttataaatattgttctttgttacaatttcgggcaccgcatattaaaacgtaactttattgttccaatatgtaacatggagggccaggtcataaataatgacattataatgggcttttgcactgttattatttttcctttggaatgtgaaggtctgaatgagggttttgattttgaatgtttcaatgtttttgagaagccttgcttacattttatggtgtagtcattggaaatggaaaaatggcattatatatattatatatataaatatatattatacatactctccttactttatttcagttaccatccccatagaatttgacaagaattgctatgactgaaaggttttcgagtcctaattaaaactttatttatggcagtattcataattagcctgaaatgcattctgtaggtaatctctgagtttctggaatattttcttagactttttggatgtgcagcagcttacatgtctgaagttacttgaaggcatcacttttaagaaagcttacagttgggccctgtaccatcccaagtcctttgtagctcctcttgaacatgtttgccatacttttaaaagggtagttgaataaatagcatcaccattctttgctgtggcacaggttataaacttaagtggagtttaccggcagcatcaaatgtttcagctttaaaaaataaaagtagggtacaagtttaatgtttagttctagaaattttgtgcaatatgttcataacgatggctgtggttgccacaaagtgcctcgtttacctttaaatactgttaatgtgtcatgcatgcagatggaaggggtggaactgtgcactaaagtgggggctttaactgtagtatttggcagagttgccttctacctgccagttcaaaagttcaacctgttttcatatagaatatatatactaaaaaatttcagtctgttaaacagccttactctgattcagcctcttcagatactcttgtgctgtgcagcagtggctctgtgtgtaaatgctatgcactgaggatacacaaaaataccaatatgatgtgtacaggataatgcctcatcccaatcagatgtccatttgttattgtgtttgttaacaaccctttatctcttagtgttataaactccacttaaaactgattaaagtctcattcttgtca

SEQ ID NO: 317090 - DNA, 8829 bp, Homo sapiens
  misc_feature (3791)..(3791): n is a, c, g, or t
tgccccctcctaccgccccctgccctgccctgccctcccctcgcccggcgcggtcccgtccgcctctcgctcgcctcccgcctcccctcggtcttccgaggcgcccgggctcccggcgcggcggcggagggggcgggcaggccggcgggcggtgatgtggcgggactctttatgcgctgcggcaggatacgcgctcggcgctgggacgcgactgcgctcagttctctcctctcggaagctgcagccatgatggaagtttgagagttgagccgctgtgaggcgaggccgggctcaggcgagggagatgagagacggcggcggccgcggcccggagcccctctcagcgcctgtgagcagccgcgggggcagcgccctcggggagccggccggcctgcggcggcggcagcggcggcgtttctcgcctcctcttcgtcttttctaaccgtgcagcctcttcctcggcttctcctgaaagggaaggtggaagccgtgggctcgggcgggagccggctgaggcgcggcggcggcggcggcacctcccgctcctggagcgggggggagaagcggcggcggcggcggccgcggcggctgcagctccagggagggggtctgagtcgcctgtcaccatttccagggctgggaacgccggagagttggtctctccccttctactgcctccaacacggcggcggcggcggcggcacatccagggacccgggccggttttaaacctcccgtccgccgccgccgcaccccccgtggcccgggctccggaggccgccggcggaggcagccgttcggaggattattcgtcttctccccattccgctgccgccgctgccaggcctctggctgctgaggagaagcaggcccagtcgctgcaaccatccagcagccgccgcagcagccattacccggctgcggtccagagccaagcggcggcagagcgaggggcatcagctaccgccaagtccagagccatttccatcctgcagaagaagccccgccaccagcagcttctgccatctctctcctcctttttcttcagccacaggctcccagacatgacagccatcatcaaagagatcgttagcagaaacaaaaggagatatcaagaggatggattcgacttagacttgacctatatttatccaaacattattgctatgggatttcctgcagaaagacttgaaggcgtatacaggaacaatattgatgatgtagtaaggtttttggattcaaagcataaaaaccattacaagatatacaatctttgtgctgaaagacattatgacaccgccaaatttaattgcagagttgcacaatatccttttgaagaccataacccaccacagctagaacttatcaaacccttttgtgaagatcttgaccaatggctaagtgaagatgacaatcatgttgcagcaattcactgtaaagctggaaagggacgaactggtgtaatgatatgtgcatatttattacatcggggcaaatttttaaaggcacaagaggccctagatttctatggggaagtaaggaccagagacaaaaagggagtaactattcccagtcagaggcgctatgtgtattattatagctacctgttaaagaatcatctggattatagaccagtggcactgttgtttcacaagatgatgtttgaaactattccaatgttcagtggcggaacttgcaatcctcagtttgtggtctgccagctaaaggtgaagatatattcctccaattcaggacccacacgacgggaagacaagttcatgtactttgagttccctcagccgttacctgtgtgtggtgatatcaaagtagagttcttccacaaacagaacaagatgctaaaaaaggacaaaatgtttcacttttgggtaaatacattcttcataccaggaccagaggaaacctcagaaaaagtagaaaatggaagtctatgtgatcaagaaatcgatagcatttgcagtatagagcgtgcagataatgacaaggaatatctagtacttactttaacaaaaaatgatcttgacaaagcaaataaagacaaagccaaccgatacttttctccaaattttaaggtgaagctgtacttcacaaaaacagtagaggagccgtcaaatccagaggctagcagttcaacttctgtaacaccagatgttagtgacaatgaacctgatcattatagatattctgacaccactgactctgatccagagaatgaaccttttgatgaagatcagcatacacaaattacaaaagtctgaatttttttttatcaagagggataaaacaccatgaaaataaacttgaataaactgaaaatggacctttttttttttaatggcaataggacattgtgtcagattaccagttataggaacaattctcttttcctgaccaatcttgttttaccctatacatccacagggttttgacacttgttgtccagttgaaaaaaggttgtgtagctgtgtcatgtatatacctttttgtgtcaaaaggacatttaaaattcaattaggattaataaagatggcactttcccgttttattccagttttataaaaagtggagacagactgatgtgtatacgtaggaattttttccttttgtgttctgtcaccaactgaagtggctaaagagctttgtgatatactggttcacatcctacccctttgcacttgtggcaacagataagtttgcagttggctaagagaggtttccgaagggttttgctacattctaatgcatgtattcgggttaggggaatggagggaatgctcagaaaggaaataattttatgctggactctggaccatataccatctccagctatttacacacacctttctttagcatgctacagttattaatctggacattcgaggaattggccgctgtcactgcttgttgtttgcgcatttttttttaaagcatattggtgctagaaaaggcagctaaaggaagtgaatctgtattggggtacaggaatgaaccttctgcaacatcttaagatccacaaatgaagggatataaaaataatgtcataggtaagaaacacagcaacaatgacttaaccatataaatgtggaggctatcaacaaagaatgggcttgaaacattataaaaattgacaatgatttattaaatatgttttctcaattgtaacgacttctccatctcctgtgtaatcaaggccagtgctaaaattcagatgctgttagtacctacatcagtcaacaacttacacttattttactagttttcaatcataatacctgctgtggatgcttcatgtgctgcctgcaagcttcttttttctcattaaatataaaatattttgtaatgctgcacagaaattttcaatttgagattctacagtaagcgttttttttctttgaagatttatgatgcacttattcaatagctgtcagccgttccacccttttgaccttacacattctattacaatgaattttgcagttttgcacattttttaaatgtcattaactgttagggaattttacttgaatactgaatacatataatgtttatattaaaaaggacatttgtgttaaaaaggaaattagagttgcagtaaactttcaatgctgcacacaaaaaaaagacatttgatttttcagtagaaattgtcctacatgtgctttattgatttgctattgaaagaatagggttttttttttttttttttttttttttttaaatgtgcagtgttgaatcatttcttcatagtgctcccccgagttgggactagggcntcaatttcacttcttaaaaaaaatcatcatatatttgatatgcccagactgcatacgattttaagcggagtacaactactattgtaaagctaatgtgaagatattattaaaaaggtttttttttccagaaatttggtgtcttcaaattataccttcaccttgacatttgaatatccagccattttgtttcttaatggtataaaattccattttcaataacttattggtgctgaaattgttcactagctgtggtctgacctagttaatttacaaatacagattgaataggacctactagagcagcatttatagagtttgatggcaaatagattaggcagaacttcatctaaaatattcttagtaaataatgttgacacgttttccataccttgtcagtttcattcaacaatttttaaatttttaacaaagctcttaggatttacacatttatatttaaacattgatatatagagtattgattgattgctcataagttaaattggtaaagttagagacaactattctaacacctcaccattgaaatttatatgccaccttgtctttcataaaagctgaaaattgttacctaaaatgaaaatcaacttcatgttttgaagatagttataaatattgttctttgttacaatttcgggcaccgcatattaaaacgtaactttattgttccaatatgtaacatggagggccaggtcataaataatgacattataatgggcttttgcactgttattatttttcctttggaatgtgaaggtctgaatgagggttttgattttgaatgtttcaatgtttttgagaagccttgcttacattttatggtgtagtcattggaaatggaaaaatggcattatatatattatatatataaatatatattatacatactctccttactttatttcagttaccatccccatagaatttgacaagaattgctatgactgaaaggttttcgagtcctaattaaaactttatttatggcagtattcataattagcctgaaatgcattctgtaggtaatctctgagtttctggaatattttcttagactttttggatgtgcagcagcttacatgtctgaagttacttgaaggcatcacttttaagaaagcttacagttgggccctgtaccatcccaagtcctttgtagctcctcttgaacatgtttgccatacttttaaaagggtagttgaataaatagcatcaccattctttgctgtggcacaggttataaacttaagtggagtttaccggcagcatcaaatgtttcagctttaaaaaataaaagtagggtacaagtttaatgtttagttctagaaattttgtgcaatatgttcataacgatggctgtggttgccacaaagtgcctcgtttacctttaaatactgttaatgtgtcatgcatgcagatggaaggggtggaactgtgcactaaagtgggggctttaactgtagtatttggcagagttgccttctacctgccagttcaaaagttcaacctgttttcatatagaatatatatactaaaaaatttcagtctgttaaacagccttactctgattcagcctcttcagatactcttgtgctgtgcagcagtggctctgtgtgtaaatgctatgcactgaggatacacaaaaataccaatatgatgtgtacaggataatgcctcatcccaatcagatgtccatttgttattgtgtttgttaacaaccctttatctcttagtgttataaactccacttaaaactgattaaagtctcattcttgtcattgtgtgggtgttttattaaatgagagtttataattcaaattgcttaagtccattgaagttttaattaatgggcagccaaatgtgaatacaaagttttcagtttttttttttcctgctgtccttcaaagcctactgtttaaaaaaaaaaaaaaaaaaaacatggcctgagagtagagtatctgtctactcatgtttaattaaggaaaaacacttatttttagggctttagtcatcacttcataaattgtataagcacattaaatagcgttctagtcctgaaaaagtccaagattcttagaaaattgtgcatatttttattatgacagatgtttgaagataattccccagaatggatttgatactttagatttcaattttgtggcttttgtctattattctgtactctgccatcagcatatggaaagcttcatttactcatcatgacttgtgccatataaaaattgatatttcggaatagtctaaaggactttttgtacttgaatttaatcatgttgtttctaatattcttaaaagcttgaagactaaagcatatcctttcaacaaagcatagtaaggtaataagaaagtgtagtttgtacaagtgttaaaaaaataaagtagacaatgttacagtgggacttattatttcaagtttacattttctccatgtaattttttaaaaagtaaatgaaaaaatgtgcaataatgtaaaatatgaagtgtatgtgtacacacattttatttttcggtatcttgggtatacgtatggttgaaaactatactggagtctaaaagtattctaatttataagaagacattttggtgatgtttgaaaaatagaaatgtgctagttttgtttttatatcatgtcctttgtacgttgtaatatgagctggcttggttcagtaaatgccatcaccatttccattgagaatttaaaactcaccagtgtttaatatgcaggcttccaaaggcttatgaaaaaaatcaagacccttaaatctagttaatttgctgctaacatgaaactctttggttcttttatttttgccagataattagacacacatctaaagcttagtcttaaatggcttaagtgtagctattgattagtgctgttgctagttcagaaagaaatgtttgtgaatggaaacaagaatattcagtccaaactgttgtaaggacagtacctgaaaaccaggaaacaggataatggaaaaagtcttttaaagatgaaatgttggagccaactttcttatagaattaattgtatgtggctatagaaagcctaatgattgttgcttatttttgagagcatattattcttttatgaccataatcttgctgtttttccatcttccaaaagatcttccttctaatatgtatatcagaatgtgggtagccagtcagacaaattcatattggttggtagctttaaaaagtttgtaatgtgaagacaggaaaggacaaaatagtttgctttggtggtagtactctggttgttaagctaggtattttgagactacttccccatcacaacaacaataaaataatcactcataatcctatcacctggagacatagccatcgttaatatgttagtgactatacaatcatgttttcttctgtatatccatgtatattctttaaaaatgaaatttatactgtacctgatctcaaagctttttagcttagtatatctgtcatgaatttgtaggatgttccattgcatcagaaaacggacagtgatttgattactttctaatgccacagatgcagattacatgtagttattgagaatcctttcgaattcagtggcttaatcatgaatgtctaaatattgttgacattaggatgatacatgtaaattaaagttacatttgtttagcatagacaagcttaacattgtagatgtttctcttcaaaaatcatcttaaacatttgcatttggaattgtgttaaatagaatgtgtgaaacactgtattagtaaacttcatcacctttctacttccttatagtttgaacttttcagtttttgtagttcccaaacagttgctcaatttagagcaaattaatttaacacctgccaaaaaaaggctgctgttggcttatcagttgtctttaaattcaaatgctcatgtgacttttatcacatcaaaaaatatttcattaatgattcacctttagctctgaaaattaccgcgtttagtaattatagtgggcttataaaaacatgcaactctttttgatagttatttgagaattttggtgaaaaatatttagctgagggcagtatagaacttataaaccaatatattgatatttttaaaacatttttacatataagtaaactgccatctttgagcataactacatttaaaaataaagctgcatatttttaaatcaagtgtttaacaagaatttatattttttattttttaaaattaaaaataatttatatttcctctgttgcatgaggattctcatctgtgcttataatggttagagattttatttgtgtggaatgaagtgaggcttgtagtcatggttctagtgtttcagtttgccaagtctgtttactgcagtgaaattcatcaaatgtttcagtgtggttttctgtagcctatcatttactggctatttttttatgtacacctttaggattttctgcctactctatccagttgtccaaatgatatcctacattttacaaatgccctttcagtttctattttctttttccattaaattgccctcatgtcctaatgtgcagtttgtaagtgtgtgtgtgtgtgtctgtgtgtgtgtgaatttgattttcaagagtgctagacttccaatttgagagattaaataatttaattcaggcaaacatttttcattggaatttcacagttcattgtaatgaaaatgttaatcctggatgacctttgacatacagtaatgaatcttggatattaatgaatttgttagtagcatcttgatgtgtgttttaatgagttattttcaaagttgtgcattaaaccaaagttggcatactggaagtgtttatatcaagttccatttggctactgatggacaaaaaatagaaatgccttcctatggagagtatttttcctttaaaaaattaaaaaggttaattattttgacaaaaaaacaacaagacaacacaaccacaccagagagaagaaacccaaaacatccaaaacaacaaaacaagggggggggcgaataaacaccgggggccaa

SEQ ID NO: 317091 - DNA, 5524 bp, Homo sapiens
  misc_feature (3791)..(3791): n is a, c, g, or t
tgccccctcctaccgccccctgccctgccctgccctcccctcgcccggcgcggtcccgtccgcctctcgctcgcctcccgcctcccctcggtcttccgaggcgcccgggctcccggcgcggcggcggagggggcgggcaggccggcgggcggtgatgtggcgggactctttatgcgctgcggcaggatacgcgctcggcgctgggacgcgactgcgctcagttctctcctctcggaagctgcagccatgatggaagtttgagagttgagccgctgtgaggcgaggccgggctcaggcgagggagatgagagacggcggcggccgcggcccggagcccctctcagcgcctgtgagcagccgcgggggcagcgccctcggggagccggccggcctgcggcggcggcagcggcggcgtttctcgcctcctcttcgtcttttctaaccgtgcagcctcttcctcggcttctcctgaaagggaaggtggaagccgtgggctcgggcgggagccggctgaggcgcggcggcggcggcggcacctcccgctcctggagcgggggggagaagcggcggcggcggcggccgcggcggctgcagctccagggagggggtctgagtcgcctgtcaccatttccagggctgggaacgccggagagttggtctctccccttctactgcctccaacacggcggcggcggcggcggcacatccagggacccgggccggttttaaacctcccgtccgccgccgccgcaccccccgtggcccgggctccggaggccgccggcggaggcagccgttcggaggattattcgtcttctccccattccgctgccgccgctgccaggcctctggctgctgaggagaagcaggcccagtcgctgcaaccatccagcagccgccgcagcagccattacccggctgcggtccagagccaagcggcggcagagcgaggggcatcagctaccgccaagtccagagccatttccatcctgcagaagaagccccgccaccagcagcttctgccatctctctcctcctttttcttcagccacaggctcccagacatgacagccatcatcaaagagatcgttagcagaaacaaaaggagatatcaagaggatggattcgacttagacttgacctatatttatccaaacattattgctatgggatttcctgcagaaagacttgaaggcgtatacaggaacaatattgatgatgtagtaaggtttttggattcaaagcataaaaaccattacaagatatacaatctttgtgctgaaagacattatgacaccgccaaatttaattgcagagttgcacaatatccttttgaagaccataacccaccacagctagaacttatcaaacccttttgtgaagatcttgaccaatggctaagtgaagatgacaatcatgttgcagcaattcactgtaaagctggaaagggacgaactggtgtaatgatatgtgcatatttattacatcggggcaaatttttaaaggcacaagaggccctagatttctatggggaagtaaggaccagagacaaaaagggagtaactattcccagtcagaggcgctatgtgtattattatagctacctgttaaagaatcatctggattatagaccagtggcactgttgtttcacaagatgatgtttgaaactattccaatgttcagtggcggaacttgcaatcctcagtttgtggtctgccagctaaaggtgaagatatattcctccaattcaggacccacacgacgggaagacaagttcatgtactttgagttccctcagccgttacctgtgtgtggtgatatcaaagtagagttcttccacaaacagaacaagatgctaaaaaaggacaaaatgtttcacttttgggtaaatacattcttcataccaggaccagaggaaacctcagaaaaagtagaaaatggaagtctatgtgatcaagaaatcgatagcatttgcagtatagagcgtgcagataatgacaaggaatatctagtacttactttaacaaaaaatgatcttgacaaagcaaataaagacaaagccaaccgatacttttctccaaattttaaggtgaagctgtacttcacaaaaacagtagaggagccgtcaaatccagaggctagcagttcaacttctgtaacaccagatgttagtgacaatgaacctgatcattatagatattctgacaccactgactctgatccagagaatgaaccttttgatgaagatcagcatacacaaattacaaaagtctgaatttttttttatcaagagggataaaacaccatgaaaataaacttgaataaactgaaaatggacctttttttttttaatggcaataggacattgtgtcagattaccagttataggaacaattctcttttcctgaccaatcttgttttaccctatacatccacagggttttgacacttgttgtccagttgaaaaaaggttgtgtagctgtgtcatgtatatacctttttgtgtcaaaaggacatttaaaattcaattaggattaataaagatggcactttcccgttttattccagttttataaaaagtggagacagactgatgtgtatacgtaggaattttttccttttgtgttctgtcaccaactgaagtggctaaagagctttgtgatatactggttcacatcctacccctttgcacttgtggcaacagataagtttgcagttggctaagagaggtttccgaagggttttgctacattctaatgcatgtattcgggttaggggaatggagggaatgctcagaaaggaaataattttatgctggactctggaccatataccatctccagctatttacacacacctttctttagcatgctacagttattaatctggacattcgaggaattggccgctgtcactgcttgttgtttgcgcatttttttttaaagcatattggtgctagaaaaggcagctaaaggaagtgaatctgtattggggtacaggaatgaaccttctgcaacatcttaagatccacaaatgaagggatataaaaataatgtcataggtaagaaacacagcaacaatgacttaaccatataaatgtggaggctatcaacaaagaatgggcttgaaacattataaaaattgacaatgatttattaaatatgttttctcaattgtaacgacttctccatctcctgtgtaatcaaggccagtgctaaaattcagatgctgttagtacctacatcagtcaacaacttacacttattttactagttttcaatcataatacctgctgtggatgcttcatgtgctgcctgcaagcttcttttttctcattaaatataaaatattttgtaatgctgcacagaaattttcaatttgagattctacagtaagcgttttttttctttgaagatttatgatgcacttattcaatagctgtcagccgttccacccttttgaccttacacattctattacaatgaattttgcagttttgcacattttttaaatgtcattaactgttagggaattttacttgaatactgaatacatataatgtttatattaaaaaggacatttgtgttaaaaaggaaattagagttgcagtaaactttcaatgctgcacacaaaaaaaagacatttgatttttcagtagaaattgtcctacatgtgctttattgatttgctattgaaagaatagggttttttttttttttttttttttttttttaaatgtgcagtgttgaatcatttcttcatagtgctcccccgagttgggactagggcntcaatttcacttcttaaaaaaaatcatcatatatttgatatgcccagactgcatacgattttaagcggagtacaactactattgtaaagctaatgtgaagatattattaaaaaggtttttttttccagaaatttggtgtcttcaaattataccttcaccttgacatttgaatatccagccattttgtttcttaatggtataaaattccattttcaataacttattggtgctgaaattgttcactagctgtggtctgacctagttaatttacaaatacagattgaataggacctactagagcagcatttatagagtttgatggcaaatagattaggcagaacttcatctaaaatattcttagtaaataatgttgacacgttttccataccttgtcagtttcattcaacaatttttaaatttttaacaaagctcttaggatttacacatttatatttaaacattgatatatagagtattgattgattgctcataagttaaattggtaaagttagagacaactattctaacacctcaccattgaaatttatatgccaccttgtctttcataaaagctgaaaattgttacctaaaatgaaaatcaacttcatgttttgaagatagttataaatattgttctttgttacaatttcgggcaccgcatattaaaacgtaactttattgttccaatatgtaacatggagggccaggtcataaataatgacattataatgggcttttgcactgttattatttttcctttggaatgtgaaggtctgaatgagggttttgattttgaatgtttcaatgtttttgagaagccttgcttacattttatggtgtagtcattggaaatggaaaaatggcattatatatattatatatataaatatatattatacatactctccttactttatttcagttaccatccccatagaatttgacaagaattgctatgactgaaaggttttcgagtcctaattatctctgagtttctggaatattttcttagactttttggatgtgcagcagcttacatgtctgaagttacttgaaggcatcacttttaagaaagcttacagttgggccctgtaccatcccaagtcctttgtagctcctcttgaacatgtttgccatacttttaaaagggtagttgaataaatagcatcaccattctttgctgtggcacaggttataaacttaagtggagtttaccggcagcatcaaatgtttcagctttaaaaaataaaagtagggtacaagtttaatgtttagttctagaaattttgtgcaatatgttcataacgatggctgtggttgccacaaagtgcctcgtttacctttaaatactgttaatgtgtcatgcatgcagatggaaggggtggaactgtgcactaaagtgggggctttaactgtagtatttggcagagttgccttctacctgccagttcaaaagttcaacctgttttcatatagaatatatatactaaaaaatttcagtctgttaaacagccttactctgattcagcctcttcagatactcttgtgctgtgcagcagtggctctgtgtgtaaatgctatgcactgaggatacacaaaaataccaatatgatgtgtacaggataatgcctcatcccaatcagatgtccatttgttattgtgtttgttaacaaccctttatctcttagtgttataaactccacttaaaactgattaaagtctcattcttgtca

SEQ ID NO: 317092 - DNA, 5662 bp, Homo sapiens
  misc_feature (3791)..(3791): n is a, c, g, or t
tgccccctcctaccgccccctgccctgccctgccctcccctcgcccggcgcggtcccgtccgcctctcgctcgcctcccgcctcccctcggtcttccgaggcgcccgggctcccggcgcggcggcggagggggcgggcaggccggcgggcggtgatgtggcgggactctttatgcgctgcggcaggatacgcgctcggcgctgggacgcgactgcgctcagttctctcctctcggaagctgcagccatgatggaagtttgagagttgagccgctgtgaggcgaggccgggctcaggcgagggagatgagagacggcggcggccgcggcccggagcccctctcagcgcctgtgagcagccgcgggggcagcgccctcggggagccggccggcctgcggcggcggcagcggcggcgtttctcgcctcctcttcgtcttttctaaccgtgcagcctcttcctcggcttctcctgaaagggaaggtggaagccgtgggctcgggcgggagccggctgaggcgcggcggcggcggcggcacctcccgctcctggagcgggggggagaagcggcggcggcggcggccgcggcggctgcagctccagggagggggtctgagtcgcctgtcaccatttccagggctgggaacgccggagagttggtctctccccttctactgcctccaacacggcggcggcggcggcggcacatccagggacccgggccggttttaaacctcccgtccgccgccgccgcaccccccgtggcccgggctccggaggccgccggcggaggcagccgttcggaggattattcgtcttctccccattccgctgccgccgctgccaggcctctggctgctgaggagaagcaggcccagtcgctgcaaccatccagcagccgccgcagcagccattacccggctgcggtccagagccaagcggcggcagagcgaggggcatcagctaccgccaagtccagagccatttccatcctgcagaagaagccccgccaccagcagcttctgccatctctctcctcctttttcttcagccacaggctcccagacatgacagccatcatcaaagagatcgttagcagaaacaaaaggagatatcaagaggatggattcgacttagacttgacctatatttatccaaacattattgctatgggatttcctgcagaaagacttgaaggcgtatacaggaacaatattgatgatgtagtaaggtttttggattcaaagcataaaaaccattacaagatatacaatctttgtgctgaaagacattatgacaccgccaaatttaattgcagagttgcacaatatccttttgaagaccataacccaccacagctagaacttatcaaacccttttgtgaagatcttgaccaatggctaagtgaagatgacaatcatgttgcagcaattcactgtaaagctggaaagggacgaactggtgtaatgatatgtgcatatttattacatcggggcaaatttttaaaggcacaagaggccctagatttctatggggaagtaaggaccagagacaaaaagggagtaactattcccagtcagaggcgctatgtgtattattatagctacctgttaaagaatcatctggattatagaccagtggcactgttgtttcacaagatgatgtttgaaactattccaatgttcagtggcggaacttgcaatcctcagtttgtggtctgccagctaaaggtgaagatatattcctccaattcaggacccacacgacgggaagacaagttcatgtactttgagttccctcagccgttacctgtgtgtggtgatatcaaagtagagttcttccacaaacagaacaagatgctaaaaaaggacaaaatgtttcacttttgggtaaatacattcttcataccaggaccagaggaaacctcagaaaaagtagaaaatggaagtctatgtgatcaagaaatcgatagcatttgcagtatagagcgtgcagataatgacaaggaatatctagtacttactttaacaaaaaatgatcttgacaaagcaaataaagacaaagccaaccgatacttttctccaaattttaaggtgaagctgtacttcacaaaaacagtagaggagccgtcaaatccagaggctagcagttcaacttctgtaacaccagatgttagtgacaatgaacctgatcattatagatattctgacaccactgactctgatccagagaatgaaccttttgatgaagatcagcatacacaaattacaaaagtctgaatttttttttatcaagagggataaaacaccatgaaaataaacttgaataaactgaaaatggacctttttttttttaatggcaataggacattgtgtcagattaccagttataggaacaattctcttttcctgaccaatcttgttttaccctatacatccacagggttttgacacttgttgtccagttgaaaaaaggttgtgtagctgtgtcatgtatatacctttttgtgtcaaaaggacatttaaaattcaattaggattaataaagatggcactttcccgttttattccagttttataaaaagtggagacagactgatgtgtatacgtaggaattttttccttttgtgttctgtcaccaactgaagtggctaaagagctttgtgatatactggttcacatcctacccctttgcacttgtggcaacagataagtttgcagttggctaagagaggtttccgaagggttttgctacattctaatgcatgtattcgggttaggggaatggagggaatgctcagaaaggaaataattttatgctggactctggaccatataccatctccagctatttacacacacctttctttagcatgctacagttattaatctggacattcgaggaattggccgctgtcactgcttgttgtttgcgcatttttttttaaagcatattggtgctagaaaaggcagctaaaggaagtgaatctgtattggggtacaggaatgaaccttctgcaacatcttaagatccacaaatgaagggatataaaaataatgtcataggtaagaaacacagcaacaatgacttaaccatataaatgtggaggctatcaacaaagaatgggcttgaaacattataaaaattgacaatgatttattaaatatgttttctcaattgtaacgacttctccatctcctgtgtaatcaaggccagtgctaaaattcagatgctgttagtacctacatcagtcaacaacttacacttattttactagttttcaatcataatacctgctgtggatgcttcatgtgctgcctgcaagcttcttttttctcattaaatataaaatattttgtaatgctgcacagaaattttcaatttgagattctacagtaagcgttttttttctttgaagatttatgatgcacttattcaatagctgtcagccgttccacccttttgaccttacacattctattacaatgaattttgcagttttgcacattttttaaatgtcattaactgttagggaattttacttgaatactgaatacatataatgtttatattaaaaaggacatttgtgttaaaaaggaaattagagttgcagtaaactttcaatgctgcacacaaaaaaaagacatttgatttttcagtagaaattgtcctacatgtgctttattgatttgctattgaaagaatagggttttttttttttttttttttttttttttaaatgtgcagtgttgaatcatttcttcatagtgctcccccgagttgggactagggcntcaatttcacttcttaaaaaaaatcatcatatatttgatatgcccagactgcatacgattttaagcggagtacaactactattgtaaagctaatgtgaagatattattaaaaaggtttttttttccagaaatttggtgtcttcaaattataccttcaccttgacatttgaatatccagccattttgtttcttaatggtataaaattccattttcaataacttattggtgctgaaattgttcactagctgtggtctgacctagttaatttacaaatacagattgaataggacctactagagcagcatttatagagtttgatggcaaatagattaggcagaacttcatctaaaatattcttagtaaataatgttgacacgttttccataccttgtcagtttcattcaacaatttttaaatttttaacaaagctcttaggatttacacatttatatttaaacattgatatatagagtattgattgattgctcataagttaaattggtaaagttagagacaactattctaacacctcaccattgaaatttatatgccaccttgtctttcataaaagctgaaaattgttacctaaaatgaaaatcaacttcatgttttgaagatagttataaatattgttctttgttacaatttcgggcaccgcatattaaaacgtaactttattgttccaatatgtaacatggagggccaggtcataaataatgacattataatgggcttttgcactgttattatttttcctttggaatgtgaaggtctgaatgagggttttgattttgaatgtttcaatgtttttgagaagccttgcttacattttatggtgtagtcattggaaatggaaaaatggcattatatatattatatatataaatatatattatacatactctccttactttatttcagttaccatccccatagaatttgacaagaattgctatgactgaaaggttttcgagtcctaattaaaactttatttatggcagtattcataattagcctgaaatgcattctgtaggtaatctctgagtttctggaatattttcttagactttttggatgtgcagcagcttacatgtctgaagttacttgaaggcatcacttttaagaaagcttacagttgggccctgtaccatcccaagtcctttgtagctcctcttgaacatgtttgccatacttttaaaagggtagttgaataaatagcatcaccattctttgctgtggcacaggttataaacttaagtggagtttaccggcagcatcaaatgtttcagctttaaaaaataaaagtagggtacaagtttaatgtttagttctagaaattttgtgcaatatgttcataacgatggctgtggttgccacaaagtgcctcgtttacctttaaatactgttaatgtgtcatgcatgcagatggaaggggtggaactgtgcactaaagtgggggctttaactgtagtatttggcagagttgccttctacctgccagttcaaaagttcaacctgttttcatatagaatatatatactaaaaaatttcagtctgttaaacagccttactctgattcagcctcttcagatactcttgtgctgtgcagcagtggctctgtgtgtaaatgctatgcactgaggatacacaaaaataccaatatgatgtgtacaggataatgcctcatcccaatcagatgtccatttgttattgtgtttgttaacaaccctttatctcttagtgttataaactccacttaaaactgattaaagtctcattcttgtcaaaaaaacaacacccaccccacaaaacaattttgggcgcccggccccaaaaaaattttaaccccccctgggggggcggggcccag

SEQ ID NO: 317093 - DNA, 5530 bp, Homo sapiens
  misc_feature (3743)..(3743): n is a, c, g, or t
tgccccctcctaccgccccctgccctgccctgccctcccctcgcccggcgcggtcccgtccgcctctcgctcgcctcccgcctcccctcggtcttccgaggcgcccgggctcccggcgcggcggcggagggggcgggcaggccggcgggcggtgatgtggcgggactctttatgcgctgcggcaggatacgcgctcggcgctgggacgcgactgcgctcagttctctcctctcggaagctgcagccatgatggaagtttgagagttgagccgctgtgaggcgaggccgggctcaggcgagggagatgagagacggcggcggccgcggcccggagcccctctcagcgcctgtgagcagccgcgggggcagcgccctcggggagccggccggcctgcggcggcggcagcggcggcgtttctcgcctcctcttcgtcttttctaaccgtgcagcctcttcctcggcttctcctgaaagggaaggtggaagccgtgggctcgggcgggagccggctgaggcgcggcggcggcggcggcacctcccgctcctggagcgggggggagaagcggcggcggcggcggccgcggcggctgcagctccagggagggggtctgagtcgcctgtcaccatttccagggctgggaacgccggagagttggtctctccccttctactgcctccaacacggcggcggcggcggcggcacatccagggacccgggccggttttaaacctcccgtccgccgccgccgcaccccccgtggcccgggctccggaggccgccggcggaggcagccgttcggaggattattcgtcttctccccattccgctgccgccgctgccaggcctctggctgctgaggagaagcaggcccagtcgctgcaaccatccagcagccgccgcagcagccattacccggctgcggtccagagccaagcggcggcagagcgaggggcatcagctaccgccaagtccagagccatttccatcctgcagaagaagccccgccaccagcagcttctgccatctctctcctcctttttcttcagccacaggctcccagacatgacagccatcatcaaagagatcgttagcagaaacaaaaggagatatcaagaggatggattcgacttagacttgacctatatttatccaaacattattgctatgggatttcctgcagaaagacttgaaggcgtatacaggaacaatattgatgatgtagtaaggtttttggattcaaagcataaaaaccattacaagatatacaatctttgtgctgaaagacattatgacaccgccaaatttaattgcagagttgcacaatatccttttgaagaccataacccaccacagctagaacttatcaaacccttttgtgaagatcttgaccaatggctaagtgaagatgacaatcatgttgcagcaattcactgtaaagctggaaagggacgaactggtgtaatgatatgtgcatatttattacatcggggcaaatttttaaaggcacaagaggccctagatttctatggggaagtaaggaccagagacaaaaagctgttaaagaatcatctggattatagaccagtggcactgttgtttcacaagatgatgtttgaaactattccaatgttcagtggcggaacttgcaatcctcagtttgtggtctgccagctaaaggtgaagatatattcctccaattcaggacccacacgacgggaagacaagttcatgtactttgagttccctcagccgttacctgtgtgtggtgatatcaaagtagagttcttccacaaacagaacaagatgctaaaaaaggacaaaatgtttcacttttgggtaaatacattcttcataccaggaccagaggaaacctcagaaaaagtagaaaatggaagtctatgtgatcaagaaatcgatagcatttgcagtatagagcgtgcagataatgacaaggaatatctagtacttactttaacaaaaaatgatcttgacaaagcaaataaagacaaagccaaccgatacttttctccaaattttaaggtgaagctgtacttcacaaaaacagtagaggagccgtcaaatccagaggctagcagttcaacttctgtaacaccagatgttagtgacaatgaacctgatcattatagatattctgacaccactgactctgatccagagaatgaaccttttgatgaagatcagcatacacaaattacaaaagtctgaatttttttttatcaagagggataaaacaccatgaaaataaacttgaataaactgaaaatggacctttttttttttaatggcaataggacattgtgtcagattaccagttataggaacaattctcttttcctgaccaatcttgttttaccctatacatccacagggttttgacacttgttgtccagttgaaaaaaggttgtgtagctgtgtcatgtatatacctttttgtgtcaaaaggacatttaaaattcaattaggattaataaagatggcactttcccgttttattccagttttataaaaagtggagacagactgatgtgtatacgtaggaattttttccttttgtgttctgtcaccaactgaagtggctaaagagctttgtgatatactggttcacatcctacccctttgcacttgtggcaacagataagtttgcagttggctaagagaggtttccgaagggttttgctacattctaatgcatgtattcgggttaggggaatggagggaatgctcagaaaggaaataattttatgctggactctggaccatataccatctccagctatttacacacacctttctttagcatgctacagttattaatctggacattcgaggaattggccgctgtcactgcttgttgtttgcgcatttttttttaaagcatattggtgctagaaaaggcagctaaaggaagtgaatctgtattggggtacaggaatgaaccttctgcaacatcttaagatccacaaatgaagggatataaaaataatgtcataggtaagaaacacagcaacaatgacttaaccatataaatgtggaggctatcaacaaagaatgggcttgaaacattataaaaattgacaatgatttattaaatatgttttctcaattgtaacgacttctccatctcctgtgtaatcaaggccagtgctaaaattcagatgctgttagtacctacatcagtcaacaacttacacttattttactagttttcaatcataatacctgctgtggatgcttcatgtgctgcctgcaagcttcttttttctcattaaatataaaatattttgtaatgctgcacagaaattttcaatttgagattctacagtaagcgttttttttctttgaagatttatgatgcacttattcaatagctgtcagccgttccacccttttgaccttacacattctattacaatgaattttgcagttttgcacattttttaaatgtcattaactgttagggaattttacttgaatactgaatacatataatgtttatattaaaaaggacatttgtgttaaaaaggaaattagagttgcagtaaactttcaatgctgcacacaaaaaaaagacatttgatttttcagtagaaattgtcctacatgtgctttattgatttgctattgaaagaatagggttttttttttttttttttttttttttttaaatgtgcagtgttgaatcatttcttcatagtgctcccccgagttgggactagggcntcaatttcacttcttaaaaaaaatcatcatatatttgatatgcccagactgcatacgattttaagcggagtacaactactattgtaaagctaatgtgaagatattattaaaaaggtttttttttccagaaatttggtgtcttcaaattataccttcaccttgacatttgaatatccagccattttgtttcttaatggtataaaattccattttcaataacttattggtgctgaaattgttcactagctgtggtctgacctagttaatttacaaatacagattgaataggacctactagagcagcatttatagagtttgatggcaaatagattaggcagaacttcatctaaaatattcttagtaaataatgttgacacgttttccataccttgtcagtttcattcaacaatttttaaatttttaacaaagctcttaggatttacacatttatatttaaacattgatatatagagtattgattgattgctcataagttaaattggtaaagttagagacaactattctaacacctcaccattgaaatttatatgccaccttgtctttcataaaagctgaaaattgttacctaaaatgaaaatcaacttcatgttttgaagatagttataaatattgttctttgttacaatttcgggcaccgcatattaaaacgtaactttattgttccaatatgtaacatggagggccaggtcataaataatgacattataatgggcttttgcactgttattatttttcctttggaatgtgaaggtctgaatgagggttttgattttgaatgtttcaatgtttttgagaagccttgcttacattttatggtgtagtcattggaaatggaaaaatggcattatatatattatatatataaatatatattatacatactctccttactttatttcagttaccatccccatagaatttgacaagaattgctatgactgaaaggttttcgagtcctaattaaaactttatttatggcagtattcataattagcctgaaatgcattctgtaggtaatctctgagtttctggaatattttcttagactttttggatgtgcagcagcttacatgtctgaagttacttgaaggcatcacttttaagaaagcttacagttgggccctgtaccatcccaagtcctttgtagctcctcttgaacatgtttgccatacttttaaaagggtagttgaataaatagcatcaccattctttgctgtggcacaggttataaacttaagtggagtttaccggcagcatcaaatgtttcagctttaaaaaataaaagtagggtacaagtttaatgtttagttctagaaattttgtgcaatatgttcataacgatggctgtggttgccacaaagtgcctcgtttacctttaaatactgttaatgtgtcatgcatgcagatggaaggggtggaactgtgcactaaagtgggggctttaactgtagtatttggcagagttgccttctacctgccagttcaaaagttcaacctgttttcatatagaatatatatactaaaaaatttcagtctgttaaacagccttactctgattcagcctcttcagatactcttgtgctgtgcagcagtggctctgtgtgtaaatgctatgcactgaggatacacaaaaataccaatatgatgtgtacaggataatgcctcatcccaatcagatgtccatttgttattgtgtttgttaacaaccctttatctcttagtgttataaactccacttaaaactgattaaagtctcattcttgtca

SEQ ID NO: 317094 - DNA, 5436 bp, Homo sapiens
  misc_feature (3649)..(3649): n is a, c, g, or t
tgccccctcctaccgccccctgccctgccctgccctcccctcgcccggcgcggtcccgtccgcctctcgctcgcctcccgcctcccctcggtcttccgaggcgcccgggctcccggcgcggcggcggagggggcgggcaggccggcgggcggtgatgtggcgggactctttatgcgctgcggcaggatacgcgctcggcgctgggacgcgactgcgctcagttctctcctctcggaagctgcagccatgatggaagtttgagagttgagccgctgtgaggcgaggccgggctcaggcgagggagatgagagacggcggcggccgcggcccggagcccctctcagcgcctgtgagcagccgcgggggcagcgccctcggggagccggccggcctgcggcggcggcagcggcggcgtttctcgcctcctcttcgtcttttctaaccgtgcagcctcttcctcggcttctcctgaaagggaaggtggaagccgtgggctcgggcgggagccggctgaggcgcggcggcggcggcggcacctcccgctcctggagcgggggggagaagcggcggcggcggcggccgcggcggctgcagctccagggagggggtctgagtcgcctgtcaccatttccagggctgggaacgccggagagttggtctctccccttctactgcctccaacacggcggcggcggcggcggcacatccagggacccgggccggttttaaacctcccgtccgccgccgccgcaccccccgtggcccgggctccggaggccgccggcggaggcagccgttcggaggattattcgtcttctccccattccgctgccgccgctgccaggcctctggctgctgaggagaagcaggcccagtcgctgcaaccatccagcagccgccgcagcagccattacccggctgcggtccagagccaagcggcggcagagcgaggggcatcagctaccgccaagtccagagccatttccatcctgcagaagaagccccgccaccagcagcttctgccatctctctcctcctttttcttcagccacaggctcccagacatgacagccatcatcaaagagatcgttagcagaaacaaaaggagatatcaagaggatggattcgacttagacttgacctatatttatccaaacattattgctatgggatttcctgcagaaagacttgaaggcgtatacaggaacaatattgatgatgtagtaaggtttttggattcaaagcataaaaaccattacaagatatacaatctttgtgctgaaagacattatgacaccgccaaatttaattgcagagttgcacaatatccttttgaagaccataacccaccacagctagaacttatcaaacccttttgtgaagatcttgaccaatggctaagtgaagatgacaatcatgttgcagcaattcactgtaaagctggaaagggacgaactggtgtaatgatatgtgcatatttattacatcggggcaaatttttaaaggcacaagaggccctagatttctatggggaagtaaggaccagagacaaaaagatcctcagtttgtggtctgccagctaaaggtgaagatatattcctccaattcaggacccacacgacgggaagacaagttcatgtactttgagttccctcagccgttacctgtgtgtggtgatatcaaagtagagttcttccacaaacagaacaagatgctaaaaaaggacaaaatgtttcacttttgggtaaatacattcttcataccaggaccagaggaaacctcagaaaaagtagaaaatggaagtctatgtgatcaagaaatcgatagcatttgcagtatagagcgtgcagataatgacaaggaatatctagtacttactttaacaaaaaatgatcttgacaaagcaaataaagacaaagccaaccgatacttttctccaaattttaaggtgaagctgtacttcacaaaaacagtagaggagccgtcaaatccagaggctagcagttcaacttctgtaacaccagatgttagtgacaatgaacctgatcattatagatattctgacaccactgactctgatccagagaatgaaccttttgatgaagatcagcatacacaaattacaaaagtctgaatttttttttatcaagagggataaaacaccatgaaaataaacttgaataaactgaaaatggacctttttttttttaatggcaataggacattgtgtcagattaccagttataggaacaattctcttttcctgaccaatcttgttttaccctatacatccacagggttttgacacttgttgtccagttgaaaaaaggttgtgtagctgtgtcatgtatatacctttttgtgtcaaaaggacatttaaaattcaattaggattaataaagatggcactttcccgttttattccagttttataaaaagtggagacagactgatgtgtatacgtaggaattttttccttttgtgttctgtcaccaactgaagtggctaaagagctttgtgatatactggttcacatcctacccctttgcacttgtggcaacagataagtttgcagttggctaagagaggtttccgaagggttttgctacattctaatgcatgtattcgggttaggggaatggagggaatgctcagaaaggaaataattttatgctggactctggaccatataccatctccagctatttacacacacctttctttagcatgctacagttattaatctggacattcgaggaattggccgctgtcactgcttgttgtttgcgcatttttttttaaagcatattggtgctagaaaaggcagctaaaggaagtgaatctgtattggggtacaggaatgaaccttctgcaacatcttaagatccacaaatgaagggatataaaaataatgtcataggtaagaaacacagcaacaatgacttaaccatataaatgtggaggctatcaacaaagaatgggcttgaaacattataaaaattgacaatgatttattaaatatgttttctcaattgtaacgacttctccatctcctgtgtaatcaaggccagtgctaaaattcagatgctgttagtacctacatcagtcaacaacttacacttattttactagttttcaatcataatacctgctgtggatgcttcatgtgctgcctgcaagcttcttttttctcattaaatataaaatattttgtaatgctgcacagaaattttcaatttgagattctacagtaagcgttttttttctttgaagatttatgatgcacttattcaatagctgtcagccgttccacccttttgaccttacacattctattacaatgaattttgcagttttgcacattttttaaatgtcattaactgttagggaattttacttgaatactgaatacatataatgtttatattaaaaaggacatttgtgttaaaaaggaaattagagttgcagtaaactttcaatgctgcacacaaaaaaaagacatttgatttttcagtagaaattgtcctacatgtgctttattgatttgctattgaaagaatagggttttttttttttttttttttttttttttaaatgtgcagtgttgaatcatttcttcatagtgctcccccgagttgggactagggcntcaatttcacttcttaaaaaaaatcatcatatatttgatatgcccagactgcatacgattttaagcggagtacaactactattgtaaagctaatgtgaagatattattaaaaaggtttttttttccagaaatttggtgtcttcaaattataccttcaccttgacatttgaatatccagccattttgtttcttaatggtataaaattccattttcaataacttattggtgctgaaattgttcactagctgtggtctgacctagttaatttacaaatacagattgaataggacctactagagcagcatttatagagtttgatggcaaatagattaggcagaacttcatctaaaatattcttagtaaataatgttgacacgttttccataccttgtcagtttcattcaacaatttttaaatttttaacaaagctcttaggatttacacatttatatttaaacattgatatatagagtattgattgattgctcataagttaaattggtaaagttagagacaactattctaacacctcaccattgaaatttatatgccaccttgtctttcataaaagctgaaaattgttacctaaaatgaaaatcaacttcatgttttgaagatagttataaatattgttctttgttacaatttcgggcaccgcatattaaaacgtaactttattgttccaatatgtaacatggagggccaggtcataaataatgacattataatgggcttttgcactgttattatttttcctttggaatgtgaaggtctgaatgagggttttgattttgaatgtttcaatgtttttgagaagccttgcttacattttatggtgtagtcattggaaatggaaaaatggcattatatatattatatatataaatatatattatacatactctccttactttatttcagttaccatccccatagaatttgacaagaattgctatgactgaaaggttttcgagtcctaattaaaactttatttatggcagtattcataattagcctgaaatgcattctgtaggtaatctctgagtttctggaatattttcttagactttttggatgtgcagcagcttacatgtctgaagttacttgaaggcatcacttttaagaaagcttacagttgggccctgtaccatcccaagtcctttgtagctcctcttgaacatgtttgccatacttttaaaagggtagttgaataaatagcatcaccattctttgctgtggcacaggttataaacttaagtggagtttaccggcagcatcaaatgtttcagctttaaaaaataaaagtagggtacaagtttaatgtttagttctagaaattttgtgcaatatgttcataacgatggctgtggttgccacaaagtgcctcgtttacctttaaatactgttaatgtgtcatgcatgcagatggaaggggtggaactgtgcactaaagtgggggctttaactgtagtatttggcagagttgccttctacctgccagttcaaaagttcaacctgttttcatatagaatatatatactaaaaaatttcagtctgttaaacagccttactctgattcagcctcttcagatactcttgtgctgtgcagcagtggctctgtgtgtaaatgctatgcactgaggatacacaaaaataccaatatgatgtgtacaggataatgcctcatcccaatcagatgtccatttgttattgtgtttgttaacaaccctttatctcttagtgttataaactccacttaaaactgattaaagtctcattcttgtca

SEQ ID NO: 317095 - DNA, 2331 bp, Homo sapiens
tgccccctcctaccgccccctgccctgccctgccctcccctcgcccggcgcggtcccgtccgcctctcgctcgcctcccgcctcccctcggtcttccgaggcgcccgggctcccggcgcggcggcggagggggcgggcaggccggcgggcggtgatgtggcgggactctttatgcgctgcggcaggatacgcgctcggcgctgggacgcgactgcgctcagttctctcctctcggaagctgcagccatgatggaagtttgagagttgagccgctgtgaggcgaggccgggctcaggcgagggagatgagagacggcggcggccgcggcccggagcccctctcagcgcctgtgagcagccgcgggggcagcgccctcggggagccggccggcctgcggcggcggcagcggcggcgtttctcgcctcctcttcgtcttttctaaccgtgcagcctcttcctcggcttctcctgaaagggaaggtggaagccgtgggctcgggcgggagccggctgaggcgcggcggcggcggcggcacctcccgctcctggagcgggggggagaagcggcggcggcggcggccgcggcggctgcagctccagggagggggtctgagtcgcctgtcaccatttccagggctgggaacgccggagagttggtctctccccttctactgcctccaacacggcggcggcggcggcggcacatccagggacccgggccggttttaaacctcccgtccgccgccgccgcaccccccgtggcccgggctccggaggccgccggcggaggcagccgttcggaggattattcgtcttctccccattccgctgccgccgctgccaggcctctggctgctgaggagaagcaggcccagtcgctgcaaccatccagcagccgccgcagcagccattacccggctgcggtccagagccaagcggcggcagagcgaggggcatcagctaccgccaagtccagagccatttccatcctgcagaagaagccccgccaccagcagcttctgccatctctctcctcctttttcttcagccacaggctcccagacatgacagccatcatcaaagagatcgttagcagaaacaaaaggagatatcaagaggatggattcgacttagacttgacctatatttatccaaacattattgctatgggatttcctgcagaaagacttgaaggcgtatacaggaacaatattgatgatgtagtaaggtttttggattcaaagcataaaaaccattacaagatatacaatctttgtgctgaaagacattatgacaccgccaaatttaattgcagagttgcacaatatccttttgaagaccataacccaccacagctagaacttatcaaacccttttgtgaagatcttgaccaatggctaagtgaagatgacaatcatgttgcagcaattcactgtaaagctggaaagggacgaactggtgtaatgatatgtgcatatttattacatcggggcaaatttttaaaggcacaagaggccctagatttctatggggaagtaaggaccagagacaaaaagggagtaactattcccagtcagaggcgctatgtgtattattatagctacctgttaaagaatcatctggattatagaccagtggcactgttgtttcacaagatgatgtttgaaactattccaatgttcagtggcggaacttgcaatcctcagtttgtggtctgccagctaaaggtgaagatatattcctccaattcaggacccacacgacgggaagacaagttcatgtactttgagttccctcagccgttacctgtgtgtggtgatatcaaagtagagttcttccacaaacagaacaagatgctaaaaaaggacaaaatgtttcacttttgggtaaatacattcttcataccaggaccagaggaaacctcagaaaaagtagaaaatggaagtctatgtgatcaagaaatcgatagcatttgcagtatagagcgtgcagataatgacaaggaatatctagtacttactttaacaaaaaatgatcttgacaaagcaaataaagacaaagccaaccgatacttttctccaaattttaaggtgaagctgtacttcacaaaaacagtagaggagccgtcaaatccagaggctagcagttcaacttctgtaacaccagatgttagtgacaatgaacctgatcattatagatattctgacaccactgactctgatccagagaatgaaccttttgatgaagatcagcatacacaaattacaaaagtctgaatttttttttatcaagagggataaaacaccatgaaaataaacttgaataaactga

SEQ ID NO: 317096 - DNA, 3794 bp, Homo sapiens
tgccccctcctaccgccccctgccctgccctgccctcccctcgcccggcgcggtcccgtccgcctctcgctcgcctcccgcctcccctcggtcttccgaggcgcccgggctcccggcgcggcggcggagggggcgggcaggccggcgggcggtgatgtggcgggactctttatgcgctgcggcaggatacgcgctcggcgctgggacgcgactgcgctcagttctctcctctcggaagctgcagccatgatggaagtttgagagttgagccgctgtgaggcgaggccgggctcaggcgagggagatgagagacggcggcggccgcggcccggagcccctctcagcgcctgtgagcagccgcgggggcagcgccctcggggagccggccggcctgcggcggcggcagcggcggcgtttctcgcctcctcttcgtcttttctaaccgtgcagcctcttcctcggcttctcctgaaagggaaggtggaagccgtgggctcgggcgggagccggctgaggcgcggcggcggcggcggcacctcccgctcctggagcgggggggagaagcggcggcggcggcggccgcggcggctgcagctccagggagggggtctgagtcgcctgtcaccatttccagggctgggaacgccggagagttggtctctccccttctactgcctccaacacggcggcggcggcggcggcacatccagggacccgggccggttttaaacctcccgtccgccgccgccgcaccccccgtggcccgggctccggaggccgccggcggaggcagccgttcggaggattattcgtcttctccccattccgctgccgccgctgccaggcctctggctgctgaggagaagcaggcccagtcgctgcaaccatccagcagccgccgcagcagccattacccggctgcggtccagagccaagcggcggcagagcgaggggcatcagctaccgccaagtccagagccatttccatcctgcagaagaagccccgccaccagcagcttctgccatctctctcctcctttttcttcagccacaggctcccagacatgacagccatcatcaaagagatcgttagcagaaacaaaaggagatatcaagaggatggattcgacttagacttgacctatatttatccaaacattattgctatgggatttcctgcagaaagacttgaaggcgtatacaggaacaatattgatgatgtagtaaggtttttggattcaaagcataaaaaccattacaagatatacaatctttgtgctgaaagacattatgacaccgccaaatttaattgcagagttgcacaatatccttttgaagaccataacccaccacagctagaacttatcaaacccttttgtgaagatcttgaccaatggctaagtgaagatgacaatcatgttgcagcaattcactgtaaagctggaaagggacgaactggtgtaatgatatgtgcatatttattacatcggggcaaatttttaaaggcacaagaggccctagatttctatggggaagtaaggaccagagacaaaaagggagtaactattcccagtcagaggcgctatgtgtattattatagctacctgttaaagaatcatctggattatagaccagtggcactgttgtttcacaagatgatgtttgaaactattccaatgttcagtggcggaacttgcaatcctcagtttgtggtctgccagctaaaggtgaagatatattcctccaattcaggacccacacgacgggaagacaagttcatgtactttgagttccctcagccgttacctgtgtgtggtgatatcaaagtagagttcttccacaaacagaacaagatgctaaaaaaggacaaaatgtttcacttttgggtaaatacattcttcataccaggaccagaggaaacctcagaaaaagtagaaaatggaagtctatgtgatcaagaaatcgatagcatttgcagtatagagcgtgcagataatgacaaggaatatctagtacttactttaacaaaaaatgatcttgacaaagcaaataaagacaaagccaaccgatacttttctccaaattttaaggtgaagctgtacttcacaaaaacagtagaggagccgtcaaatccagaggctagcagttcaacttctgtaacaccagatgttagtgacaatgaacctgatcattatagatattctgacaccactgactctgatccagagaatgaaccttttgatgaagatcagcatacacaaattacaaaagtctgaatttttttttatcaagagggataaaacaccatgaaaataaacttgaataaactgaaaatggacctttttttttttaatggcaataggacattgtgtcagattaccagttataggaacaattctcttttcctgaccaatcttgttttaccctatacatccacagggttttgacacttgttgtccagttgaaaaaaggttgtgtagctgtgtcatgtatatacctttttgtgtcaaaaggacatttaaaattcaattaggattaataaagatggcactttcccgttttattccagttttataaaaagtggagacagactgatgtgtatacgtaggaattttttccttttgtgttctgtcaccaactgaagtggctaaagagctttgtgatatactggttcacatcctacccctttgcacttgtggcaacagataagtttgcagttggctaagagaggtttccgaagggttttgctacattctaatgcatgtattcgggttaggggaatggagggaatgctcagaaaggaaataattttatgctggactctggaccatataccatctccagctatttacacacacctttctttagcatgctacagttattaatctggacattcgaggaattggccgctgtcactgcttgttgtttgcgcatttttttttaaagcatattggtgctagaaaaggcagctaaaggaagtgaatctgtattggggtacaggaatgaaccttctgcaacatcttaagatccacaaatgaagggatataaaaataatgtcataggtaagaaacacagcaacaatgacttaaccatataaatgtggaggctatcaacaaagaatgggcttgaaacattataaaaattgacaatgatttattaaatatgttttctcaattgtaacgacttctccatctcctgtgtaatcaaggccagtgctaaaattcagatgctgttagtacctacatcagtcaacaacttacacttattttactagttttcaatcataatacctgctgtggatgcttcatgtgctgcctgcaagcttcttttttctcattaaatataaaatattttgtaatgctgcacagaaattttcaatttgagattctacagtaagcgttttttttctttgaagatttatgatgcacttattcaatagctgtcagccgttccacccttttgaccttacacattctattacaatgaattttgcagttttgcacattttttaaatgtcattaactgttagggaattttacttgaatactgaatacatataatgtttatattaaaaaggacatttgtgttaaaaaggaaattagagttgcagtaaactttcaatgctgcacacaaaaaaaagaccaggtctacagtgatagagcaaagcatcaagaatctttaagggaggttcaacaacaaaacaacatcacaaaaaaccttttggggcgcccttggcctcgaaaatttttagaaccttctgttgggcgccgcgcgcccccctaggttatgcgcaa

SEQ ID NO: 317097 - DNA, 2575 bp, Homo sapiens
tgccccctcctaccgccccctgccctgccctgccctcccctcgcccggcgcggtcccgtccgcctctcgctcgcctcccgcctcccctcggtcttccgaggcgcccgggctcccggcgcggcggcggagggggcgggcaggccggcgggcggtgatgtggcgggactctttatgcgctgcggcaggatacgcgctcggcgctgggacgcgactgcgctcagttctctcctctcggaagctgcagccatgatggaagtttgagagttgagccgctgtgaggcgaggccgggctcaggcgagggagatgagagacggcggcggccgcggcccggagcccctctcagcgcctgtgagcagccgcgggggcagcgccctcggggagccggccggcctgcggcggcggcagcggcggcgtttctcgcctcctcttcgtcttttctaaccgtgcagcctcttcctcggcttctcctgaaagggaaggtggaagccgtgggctcgggcgggagccggctgaggcgcggcggcggcggcggcacctcccgctcctggagcgggggggagaagcggcggcggcggcggccgcggcggctgcagctccagggagggggtctgagtcgcctgtcaccatttccagggctgggaacgccggagagttggtctctccccttctactgcctccaacacggcggcggcggcggcggcacatccagggacccgggccggttttaaacctcccgtccgccgccgccgcaccccccgtggcccgggctccggaggccgccggcggaggcagccgttcggaggattattcgtcttctccccattccgctgccgccgctgccaggcctctggctgctgaggagaagcaggcccagtcgctgcaaccatccagcagccgccgcagcagccattacccggctgcggtccagagccaagcggcggcagagcgaggggcatcagctaccgccaagtccagagccatttccatcctgcagaagaagccccgccaccagcagcttctgccatctctctcctcctttttcttcagccacaggctcccagacatgacagccatcatcaaagagatcgttagcagaaacaaaaggagatatcaagaggatggattcgacttagacttgacctatatttatccaaacattattgctatgggatttcctgcagaaagacttgaaggcgtatacaggaacaatattgatgatgtagtaaggtttttggattcaaagcataaaaaccattacaagatatacaatctttgtgctgaaagacattatgacaccgccaaatttaattgcagagttgcacaatatccttttgaagaccataacccaccacagctagaacttatcaaacccttttgtgaagatcttgaccaatggctaagtgaagatgacaatcatgttgcagcaattcactgtaaagctggaaagggacgaactggtgtaatgatatgtgcatatttattacatcggggcaaatttttaaaggcacaagaggccctagatttctatggggaagtaaggaccagagacaaaaagggagtaactattcccagtcagaggcgctatgtgtattattatagctacctgttaaagaatcatctggattatagaccagtggcactgttgtttcacaagatgatgtttgaaactattccaatgttcagtggcggaacttgcaatcctcagtttgtggtctgccagctaaaggtgaagatatattcctccaattcaggacccacacgacgggaagacaagttcatgtactttgagttccctcagccgttacctgtgtgtggtgatatcaaagtagagttcttccacaaacagaacaagatgctaaaaaaggacaaaatgtttcacttttgggtaaatacattcttcataccaggaccagaggaaacctcagaaaaagtagaaaatggaagtctatgtgatcaagaaatcgatagcatttgcagtatagagcgtgcagataatgacaaggaatatctagtacttactttaacaaaaaatgatcttgacaaagcaaataaagacaaagccaaccgatacttttctccaaattttaaggtgaagctgtacttcacaaaaacagtagaggagccgtcaaatccagaggctagcagttcaacttctgtaacaccagatgttagtgacaatgaacctgatcattatagatattctgacaccactgactctgatccagagaatgaaccttttgatgaagatcagcatacacaaattacaaaagtctgaatttttttttatcaagagggataaaacaccatgaaaataaacttgaataaactgaaaatggacctttttttttttaatggcaataggacattgtgtcagattaccagttataggaacaattctcttttcctgaccaatcttgttttaccctatacatccacagggttttgacacttgttgtccagttgaaaaaaggttgtgtagctgtgtcatgtatatacctttttgtgtcaaaaggacatttaaaattcaattaggattaataaagatggcactttcccgttttattccagttttat

SEQ ID NO: 317098 - DNA, 4628 bp, Homo sapiens
  misc_feature (7)..(7): n is a, c, g, or t
  misc_feature (11)..(12): n is a, c, g, or t
  misc_feature (36)..(36): n is a, c, g, or t
  misc_feature (2841)..(2841): n is a, c, g, or t
catagcngcanngactctcttatttccaccgctcangtgtgggttagttatctctggagtttggccccctttttctctatcatgtgctcatgccctcttttgccatgtgatgccttctaccatgttatgatgcatccagaagactctcaccacatgcagccccttgatcttagacttctcagcttctagaactatatttatccaaacattattgctatgggatttcctgcagaaagacttgaaggcgtatacaggaacaatattgatgatgtagtaaggtttttggattcaaagcataaaaaccattacaagatatacaatctttgtgctgaaagacattatgacaccgccaaatttaattgcagagttgcacaatatccttttgaagaccataacccaccacagctagaacttatcaaacccttttgtgaagatcttgaccaatggctaagtgaagatgacaatcatgttgcagcaattcactgtaaagctggaaagggacgaactggtgtaatgatatgtgcatatttattacatcggggcaaatttttaaaggcacaagaggccctagatttctatggggaagtaaggaccagagacaaaaagggagtaactattcccagtcagaggcgctatgtgtattattatagctacctgttaaagaatcatctggattatagaccagtggcactgttgtttcacaagatgatgtttgaaactattccaatgttcagtggcggaacttgcaatcctcagtttgtggtctgccagctaaaggtgaagatatattcctccaattcaggacccacacgacgggaagacaagttcatgtactttgagttccctcagccgttacctgtgtgtggtgatatcaaagtagagttcttccacaaacagaacaagatgctaaaaaaggacaaaatgtttcacttttgggtaaatacattcttcataccaggaccagaggaaacctcagaaaaagtagaaaatggaagtctatgtgatcaagaaatcgatagcatttgcagtatagagcgtgcagataatgacaaggaatatctagtacttactttaacaaaaaatgatcttgacaaagcaaataaagacaaagccaaccgatacttttctccaaattttaaggtgaagctgtacttcacaaaaacagtagaggagccgtcaaatccagaggctagcagttcaacttctgtaacaccagatgttagtgacaatgaacctgatcattatagatattctgacaccactgactctgatccagagaatgaaccttttgatgaagatcagcatacacaaattacaaaagtctgaatttttttttatcaagagggataaaacaccatgaaaataaacttgaataaactgaaaatggacctttttttttttaatggcaataggacattgtgtcagattaccagttataggaacaattctcttttcctgaccaatcttgttttaccctatacatccacagggttttgacacttgttgtccagttgaaaaaaggttgtgtagctgtgtcatgtatatacctttttgtgtcaaaaggacatttaaaattcaattaggattaataaagatggcactttcccgttttattccagttttataaaaagtggagacagactgatgtgtatacgtaggaattttttccttttgtgttctgtcaccaactgaagtggctaaagagctttgtgatatactggttcacatcctacccctttgcacttgtggcaacagataagtttgcagttggctaagagaggtttccgaagggttttgctacattctaatgcatgtattcgggttaggggaatggagggaatgctcagaaaggaaataattttatgctggactctggaccatataccatctccagctatttacacacacctttctttagcatgctacagttattaatctggacattcgaggaattggccgctgtcactgcttgttgtttgcgcatttttttttaaagcatattggtgctagaaaaggcagctaaaggaagtgaatctgtattggggtacaggaatgaaccttctgcaacatcttaagatccacaaatgaagggatataaaaataatgtcataggtaagaaacacagcaacaatgacttaaccatataaatgtggaggctatcaacaaagaatgggcttgaaacattataaaaattgacaatgatttattaaatatgttttctcaattgtaacgacttctccatctcctgtgtaatcaaggccagtgctaaaattcagatgctgttagtacctacatcagtcaacaacttacacttattttactagttttcaatcataatacctgctgtggatgcttcatgtgctgcctgcaagcttcttttttctcattaaatataaaatattttgtaatgctgcacagaaattttcaatttgagattctacagtaagcgttttttttctttgaagatttatgatgcacttattcaatagctgtcagccgttccacccttttgaccttacacattctattacaatgaattttgcagttttgcacattttttaaatgtcattaactgttagggaattttacttgaatactgaatacatataatgtttatattaaaaaggacatttgtgttaaaaaggaaattagagttgcagtaaactttcaatgctgcacacaaaaaaaagacatttgatttttcagtagaaattgtcctacatgtgctttattgatttgctattgaaagaatagggttttttttttttttttttttttttttttaaatgtgcagtgttgaatcatttcttcatagtgctcccccgagttgggactagggcntcaatttcacttcttaaaaaaaatcatcatatatttgatatgcccagactgcatacgattttaagcggagtacaactactattgtaaagctaatgtgaagatattattaaaaaggtttttttttccagaaatttggtgtcttcaaattataccttcaccttgacatttgaatatccagccattttgtttcttaatggtataaaattccattttcaataacttattggtgctgaaattgttcactagctgtggtctgacctagttaatttacaaatacagattgaataggacctactagagcagcatttatagagtttgatggcaaatagattaggcagaacttcatctaaaatattcttagtaaataatgttgacacgttttccataccttgtcagtttcattcaacaatttttaaatttttaacaaagctcttaggatttacacatttatatttaaacattgatatatagagtattgattgattgctcataagttaaattggtaaagttagagacaactattctaacacctcaccattgaaatttatatgccaccttgtctttcataaaagctgaaaattgttacctaaaatgaaaatcaacttcatgttttgaagatagttataaatattgttctttgttacaatttcgggcaccgcatattaaaacgtaactttattgttccaatatgtaacatggagggccaggtcataaataatgacattataatgggcttttgcactgttattatttttcctttggaatgtgaaggtctgaatgagggttttgattttgaatgtttcaatgtttttgagaagccttgcttacattttatggtgtagtcattggaaatggaaaaatggcattatatatattatatatataaatatatattatacatactctccttactttatttcagttaccatccccatagaatttgacaagaattgctatgactgaaaggttttcgagtcctaattaaaactttatttatggcagtattcataattagcctgaaatgcattctgtaggtaatctctgagtttctggaatattttcttagactttttggatgtgcagcagcttacatgtctgaagttacttgaaggcatcacttttaagaaagcttacagttgggccctgtaccatcccaagtcctttgtagctcctcttgaacatgtttgccatacttttaaaagggtagttgaataaatagcatcaccattctttgctgtggcacaggttataaacttaagtggagtttaccggcagcatcaaatgtttcagctttaaaaaataaaagtagggtacaagtttaatgtttagttctagaaattttgtgcaatatgttcataacgatggctgtggttgccacaaagtgcctcgtttacctttaaatactgttaatgtgtcatgcatgcagatggaaggggtggaactgtgcactaaagtgggggctttaactgtagtatttggcagagttgccttctacctgccagttcaaaagttcaacctgttttcatatagaatatatatactaaaaaatttcagtctgttaaacagccttactctgattcagcctcttcagatactcttgtgctgtgcagcagtggctctgtgtgtaaatgctatgcactgaggatacacaaaaataccaatatgatgtgtacaggataatgcctcatcccaatcagatgtccatttgttattgtgtttgttaacaaccctttatctcttagtgttataaactccacttaaaactgattaaagtctcattcttgtca

SEQ ID NO: 317099 - DNA, 2277 bp, Homo sapiens
tgccccctcctaccgccccctgccctgccctgccctcccctcgcccggcgcggtcccgtccgcctctcgctcgcctcccgcctcccctcggtcttccgaggcgcccgggctcccggcgcggcggcggagggggcgggcaggccggcgggcggtgatgtggcgggactctttatgcgctgcggcaggatacgcgctcggcgctgggacgcgactgcgctcagttctctcctctcggaagctgcagccatgatggaagtttgagagttgagccgctgtgaggcgaggccgggctcaggcgagggagatgagagacggcggcggccgcggcccggagcccctctcagcgcctgtgagcagccgcgggggcagcgccctcggggagccggccggcctgcggcggcggcagcggcggcgtttctcgcctcctcttcgtcttttctaaccgtgcagcctcttcctcggcttctcctgaaagggaaggtggaagccgtgggctcgggcgggagccggctgaggcgcggcggcggcggcggcacctcccgctcctggagcgggggggagaagcggcggcggcggcggccgcggcggctgcagctccagggagggggtctgagtcgcctgtcaccatttccagggctgggaacgccggagagttggtctctccccttctactgcctccaacacggcggcggcggcggcggcacatccagggacccgggccggttttaaacctcccgtccgccgccgccgcaccccccgtggcccgggctccggaggccgccggcggaggcagccgttcggaggattattcgtcttctccccattccgctgccgccgctgccaggcctctggctgctgaggagaagcaggcccagtcgctgcaaccatccagcagccgccgcagcagccattacccggctgcggtccagagccaagcggcggcagagcgaggggcatcagctaccgccaagtccagagccatttccatcctgcagaagaagccccgccaccagcagcttctgccatctctctcctcctttttcttcagccacaggctcccagacatgacagccatcatcaaagagatcgttagcagaaacaaaaggagatatcaagaggatggattcgacttagacttgacctatatttatccaaacattattgctatgggatttcctgcagaaagacttgaaggcgtatacaggaacaatattgatgatgtagtaaggtttttggattcaaagcataaaaaccattacaagatatacaatctttgtgctgaaagacattatgacaccgccaaatttaattgcagagttgcacaatatccttttgaagaccataacccaccacagctagaacttatcaaacccttttgtgaagatcttgaccaatggctaagtgaagatgacaatcatgttgcagcaattcactgtaaagctggaaagggacgaactggtgtaatgatatgtgcatatttattacatcggggcaaatttttaaaggcacaagaggccctagatttctatggggaagtaaggaccagagacaaaaagggagtaactattcccagtcagaggcgctatgtgtattattatagctacctgttaaagaatcatctggattatagaccagtggcactgttgtttcacaagatgatgtttgaaactattccaatgttcagtggcggaacttgcaatcctcagtttgtggtctgccagctaaaggtgaagatatattcctccaattcaggacccacacgacgggaagacaagttcatgtactttgagttccctcagccgttacctgtgtgtggtgatatcaaagtagagttcttccacaaacagaacaagatgctaaaaaaggacaaaatgtttcacttttgggtaaatacattcttcataccaggaccagaggaaacctcagaaaaagtagaaaatggaagtctatgtgatcaagaaatcgatagcatttgcagtatagagcgtgcagataatgacaaggaatatctagtacttactttaacaaaaaatgatcttgacaaagcaaataaagacaaagccaaccgatacttttctccaaattttaaggtcagttaaattaaacattttgtgggggttggtgacttgtatgtatgtgatgtgtgtttaattctaggagtacagctgatgaagaacttgcttgacaagtttttaacttatgtattatttcgaagcagtgtttacgtagcagtaacatgaaagtttctaataaaatacccaatgtacacagcgtcaa

SEQ ID NO: 317100 - DNA, 1793 bp, Homo sapiens
tgccccctcctaccgccccctgccctgccctgccctcccctcgcccggcgcggtcccgtccgcctctcgctcgcctcccgcctcccctcggtcttccgaggcgcccgggctcccggcgcggcggcggagggggcgggcaggccggcgggcggtgatgtggcgggactctttatgcgctgcggcaggatacgcgctcggcgctgggacgcgactgcgctcagttctctcctctcggaagctgcagccatgatggaagtttgagagttgagccgctgtgaggcgaggccgggctcaggcgagggagatgagagacggcggcggccgcggcccggagcccctctcagcgcctgtgagcagccgcgggggcagcgccctcggggagccggccggcctgcggcggcggcagcggcggcgtttctcgcctcctcttcgtcttttctaaccgtgcagcctcttcctcggcttctcctgaaagggaaggtggaagccgtgggctcgggcgggagccggctgaggcgcggcggcggcggcggcacctcccgctcctggagcgggggggagaagcggcggcggcggcggccgcggcggctgcagctccagggagggggtctgagtcgcctgtcaccatttccagggctgggaacgccggagagttggtctctccccttctactgcctccaacacggcggcggcggcggcggcacatccagggacccgggccggttttaaacctcccgtccgccgccgccgcaccccccgtggcccgggctccggaggccgccggcggaggcagccgttcggaggattattcgtcttctccccattccgctgccgccgctgccaggcctctggctgctgaggagaagcaggcccagtcgctgcaaccatccagcagccgccgcagcagccattacccggctgcggtccagagccaagcggcggcagagcgaggggcatcagctaccgccaagtccagagccatttccatcctgcagaagaagccccgccaccagcagcttctgccatctctctcctcctttttcttcagccacaggctcccagacatgacagccatcatcaaagagatcgttagcagaaacaaaaggagatatcaagaggatggattcgacttagacttgacctatatttatccaaacattattgctatgggatttcctgcagaaagacttgaaggcgtatacaggaacaatattgatgatgtagtaaggtttttggattcaaagcataaaaaccattacaagatatacaatctttgtgctgaaagacattatgacaccgccaaatttaattgcagagttgcacaatatccttttgaagaccataacccaccacagctagaacttatcaaacccttttgtgaagatcttgaccaatggctaagtgaagatgacaatcatgttgcagcaattcactgtaaagctggaaagggacgaactggtgtaatgatatgtgcatatttattacatcggggcaaatttttaaaggcacaagaggccctagatttctatggggaagtaaggaccagagacaaaaagggtaagttattttttgatgtttttcctttcctcttcctggatctgagaatttattggaaaacagattttgggtttctttttttccttcagttttattgaggtgtaattgacaagtaaaaattatatataaatacaatgtataatatgatgttttgatgtatgtgtatatacattgtgaaatgattactacagtcaaactacttaacatattcatcacctcacataattattattctc

SEQ ID NO: 317101 - DNA, 1453 bp, Homo sapiens
tgccccctcctaccgccccctgccctgccctgccctcccctcgcccggcgcggtcccgtccgcctctcgctcgcctcccgcctcccctcggtcttccgaggcgcccgggctcccggcgcggcggcggagggggcgggcaggccggcgggcggtgatgtggcgggactctttatgcgctgcggcaggatacgcgctcggcgctgggacgcgactgcgctcagttctctcctctcggaagctgcagccatgatggaagtttgagagttgagccgctgtgaggcgaggccgggctcaggcgagggagatgagagacggcggcggccgcggcccggagcccctctcagcgcctgtgagcagccgcgggggcagcgccctcggggagccggccggcctgcggcggcggcagcggcggcgtttctcgcctcctcttcgtcttttctaaccgtgcagcctcttcctcggcttctcctgaaagggaaggtggaagccgtgggctcgggcgggagccggctgaggcgcggcggcggcggcggcacctcccgctcctggagcgggggggagaagcggcggcggcggcggccgcggcggctgcagctccagggagggggtctgagtcgcctgtcaccatttccagggctgggaacgccggagagttggtctctccccttctactgcctccaacacggcggcggcggcggcggcacatccagggacccgggccggttttaaacctcccgtccgccgccgccgcaccccccgtggcccgggctccggaggccgccggcggaggcagccgttcggaggattattcgtcttctccccattccgctgccgccgctgccaggcctctggctgctgaggagaagcaggcccagtcgctgcaaccatccagcagccgccgcagcagccattacccggctgcggtccagagccaagcggcggcagagcgaggggcatcagctaccgccaagtccagagccatttccatcctgcagaagaagccccgccaccagcagcttctgccatctctctcctcctttttcttcagccacaggctcccagacatgacagccatcatcaaagagatcgttagcagaaacaaaaggagatatcaagaggatggattcgacttagacttgacctatatttatccaaacattattgctatgggatttcctgcagaaagacttgaaggcgtatacaggaacaatattgatgatgtagtaaggtaagaatgctttgattttctatttcaaatattgatgtttatattcatgttgtgttttcatttagaaaagatttctaagccacagaaaaagatactttgtgatgtaaactattattgtagtgctctataatcattttttggcttaccgtacctaatggacttcagggggatacagttcatttgataagaactgaccttatacattacataatcaggtacttatgt

SEQ ID NO: 317102 - DNA, 1532 bp, Homo sapiens
tgccccctcctaccgccccctgccctgccctgccctcccctcgcccggcgcggtcccgtccgcctctcgctcgcctcccgcctcccctcggtcttccgaggcgcccgggctcccggcgcggcggcggagggggcgggcaggccggcgggcggtgatgtggcgggactctttatgcgctgcggcaggatacgcgctcggcgctgggacgcgactgcgctcagttctctcctctcggaagctgcagccatgatggaagtttgagagttgagccgctgtgaggcgaggccgggctcaggcgagggagatgagagacggcggcggccgcggcccggagcccctctcagcgcctgtgagcagccgcgggggcagcgccctcggggagccggccggcctgcggcggcggcagcggcggcgtttctcgcctcctcttcgtcttttctaaccgtgcagcctcttcctcggcttctcctgaaagggaaggtggaagccgtgggctcgggcgggagccggctgaggcgcggcggcggcggcggcacctcccgctcctggagcgggggggagaagcggcggcggcggcggccgcggcggctgcagctccagggagggggtctgagtcgcctgtcaccatttccagggctgggaacgccggagagttggtctctccccttctactgcctccaacacggcggcggcggcggcggcacatccagggacccgggccggttttaaacctcccgtccgccgccgccgcaccccccgtggcccgggctccggaggccgccggcggaggcagccgttcggaggattattcgtcttctccccattccgctgccgccgctgccaggcctctggctgctgaggagaagcaggcccagtcgctgcaaccatccagcagccgccgcagcagccattacccggctgcggtccagagccaagcggcggcagagcgaggggcatcagctaccgccaagtccagagccatttccatcctgcagaagaagccccgccaccagcagcttctgccatctctctcctcctttttcttcagccacaggctcccagacatgacagccatcatcaaagagatcgttagcagaaacaaaaggagatatcaagaggatggattcgacttagacttgacctgtttttacatgtgagctgtgacatgactggcattttctttgatttcagcgtatgttggtctctacacatgaaatttgtgtgacttaaaactttctctaaaactgtacttttagttatgatatgcatagaaagcagtatcaaatattgcgtcaaatgactaataacacttaatttctagagttgtggttttattgagccaaaagttgatatgaaaaaaagtcagtaaggaaagtcagtgaagtgcttgcttttttgataattgcactcccaataattttgatattccaacgtacttggtttgcttgttttcacgttaatgttttctgtttattggagtgggaaggcattaaaattgtcattgaagactttgtctttgaaaaaaagtagta

SEQ ID NO: 317103 - DNA, 607 bp, Homo sapiens
  misc_feature (90)..(90): n is a, c, g, or t
  misc_feature (94)..(94): n is a, c, g, or t
  misc_feature (102)..(102): n is a, c, g, or t
  misc_feature (105)..(105): n is a, c, g, or t
acacgtgcgctcaaacaattacttggcagacaactctatttggcaattctagaagctaggatgtacagatataatcctgcccaggaaganctcngattgatnagnggtgtgtgtgtgtgtgtgtctgtgtctgtgtgtgtgtgtgtgtgtgtgtctgtgtgtgtgtgaatttgattttcaagagtgctagacttccaatttgagagattaaataatttaattcaggcaaacatttttcattggaatttcacagttcattgtaatgaaaatgttaatcctggatgacctttgacatacagtaatgaatcttggatattaatgaatttgttagtagcatcttgatgtgtgttttaatgagttattttcaaagttgtgcattaaaccaaagttggcatactggaagtgtttatatcaagttccatttggctactgatggacaaaaaatagaaatgccttcctatggagagtatttttcctttaaaaaattaaaaaggttaattattttgacaaaaaaacaacaagacaacacaaccacaccagagagaagaaacccaaaacatccaaaacaacaaaacaagggggggggcgaataaacaccgggggccaa

SEQ ID NO: 317104 - DNA, 496 bp, Homo sapiens
tattcggttttaaactttttattcaacaaataccaagtccctgctgtatatatgggtttggaatacattagtgatcaaaacacaccctctatccctgcccttgaagagtttacactccagtagaggaaacagaatttacattaacaattataaattgtgatacatgctgtggaaagtgaggtgcatgtgataatggttatcaaacattatgctccccaaaatttccatcaccttgcagttgaatgaggcctatgtaactagtttattctaatgtaatacagaaagtagtgtgacactccactttctgtaaaggcaatgaaaaaaatttaccatccagtttcttcccctactgctgtgattaaggattttgcatgttctagatggtgcagctttgtcagcctgggtcttgagtgatactggagcagaactccctcaaattgttccttctgccacgctaaacttgttagatattagcataaataagaaataaaccatt

SEQ ID NO: 317105 - DNA, 196 bp, Homo sapiens
tttttttttttttttacaagttgcagatttgttgccaaatgaacgagtttgtagtattgctaacaaggagaagaattactagcaagtcttgatgttacttttgaagagtgtgatgattgcatttaggaagatatctaaacttctgtttcaaagcaaaaagtatgtgcaaatttcttactcatgacaaattcatata

SEQ ID NO: 317106 - DNA, 5524 bp, Homo sapiens
  misc_feature (3737)..(3737): n is a, c, g, or t
tgccccctcctaccgccccctgccctgccctgccctcccctcgcccggcgcggtcccgtccgcctctcgctcgcctcccgcctcccctcggtcttccgaggcgcccgggctcccggcgcggcggcggagggggcgggcaggccggcgggcggtgatgtggcgggactctttatgcgctgcggcaggatacgcgctcggcgctgggacgcgactgcgctcagttctctcctctcggaagctgcagccatgatggaagtttgagagttgagccgctgtgaggcgaggccgggctcaggcgagggagatgagagacggcggcggccgcggcccggagcccctctcagcgcctgtgagcagccgcgggggcagcgccctcggggagccggccggcctgcggcggcggcagcggcggcgtttctcgcctcctcttcgtcttttctaaccgtgcagcctcttcctcggcttctcctgaaagggaaggtggaagccgtgggctcgggcgggagccggctgaggcgcggcggcggcggcggcacctcccgctcctggagcgggggggagaagcggcggcggcggcggccgcggcggctgcagctccagggagggggtctgagtcgcctgtcaccatttccagggctgggaacgccggagagttggtctctccccttctactgcctccaacacggcggcggcggcggcggcacatccagggacccgggccggttttaaacctcccgtccgccgccgccgcaccccccgtggcccgggctccggaggccgccggcggaggcagccgttcggaggattattcgtcttctccccattccgctgccgccgctgccaggcctctggctgctgaggagaagcaggcccagtcgctgcaaccatccagcagccgccgcagcagccattacccggctgcggtccagagccaagcggcggcagagcgaggggcatcagctaccgccaagtccagagccatttccatcctgcagaagaagccccgccaccagcagcttctgccatctctctcctcctttttcttcagccacaggctcccagacatgacagccatcatcaaagagatcgttagcagaaacaaaaggagatatcaagaggatggattcgacttagacttgacctatatttatccaaacattattgctatgggatttcctgcagaaagacttgaaggcgtatacaggaacaatattgatgatgtagtaaggtttttggattcaaagcataaaaaccattacaagatatacaatctttgtgctgaaagacattatgacaccgccaaatttaattgcagagttgcacaatatccttttgaagaccataacccaccacagctagaacttatcaaacccttttgtgaagatcttgaccaatggctaagtgaagatgacaatcatgttgcagcaattcactgtaaagctggaaagggacgaactggtgtaatgatatgtgcatatttattacatcggggcaaatttttaaaggcacaagaggccctagatttctatggggaagtaaggaccagagacaaaaagggagtaactattcccagtcagaggcgctatgtgtattattatagctacctgttaaagaatcatctggattatagaccagtggcactgttgtttcacaagatgatgtttgaaactattccaatgttcagtggcggaacttgcaatcctcagtttgtggtctgccagctaaaggtgaagatatattcctccaattcaggacccacacgacgggaagacaagttcatgtactttgagttccctcagccgttacctgtgtgtggtgatatcaaagtagagttcttccacaaacagaacaagatgctaaaaaaggacaaaatgtttcacttttgggtaaatacattcttcataccaggaccagaggaaacctcagaaaaagtagaaaatggaagtctatgtgatcaagaaatcgatagcatttgcagtatagagcgtgcagataatgacaaggaatatctagtacttactttaacaaaaaatgatcttgacaaagcaaataaagacaaagccaaccgatacttttctccaaattttaaggtgaagctgtacttcacaaaaacagtagaggagccgtcaaatccagaggctagcagttcaacttctgtaacaccagatgttagtgacaatgaacctgatcattatagatattctgacaccactgactctgatccagagaatgaaccttttgatgaagatcagcatacacaaattacaaaagtctgaatttttttttatcaagagggataaaacaccatgaaaataaacttgaataaactgaaaatggacctttttttttttaatggcaataggacattgtgtcagattaccagttataggaacaattctcttttcctgaccaatcttgttttaccctatacatccacagggttttgacacttgttgtccagttgaaaaaaggttgtgtagctgtgtcatgtatatacctttttgtgtcaaaaggacatttaaaattcaattaggattaataaagatggcactttcccgttttattccagttttattgtcaccaactgaagtggctaaagagctttgtgatatactggttcacatcctacccctttgcacttgtggcaacagataagtttgcagttggctaagagaggtttccgaagggttttgctacattctaatgcatgtattcgggttaggggaatggagggaatgctcagaaaggaaataattttatgctggactctggaccatataccatctccagctatttacacacacctttctttagcatgctacagttattaatctggacattcgaggaattggccgctgtcactgcttgttgtttgcgcatttttttttaaagcatattggtgctagaaaaggcagctaaaggaagtgaatctgtattggggtacaggaatgaaccttctgcaacatcttaagatccacaaatgaagggatataaaaataatgtcataggtaagaaacacagcaacaatgacttaaccatataaatgtggaggctatcaacaaagaatgggcttgaaacattataaaaattgacaatgatttattaaatatgttttctcaattgtaacgacttctccatctcctgtgtaatcaaggccagtgctaaaattcagatgctgttagtacctacatcagtcaacaacttacacttattttactagttttcaatcataatacctgctgtggatgcttcatgtgctgcctgcaagcttcttttttctcattaaatataaaatattttgtaatgctgcacagaaattttcaatttgagattctacagtaagcgttttttttctttgaagatttatgatgcacttattcaatagctgtcagccgttccacccttttgaccttacacattctattacaatgaattttgcagttttgcacattttttaaatgtcattaactgttagggaattttacttgaatactgaatacatataatgtttatattaaaaaggacatttgtgttaaaaaggaaattagagttgcagtaaactttcaatgctgcacacaaaaaaaagacatttgatttttcagtagaaattgtcctacatgtgctttattgatttgctattgaaagaatagggttttttttttttttttttttttttttttaaatgtgcagtgttgaatcatttcttcatagtgctcccccgagttgggactagggcntcaatttcacttcttaaaaaaaatcatcatatatttgatatgcccagactgcatacgattttaagcggagtacaactactattgtaaagctaatgtgaagatattattaaaaaggtttttttttccagaaatttggtgtcttcaaattataccttcaccttgacatttgaatatccagccattttgtttcttaatggtataaaattccattttcaataacttattggtgctgaaattgttcactagctgtggtctgacctagttaatttacaaatacagattgaataggacctactagagcagcatttatagagtttgatggcaaatagattaggcagaacttcatctaaaatattcttagtaaataatgttgacacgttttccataccttgtcagtttcattcaacaatttttaaatttttaacaaagctcttaggatttacacatttatatttaaacattgatatatagagtattgattgattgctcataagttaaattggtaaagttagagacaactattctaacacctcaccattgaaatttatatgccaccttgtctttcataaaagctgaaaattgttacctaaaatgaaaatcaacttcatgttttgaagatagttataaatattgttctttgttacaatttcgggcaccgcatattaaaacgtaactttattgttccaatatgtaacatggagggccaggtcataaataatgacattataatgggcttttgcactgttattatttttcctttggaatgtgaaggtctgaatgagggttttgattttgaatgtttcaatgtttttgagaagccttgcttacattttatggtgtagtcattggaaatggaaaaatggcattatatatattatatatataaatatatattatacatactctccttactttatttcagttaccatccccatagaatttgacaagaattgctatgactgaaaggttttcgagtcctaattaaaactttatttatggcagtattcataattagcctgaaatgcattctgtaggtaatctctgagtttctggaatattttcttagactttttggatgtgcagcagcttacatgtctgaagttacttgaaggcatcacttttaagaaagcttacagttgggccctgtaccatcccaagtcctttgtagctcctcttgaacatgtttgccatacttttaaaagggtagttgaataaatagcatcaccattctttgctgtggcacaggttataaacttaagtggagtttaccggcagcatcaaatgtttcagctttaaaaaataaaagtagggtacaagtttaatgtttagttctagaaattttgtgcaatatgttcataacgatggctgtggttgccacaaagtgcctcgtttacctttaaatactgttaatgtgtcatgcatgcagatggaaggggtggaactgtgcactaaagtgggggctttaactgtagtatttggcagagttgccttctacctgccagttcaaaagttcaacctgttttcatatagaatatatatactaaaaaatttcagtctgttaaacagccttactctgattcagcctcttcagatactcttgtgctgtgcagcagtggctctgtgtgtaaatgctatgcactgaggatacacaaaaataccaatatgatgtgtacaggataatgcctcatcccaatcagatgtccatttgttattgtgtttgttaacaaccctttatctcttagtgttataaactccacttaaaactgattaaagtctcattcttgtca

SEQ ID NO: 317107 - DNA, 6020 bp, Homo sapiens
  misc_feature (3791)..(3791): n is a, c, g, or t
  misc_feature (6005)..(6006): n is a, c, g, or t
tgccccctcctaccgccccctgccctgccctgccctcccctcgcccggcgcggtcccgtccgcctctcgctcgcctcccgcctcccctcggtcttccgaggcgcccgggctcccggcgcggcggcggagggggcgggcaggccggcgggcggtgatgtggcgggactctttatgcgctgcggcaggatacgcgctcggcgctgggacgcgactgcgctcagttctctcctctcggaagctgcagccatgatggaagtttgagagttgagccgctgtgaggcgaggccgggctcaggcgagggagatgagagacggcggcggccgcggcccggagcccctctcagcgcctgtgagcagccgcgggggcagcgccctcggggagccggccggcctgcggcggcggcagcggcggcgtttctcgcctcctcttcgtcttttctaaccgtgcagcctcttcctcggcttctcctgaaagggaaggtggaagccgtgggctcgggcgggagccggctgaggcgcggcggcggcggcggcacctcccgctcctggagcgggggggagaagcggcggcggcggcggccgcggcggctgcagctccagggagggggtctgagtcgcctgtcaccatttccagggctgggaacgccggagagttggtctctccccttctactgcctccaacacggcggcggcggcggcggcacatccagggacccgggccggttttaaacctcccgtccgccgccgccgcaccccccgtggcccgggctccggaggccgccggcggaggcagccgttcggaggattattcgtcttctccccattccgctgccgccgctgccaggcctctggctgctgaggagaagcaggcccagtcgctgcaaccatccagcagccgccgcagcagccattacccggctgcggtccagagccaagcggcggcagagcgaggggcatcagctaccgccaagtccagagccatttccatcctgcagaagaagccccgccaccagcagcttctgccatctctctcctcctttttcttcagccacaggctcccagacatgacagccatcatcaaagagatcgttagcagaaacaaaaggagatatcaagaggatggattcgacttagacttgacctatatttatccaaacattattgctatgggatttcctgcagaaagacttgaaggcgtatacaggaacaatattgatgatgtagtaaggtttttggattcaaagcataaaaaccattacaagatatacaatctttgtgctgaaagacattatgacaccgccaaatttaattgcagagttgcacaatatccttttgaagaccataacccaccacagctagaacttatcaaacccttttgtgaagatcttgaccaatggctaagtgaagatgacaatcatgttgcagcaattcactgtaaagctggaaagggacgaactggtgtaatgatatgtgcatatttattacatcggggcaaatttttaaaggcacaagaggccctagatttctatggggaagtaaggaccagagacaaaaagggagtaactattcccagtcagaggcgctatgtgtattattatagctacctgttaaagaatcatctggattatagaccagtggcactgttgtttcacaagatgatgtttgaaactattccaatgttcagtggcggaacttgcaatcctcagtttgtggtctgccagctaaaggtgaagatatattcctccaattcaggacccacacgacgggaagacaagttcatgtactttgagttccctcagccgttacctgtgtgtggtgatatcaaagtagagttcttccacaaacagaacaagatgctaaaaaaggacaaaatgtttcacttttgggtaaatacattcttcataccaggaccagaggaaacctcagaaaaagtagaaaatggaagtctatgtgatcaagaaatcgatagcatttgcagtatagagcgtgcagataatgacaaggaatatctagtacttactttaacaaaaaatgatcttgacaaagcaaataaagacaaagccaaccgatacttttctccaaattttaaggtgaagctgtacttcacaaaaacagtagaggagccgtcaaatccagaggctagcagttcaacttctgtaacaccagatgttagtgacaatgaacctgatcattatagatattctgacaccactgactctgatccagagaatgaaccttttgatgaagatcagcatacacaaattacaaaagtctgaatttttttttatcaagagggataaaacaccatgaaaataaacttgaataaactgaaaatggacctttttttttttaatggcaataggacattgtgtcagattaccagttataggaacaattctcttttcctgaccaatcttgttttaccctatacatccacagggttttgacacttgttgtccagttgaaaaaaggttgtgtagctgtgtcatgtatatacctttttgtgtcaaaaggacatttaaaattcaattaggattaataaagatggcactttcccgttttattccagttttataaaaagtggagacagactgatgtgtatacgtaggaattttttccttttgtgttctgtcaccaactgaagtggctaaagagctttgtgatatactggttcacatcctacccctttgcacttgtggcaacagataagtttgcagttggctaagagaggtttccgaagggttttgctacattctaatgcatgtattcgggttaggggaatggagggaatgctcagaaaggaaataattttatgctggactctggaccatataccatctccagctatttacacacacctttctttagcatgctacagttattaatctggacattcgaggaattggccgctgtcactgcttgttgtttgcgcatttttttttaaagcatattggtgctagaaaaggcagctaaaggaagtgaatctgtattggggtacaggaatgaaccttctgcaacatcttaagatccacaaatgaagggatataaaaataatgtcataggtaagaaacacagcaacaatgacttaaccatataaatgtggaggctatcaacaaagaatgggcttgaaacattataaaaattgacaatgatttattaaatatgttttctcaattgtaacgacttctccatctcctgtgtaatcaaggccagtgctaaaattcagatgctgttagtacctacatcagtcaacaacttacacttattttactagttttcaatcataatacctgctgtggatgcttcatgtgctgcctgcaagcttcttttttctcattaaatataaaatattttgtaatgctgcacagaaattttcaatttgagattctacagtaagcgttttttttctttgaagatttatgatgcacttattcaatagctgtcagccgttccacccttttgaccttacacattctattacaatgaattttgcagttttgcacattttttaaatgtcattaactgttagggaattttacttgaatactgaatacatataatgtttatattaaaaaggacatttgtgttaaaaaggaaattagagttgcagtaaactttcaatgctgcacacaaaaaaaagacatttgatttttcagtagaaattgtcctacatgtgctttattgatttgctattgaaagaatagggttttttttttttttttttttttttttttaaatgtgcagtgttgaatcatttcttcatagtgctcccccgagttgggactagggcntcaatttcacttcttaaaaaaaatcatcatatatttgatatgcccagactgcatacgattttaagcggagtacaactactattgtaaagctaatgtgaagatattattaaaaaggtttttttttccagaaatttggtgtcttcaaattataccttcaccttgacatttgaatatccagccattttgtttcttaatggtataaaattccattttcaataacttattggtgctgaaattgttcactagctgtggtctgacctagttaatttacaaatacagattgaataggacctactagagcagcatttatagagtttgatggcaaatagattaggcagaacttcatctaaaatattcttagtaaataatgttgacacgttttccataccttgtcagtttcattcaacaatttttaaatttttaacaaagctcttaggatttacacatttatatttaaacattgatatatagagtattgattgattgctcataagttaaattggtaaagttagagacaactattctaacacctcaccattgaaatttatatgccaccttgtctttcataaaagctgaaaattgttacctaaaatgaaaatcaacttcatgttttgaagatagttataaatattgttctttgttacaatttcgggcaccgcatattaaaacgtaactttattgttccaatatgtaacatggagggccaggtcataaataatgacattataatgggcttttgcactgttattatttttcctttggaatgtgaaggtctgaatgagggttttgattttgaatgtttcaatgtttttgagaagccttgcttacattttatggtgtagtcattggaaatggaaaaatggcattatatatattatatatataaatatatattatacatactctccttactttatttcagttaccatccccatagaatttgacaagaattgctatgactgaaaggttttcgagtcctaattaaaactttatttatggcagtattcataattagcctgaaatgcattctgtaggtaatctctgagtttctggaatattttcttagactttttggatgtgcagcagcttacatgtctgaagttacttgaaggcatcacttttaagaaagcttacagttgggccctgtaccatcccaagtcctttgtagctcctcttgaacatgtttgccatacttttaaaagggtagttgaataaatagcatcaccattctttgctgtggcacaggttataaacttaagtggagtttaccggcagcatcaaatgtttcagctttaaaaaataaaagtagggtacaagtttaatgtttagttctagaaattttgtgcaatatgttcataacgatggctgtggttgccacaaagtgcctcgtttacctttaaatactgttaatgtgtcatgcatgcagatggaaggggtggaactgtgcactaaagtgggggctttaactgtagtatttggcagagttgccttctacctgccagttcaaaagttcaacctgttttcatatagaatatatatactaaaaaatttcagtctgttaaacagccttactctgattcagcctcttcagatactcttgtgctgtgcagcagtggctctgtgtgtaaatgctatgcactgaggatacacaaaaataccaatatgatgtgtacaggataatgcctcatcccaatcagatgtccatttgttattgtgtttgttaacaaccctttatctcttagtgttataaactccacttaaaactgattaaagtctcattcttgtcattgtgtgggtgttttattaaatgagagtttataattcaaattgcttaagtccattgaagttttaattaatgggcagccaaatgtgaatacaaagttttcagtttttttttttcctgctgtccttcaaagcctactgtttaaaaaaaaaaaaaaaaaaaaaaaaaaaaaaaccctattctttccatagccaatccataaagcacatgtaggaccatttctactgaaaaatccaatgtctttttttttgtgtgcagtgttgaatcatttcttcatagtgctcccccgagttgggactagggcttcaatttcacttcttaaaaaaaatcatcatatatttgatatgcccgactgcatacgattttaagcggagtacactactattgtaaagctaatgtgaagatattattaaaaaggttttttttcctcnnagacattctccagt

SEQ ID NO: 317108 - DNA, 5235 bp, Homo sapiens
  misc_feature (3448)..(3448): n is a, c, g, or t
tgccccctcctaccgccccctgccctgccctgccctcccctcgcccggcgcggtcccgtccgcctctcgctcgcctcccgcctcccctcggtcttccgaggcgcccgggctcccggcgcggcggcggagggggcgggcaggccggcgggcggtgatgtggcgggactctttatgcgctgcggcaggatacgcgctcggcgctgggacgcgactgcgctcagttctctcctctcggaagctgcagccatgatggaagtttgagagttgagccgctgtgaggcgaggccgggctcaggcgagggagatgagagacggcggcggccgcggcccggagcccctctcagcgcctgtgagcagccgcgggggcagcgccctcggggagccggccggcctgcggcggcggcagcggcggcgtttctcgcctcctcttcgtcttttctaaccgtgcagcctcttcctcggcttctcctgaaagggaaggtggaagccgtgggctcgggcgggagccggctgaggcgcggcggcggcggcggcacctcccgctcctggagcgggggggagaagcggcggcggcggcggccgcggcggctgcagctccagggagggggtctgagtcgcctgtcaccatttccaggccatttccatcctgcagaagaagccccgccaccagcagcttctgccatctctctcctcctttttcttcagccacaggctcccagacatgacagccatcatcaaagagatcgttagcagaaacaaaaggagatatcaagaggatggattcgacttagacttgacctatatttatccaaacattattgctatgggatttcctgcagaaagacttgaaggcgtatacaggaacaatattgatgatgtagtaaggtttttggattcaaagcataaaaaccattacaagatatacaatctttgtgctgaaagacattatgacaccgccaaatttaattgcagagttgcacaatatccttttgaagaccataacccaccacagctagaacttatcaaacccttttgtgaagatcttgaccaatggctaagtgaagatgacaatcatgttgcagcaattcactgtaaagctggaaagggacgaactggtgtaatgatatgtgcatatttattacatcggggcaaatttttaaaggcacaagaggccctagatttctatggggaagtaaggaccagagacaaaaagggagtaactattcccagtcagaggcgctatgtgtattattatagctacctgttaaagaatcatctggattatagaccagtggcactgttgtttcacaagatgatgtttgaaactattccaatgttcagtggcggaacttgcaatcctcagtttgtggtctgccagctaaaggtgaagatatattcctccaattcaggacccacacgacgggaagacaagttcatgtactttgagttccctcagccgttacctgtgtgtggtgatatcaaagtagagttcttccacaaacagaacaagatgctaaaaaaggacaaaatgtttcacttttgggtaaatacattcttcataccaggaccagaggaaacctcagaaaaagtagaaaatggaagtctatgtgatcaagaaatcgatagcatttgcagtatagagcgtgcagataatgacaaggaatatctagtacttactttaacaaaaaatgatcttgacaaagcaaataaagacaaagccaaccgatacttttctccaaattttaaggtgaagctgtacttcacaaaaacagtagaggagccgtcaaatccagaggctagcagttcaacttctgtaacaccagatgttagtgacaatgaacctgatcattatagatattctgacaccactgactctgatccagagaatgaaccttttgatgaagatcagcatacacaaattacaaaagtctgaatttttttttatcaagagggataaaacaccatgaaaataaacttgaataaactgaaaatggacctttttttttttaatggcaataggacattgtgtcagattaccagttataggaacaattctcttttcctgaccaatcttgttttaccctatacatccacagggttttgacacttgttgtccagttgaaaaaaggttgtgtagctgtgtcatgtatatacctttttgtgtcaaaaggacatttaaaattcaattaggattaataaagatggcactttcccgttttattccagttttataaaaagtggagacagactgatgtgtatacgtaggaattttttccttttgtgttctgtcaccaactgaagtggctaaagagctttgtgatatactggttcacatcctacccctttgcacttgtggcaacagataagtttgcagttggctaagagaggtttccgaagggttttgctacattctaatgcatgtattcgggttaggggaatggagggaatgctcagaaaggaaataattttatgctggactctggaccatataccatctccagctatttacacacacctttctttagcatgctacagttattaatctggacattcgaggaattggccgctgtcactgcttgttgtttgcgcatttttttttaaagcatattggtgctagaaaaggcagctaaaggaagtgaatctgtattggggtacaggaatgaaccttctgcaacatcttaagatccacaaatgaagggatataaaaataatgtcataggtaagaaacacagcaacaatgacttaaccatataaatgtggaggctatcaacaaagaatgggcttgaaacattataaaaattgacaatgatttattaaatatgttttctcaattgtaacgacttctccatctcctgtgtaatcaaggccagtgctaaaattcagatgctgttagtacctacatcagtcaacaacttacacttattttactagttttcaatcataatacctgctgtggatgcttcatgtgctgcctgcaagcttcttttttctcattaaatataaaatattttgtaatgctgcacagaaattttcaatttgagattctacagtaagcgttttttttctttgaagatttatgatgcacttattcaatagctgtcagccgttccacccttttgaccttacacattctattacaatgaattttgcagttttgcacattttttaaatgtcattaactgttagggaattttacttgaatactgaatacatataatgtttatattaaaaaggacatttgtgttaaaaaggaaattagagttgcagtaaactttcaatgctgcacacaaaaaaaagacatttgatttttcagtagaaattgtcctacatgtgctttattgatttgctattgaaagaatagggttttttttttttttttttttttttttttaaatgtgcagtgttgaatcatttcttcatagtgctcccccgagttgggactagggcntcaatttcacttcttaaaaaaaatcatcatatatttgatatgcccagactgcatacgattttaagcggagtacaactactattgtaaagctaatgtgaagatattattaaaaaggtttttttttccagaaatttggtgtcttcaaattataccttcaccttgacatttgaatatccagccattttgtttcttaatggtataaaattccattttcaataacttattggtgctgaaattgttcactagctgtggtctgacctagttaatttacaaatacagattgaataggacctactagagcagcatttatagagtttgatggcaaatagattaggcagaacttcatctaaaatattcttagtaaataatgttgacacgttttccataccttgtcagtttcattcaacaatttttaaatttttaacaaagctcttaggatttacacatttatatttaaacattgatatatagagtattgattgattgctcataagttaaattggtaaagttagagacaactattctaacacctcaccattgaaatttatatgccaccttgtctttcataaaagctgaaaattgttacctaaaatgaaaatcaacttcatgttttgaagatagttataaatattgttctttgttacaatttcgggcaccgcatattaaaacgtaactttattgttccaatatgtaacatggagggccaggtcataaataatgacattataatgggcttttgcactgttattatttttcctttggaatgtgaaggtctgaatgagggttttgattttgaatgtttcaatgtttttgagaagccttgcttacattttatggtgtagtcattggaaatggaaaaatggcattatatatattatatatataaatatatattatacatactctccttactttatttcagttaccatccccatagaatttgacaagaattgctatgactgaaaggttttcgagtcctaattaaaactttatttatggcagtattcataattagcctgaaatgcattctgtaggtaatctctgagtttctggaatattttcttagactttttggatgtgcagcagcttacatgtctgaagttacttgaaggcatcacttttaagaaagcttacagttgggccctgtaccatcccaagtcctttgtagctcctcttgaacatgtttgccatacttttaaaagggtagttgaataaatagcatcaccattctttgctgtggcacaggttataaacttaagtggagtttaccggcagcatcaaatgtttcagctttaaaaaataaaagtagggtacaagtttaatgtttagttctagaaattttgtgcaatatgttcataacgatggctgtggttgccacaaagtgcctcgtttacctttaaatactgttaatgtgtcatgcatgcagatggaaggggtggaactgtgcactaaagtgggggctttaactgtagtatttggcagagttgccttctacctgccagttcaaaagttcaacctgttttcatatagaatatatatactaaaaaatttcagtctgttaaacagccttactctgattcagcctcttcagatactcttgtgctgtgcagcagtggctctgtgtgtaaatgctatgcactgaggatacacaaaaataccaatatgatgtgtacaggataatgcctcatcccaatcagatgtccatttgttattgtgtttgttaacaaccctttatctcttagtgttataaactccacttaaaactgattaaagtctcattcttgtca

SEQ ID NO: 317109 - DNA, 4860 bp, Homo sapiens
  misc_feature (3073)..(3073): n is a, c, g, or t
gccttatgtctttctgcataattatagagtagccaaaacctgttttaggttaatcacctctggcaaaataaatgataaaagcatagcttttgtaagcagaatgatattacagaagttaacttataaatctaagtgtattaaagacacttaggaaatttatgataatgctgggtcagcattacagttttaactttttacagtttttcatatgctttttttgtgattttgctgtagaaaattaacagttggcatttggcttagttcaagtataatgctgttgacaagtatatctgacacgtcattgaactaataatatttttgaaagctgataggtacttatttttaaagctatagaggtaatatttcatcagttgcagatttgttgccaaatgaacgagtttgtagtattgctaacaaggagaagaattactagcaagtcttgatgttacttttgaagagtgtgatgattgcatttaggaagatatctaaacttctgtttcaaagcaaaaagtttttggattcaaagcataaaaaccattacaagatatacaatctttgtgctgaaagacattatgacaccgccaaatttaattgcagagttgcacaatatccttttgaagaccataacccaccacagctagaacttatcaaacccttttgtgaagatcttgaccaatggctaagtgaagatgacaatcatgttgcagcaattcactgtaaagctggaaagggacgaactggtgtaatgatatgtgcatatttattacatcggggcaaatttttaaaggcacaagaggccctagatttctatggggaagtaaggaccagagacaaaaagggagtaactattcccagtcagaggcgctatgtgtattattatagctacctgttaaagaatcatctggattatagaccagtggcactgttgtttcacaagatgatgtttgaaactattccaatgttcagtggcggaacttgcaatcctcagtttgtggtctgccagctaaaggtgaagatatattcctccaattcaggacccacacgacgggaagacaagttcatgtactttgagttccctcagccgttacctgtgtgtggtgatatcaaagtagagttcttccacaaacagaacaagatgctaaaaaaggacaaaatgtttcacttttgggtaaatacattcttcataccaggaccagaggaaacctcagaaaaagtagaaaatggaagtctatgtgatcaagaaatcgatagcatttgcagtatagagcgtgcagataatgacaaggaatatctagtacttactttaacaaaaaatgatcttgacaaagcaaataaagacaaagccaaccgatacttttctccaaattttaaggtgaagctgtacttcacaaaaacagtagaggagccgtcaaatccagaggctagcagttcaacttctgtaacaccagatgttagtgacaatgaacctgatcattatagatattctgacaccactgactctgatccagagaatgaaccttttgatgaagatcagcatacacaaattacaaaagtctgaatttttttttatcaagagggataaaacaccatgaaaataaacttgaataaactgaaaatggacctttttttttttaatggcaataggacattgtgtcagattaccagttataggaacaattctcttttcctgaccaatcttgttttaccctatacatccacagggttttgacacttgttgtccagttgaaaaaaggttgtgtagctgtgtcatgtatatacctttttgtgtcaaaaggacatttaaaattcaattaggattaataaagatggcactttcccgttttattccagttttataaaaagtggagacagactgatgtgtatacgtaggaattttttccttttgtgttctgtcaccaactgaagtggctaaagagctttgtgatatactggttcacatcctacccctttgcacttgtggcaacagataagtttgcagttggctaagagaggtttccgaagggttttgctacattctaatgcatgtattcgggttaggggaatggagggaatgctcagaaaggaaataattttatgctggactctggaccatataccatctccagctatttacacacacctttctttagcatgctacagttattaatctggacattcgaggaattggccgctgtcactgcttgttgtttgcgcatttttttttaaagcatattggtgctagaaaaggcagctaaaggaagtgaatctgtattggggtacaggaatgaaccttctgcaacatcttaagatccacaaatgaagggatataaaaataatgtcataggtaagaaacacagcaacaatgacttaaccatataaatgtggaggctatcaacaaagaatgggcttgaaacattataaaaattgacaatgatttattaaatatgttttctcaattgtaacgacttctccatctcctgtgtaatcaaggccagtgctaaaattcagatgctgttagtacctacatcagtcaacaacttacacttattttactagttttcaatcataatacctgctgtggatgcttcatgtgctgcctgcaagcttcttttttctcattaaatataaaatattttgtaatgctgcacagaaattttcaatttgagattctacagtaagcgttttttttctttgaagatttatgatgcacttattcaatagctgtcagccgttccacccttttgaccttacacattctattacaatgaattttgcagttttgcacattttttaaatgtcattaactgttagggaattttacttgaatactgaatacatataatgtttatattaaaaaggacatttgtgttaaaaaggaaattagagttgcagtaaactttcaatgctgcacacaaaaaaaagacatttgatttttcagtagaaattgtcctacatgtgctttattgatttgctattgaaagaatagggttttttttttttttttttttttttttttaaatgtgcagtgttgaatcatttcttcatagtgctcccccgagttgggactagggcntcaatttcacttcttaaaaaaaatcatcatatatttgatatgcccagactgcatacgattttaagcggagtacaactactattgtaaagctaatgtgaagatattattaaaaaggtttttttttccagaaatttggtgtcttcaaattataccttcaccttgacatttgaatatccagccattttgtttcttaatggtataaaattccattttcaataacttattggtgctgaaattgttcactagctgtggtctgacctagttaatttacaaatacagattgaataggacctactagagcagcatttatagagtttgatggcaaatagattaggcagaacttcatctaaaatattcttagtaaataatgttgacacgttttccataccttgtcagtttcattcaacaatttttaaatttttaacaaagctcttaggatttacacatttatatttaaacattgatatatagagtattgattgattgctcataagttaaattggtaaagttagagacaactattctaacacctcaccattgaaatttatatgccaccttgtctttcataaaagctgaaaattgttacctaaaatgaaaatcaacttcatgttttgaagatagttataaatattgttctttgttacaatttcgggcaccgcatattaaaacgtaactttattgttccaatatgtaacatggagggccaggtcataaataatgacattataatgggcttttgcactgttattatttttcctttggaatgtgaaggtctgaatgagggttttgattttgaatgtttcaatgtttttgagaagccttgcttacattttatggtgtagtcattggaaatggaaaaatggcattatatatattatatatataaatatatattatacatactctccttactttatttcagttaccatccccatagaatttgacaagaattgctatgactgaaaggttttcgagtcctaattaaaactttatttatggcagtattcataattagcctgaaatgcattctgtaggtaatctctgagtttctggaatattttcttagactttttggatgtgcagcagcttacatgtctgaagttacttgaaggcatcacttttaagaaagcttacagttgggccctgtaccatcccaagtcctttgtagctcctcttgaacatgtttgccatacttttaaaagggtagttgaataaatagcatcaccattctttgctgtggcacaggttataaacttaagtggagtttaccggcagcatcaaatgtttcagctttaaaaaataaaagtagggtacaagtttaatgtttagttctagaaattttgtgcaatatgttcataacgatggctgtggttgccacaaagtgcctcgtttacctttaaatactgttaatgtgtcatgcatgcagatggaaggggtggaactgtgcactaaagtgggggctttaactgtagtatttggcagagttgccttctacctgccagttcaaaagttcaacctgttttcatatagaatatatatactaaaaaatttcagtctgttaaacagccttactctgattcagcctcttcagatactcttgtgctgtgcagcagtggctctgtgtgtaaatgctatgcactgaggatacacaaaaataccaatatgatgtgtacaggataatgcctcatcccaatcagatgtccatttgttattgtgtttgttaacaaccctttatctcttagtgttataaactccacttaaaactgattaaagtctcattcttgtca

SEQ ID NO: 317110 - DNA, 2569 bp, Homo sapiens
tgccccctcctaccgccccctgccctgccctgccctcccctcgcccggcgcggtcccgtccgcctctcgctcgcctcccgcctcccctcggtcttccgaggcgcccgggctcccggcgcggcggcggagggggcgggcaggccggcgggcggtgatgtggcgggactctttatgcgctgcggcaggatacgcgctcggcgctgggacgcgactgcgctcagttctctcctctcggaagctgcagccatgatggaagtttgagagttgagccgctgtgaggcgaggccgggctcaggcgagggagatgagagacggcggcggccgcggcccggagcccctctcagcgcctgtgagcagccgcgggggcagcgccctcggggagccggccggcctgcggcggcggcagcggcggcgtttctcgcctcctcttcgtcttttctaaccgtgcagcctcttcctcggcttctcctgaaagggaaggtggaagccgtgggctcgggcgggagccggctgaggcgcggcggcggcggcggcacctcccgctcctggagcgggggggagaagcggcggcggcggcggccgcggcggctgcagctccagggagggggtctgagtcgcctgtcaccatttccagggctgggaacgccggagagttggtctctccccttctactgcctccaacacggcggcggcggcggcggcacatccagggacccgggccggttttaaacctcccgtccgccgccgccgcaccccccgtggcccgggctccggaggccgccggcggaggcagccgttcggaggattattcgtcttctccccattccgctgccgccgctgccaggcctctggctgctgaggagaagcaggcccagtcgctgcaaccatccagcagccgccgcagcagccattacccggctgcggtccagagccaagcggcggcagagcgaggggcatcagctaccgccaagtccagagccatttccatcctgcagaagaagccccgccaccagcagcttctgccatctctctcctcctttttcttcagccacaggctcccagacatgacagccatcatcaaagagatcgttagcagaaacaaaaggagatatcaagaggatggattcgacttagacttgacctatatttatccaaacattattgctatgggatttcctgcagaaagacttgaaggcgtatacaggaacaatattgatgatgtagtaaggtttttggattcaaagcataaaaaccattacaagatatacaatctttgtgctgaaagacattatgacaccgccaaatttaattgcagagttgcacaatatccttttgaagaccataacccaccacagctagaacttatcaaacccttttgtgaagatcttgaccaatggctaagtgaagatgacaatcatgttgcagcaattcactgtaaagctggaaagggacgaactggtgtaatgatatgtgcatatttattacatcggggcaaatttttaaaggcacaagaggccctagatttctatggggaagtaaggaccagagacaaaaagggagtaactattcccagtcagaggcgctatgtgtattattatagctacctgttaaagaatcatctggattatagaccagtggcactgttgtttcacaagatgatgtttgaaactattccaatgttcagtggcggaacttgcaatcctcagtttgtggtctgccagctaaaggtgaagatatattcctccaattcaggacccacacgacgggaagacaagttcatgtactttgagttccctcagccgttacctgtgtgtggtgatatcaaagtagagttcttccacaaacagaacaagatgctaaaaaaggacaaaatgtttcacttttgggtaaatacattcttcataccaggaccagaggaaacctcagaaaaagtagaaaatggaagtctatgtgatcaagaaatcgatagcatttgcagtatagagcgtgcagataatgacaaggaatatctagtacttactttaacaaaaaatgatcttgacaaagcaaataaagacaaagccaaccgatacttttctccaaattttaaggtgaagctgtacttcacaaaaacagtagaggagccgtcaaatccagaggctagcagttcaacttctgtaacaccagatgttagtgacaatgaacctgatcattatagatattctgacaccactgactctgatccagagaatgaaccttttgatgaagatcagcatacacaaattacaaaagtctgaatttttttttatcaagagggataaaacaccatgaaaataaacttgaataaactgaaaatggacctttttttttttaatggcaataggacattgtgtcagattaccagttataggaacaatcaaatgttaattacctcctaaaaaaaaaaaaaacacaaaaaaaaattttccggggggttgggctcgaaaaattttttaaccctctctggggggcgcggggcccaaaggtttgaacctggcccacgcgccccaggagaacccggggcaacaaaggcgggggttcccccattaaa

SEQ ID NO: 317111 - DNA, 2112 bp, Homo sapiens
  misc_feature (1966)..(1967): n is a, c, g, or t
  misc_feature (1970)..(1970): n is a, c, g, or t
  misc_feature (1979)..(1979): n is a, c, g, or t
  misc_feature (1989)..(1989): n is a, c, g, or t
  misc_feature (1996)..(1997): n is a, c, g, or t
  misc_feature (2011)..(2012): n is a, c, g, or t
  misc_feature (2017)..(2017): n is a, c, g, or t
  misc_feature (2020)..(2021): n is a, c, g, or t
  misc_feature (2027)..(2027): n is a, c, g, or t
tgccccctcctaccgccccctgccctgccctgccctcccctcgcccggcgcggtcccgtccgcctctcgctcgcctcccgcctcccctcggtcttccgaggcgcccgggctcccggcgcggcggcggagggggcgggcaggccggcgggcggtgatgtggcgggactctttatgcgctgcggcaggatacgcgctcggcgctgggacgcgactgcgctcagttctctcctctcggaagctgcagccatgatggaagtttgagagttgagccgctgtgaggcgaggccgggctcaggcgagggagatgagagacggcggcggccgcggcccggagcccctctcagcgcctgtgagcagccgcgggggcagcgccctcggggagccggccggcctgcggcggcggcagcggcggcgtttctcgcctcctcttcgtcttttctaaccgtgcagcctcttcctcggcttctcctgaaagggaaggtggaagccgtgggctcgggcgggagccggctgaggcgcggcggcggcggcggcacctcccgctcctggagcgggggggagaagcggcggcggcggcggccgcggcggctgcagctccagggagggggtctgagtcgcctgtcaccatttccagggctgggaacgccggagagttggtctctccccttctactgcctccaacacggcggcggcggcggcggcacatccagggacccgggccggttttaaacctcccgtccgccgccgccgcaccccccgtggcccgggctccggaggccgccggcggaggcagccgttcggaggattattcgtcttctccccattccgctgccgccgctgccaggcctctggctgctgaggagaagcaggcccagtcgctgcaaccatccagcagccgccgcagcagccattacccggctgcggtccagagccaagcggcggcagagcgaggggcatcagctaccgccaagtccagagccatttccatcctgcagaagaagccccgccaccagcagcttctgccatctctctcctcctttttcttcagccacaggctcccagacatgacagccatcatcaaagagatcgttagcagaaacaaaaggagatatcaagaggatggattcgacttagacttgacctatatttatccaaacattattgctatgggatttcctgcagaaagacttgaaggcgtatacaggaacaatattgatgatgtagtaaggtttttggattcaaagcataaaaaccattacaagatatacaatctttgtgctgaaagacattatgacaccgccaaatttaattgcagagttgcacaatatccttttgaagaccataacccaccacagctagaacttatcaaacccttttgtgaagatcttgaccaatggctaagtgaagatgacaatcatgttgcagcaattcactgtaaagctggaaagggacgaactggtgtaatgatatgtgcatatttattacatcggggcaaatttttaaaggcacaagaggccctagatttctatggggaagtaaggaccagagacaaaaagggagtaactattcccagtcagaggcgctatgtgtattattatagctacctgttaaagaatcatctggattatagaccagtggcactgttgtttcacaagatgatgtttgaaactattccaatgttcagtggcggaacttgcaatcctcagtttgtggtctgccagctaaaggtgaagatatattcctccaattcaggacccacacgacgggaagacaagttcatgtactttgagttccctcagccgttacctgtgtgtggtgatatcaaagtagagttcttccacaaacagaacaagatgctaaaaaagggacagggtctcactatgttgcccaggctggtctcaaactcctgggcacaagcagtcctcacgctttggcatcccaaagagttggaattacaggacaaatnnttnacttttggnaaatacttcntctaccnngaccagagaaactnngaaangtnnaaatgnaggttatgtgtcagaatccatgccttgcagataaagcggcaataatgcagggattttattcctacttacaaaaatgactgacaag

SEQ ID NO: 317112 - DNA, 1312 bp, Homo sapiens
aatagaatttctcatgttttgacagccgatcaaagtccagatctccatctccaaaaagaaggtaagctaaatgttttgttgccaaatcttgcctgtcaagtgtggcctctgcagaatttgtttgcttactgctttgcagtctttgagctctttggagaattggtgctatatagattaaaatactatgctaagtttctgaaatactttttttttttgattcagtaacattagtttatacttttgctggaaatacttagtcataaaatgttagggtgattattaagatgtgattggtcctgtgagtacttggtagaaattttggtaagatagatgccttttccccacatgtacaatagatacaaagtgtggagaaaagtcttggaaatagttacctgcctagtgcttctttatgaccagaaaacttcaaatagttgtcatatttatctagtgcttcttaatgaccagaagacttcaaatagttgtcatatttaactgcaggttgaccttgcaattttgacaaggaggatagcctaatttttttttttttctgggatggagttttcgctctgtccccaggcttggagtgcagtggctcaatcttggctcactgcagcctccgattcccgggttcaagcaattatcctgtctcagcctcttgagcagttgggattacaggcacccaccgccaagcctggctaattttttgtatttctagtagagacggagtttcaccatgttggcgaggttggtcttaaactcctgatcttaggtgatcacctgcctcggcctctcccaaagtgctggggttacaggcgtgagccaccgtgcctggccagggtagcctaatcttaagccagggacaaaagatgaatatatgtaagtttcatgtcatttttaggtctttgctataggaaattagtaccttaggccacctttgaagttattgaaagttagtacatgtacatgagagtttcaattgacactaattggatccaaacctaatgtttttctttttagtcgttccccatcaggaagtcctcgcagaagtgcaagtcctgaaagaatggactgaagctctcaagttcaccctttagggaaaagttattttgtttacattattataagggatttgtgatgtctgtaaagtgtaacctaggaaagataattcaaccatctaatcaaaatggatctggattactatgtaaattcacagcagtaagataatataaattttgttgaatgtattaacatcatatggtctgaaaatgtgggtttttatttggcacatttaaataaaatgtttctaactaga

SEQ ID NO: 317113 - DNA, 2413 bp, Homo sapiens
agcggccgcatatataaacgcgaacccgggctgttcctcgtagtgccgccgggactcttggcgggtgaaggtgtgtgtcagcttttgcgtcactcgagccctgggcgctgcttgctaaagagccgagcacgcgggtctgtcatcatgtcgcgttacgggcggtacggaggagaaaccaaggtgtatgttggtaacctgggaactggcgctggcaaaggagagttagaaagggctttcagttattatggtcctttaagaactgtatggattgcgagaaatcctccaggatttgcctttgtggaattcgaagatcctagagatgcagaagatgcagtacgaggactggatggaaaggtgatttgtggctcccgagtgagggttgaactatcgacaggcatgcctcggagatcacgttttgatagaccacctgcccgacgtccctttgatccaaatgatagatgctatgagtgtggcgaaaagggacattatgcttatgattgtcatcgttacagccggcgaagaagaagcaggtcacggtctagatcacattctcgatccagaggaaggcgatactctcgctcacgcagcaggagcaggggacgaaggtcaaggtcagcatctcctcgacgatcaagatctatctctcttcgtagatcaagatcagcttcactcagaagatctaggtctggttctataaaaggatcgaggtatttccaatccccgtcgaggtcaagatcaagatccaggtctatttcacgaccaagaagcagccgatcaaagtccagatctccatctccaaaaagaagtcgttccccatcaggaagtcctcgcagaagtgcaagtcctgaaagaatggactgaagctctcaagttcaccctttagggaaaagttattttgtttacattattataagggatttgtgatgtctgtaaagtgtaacctaggaaagataattcaaccatctaatcaaaatggatctggattactatgtaaattcacagcagtaagataatataaattttgttgaatgtattaacatcatatggtctgaaaatgtgggtttttatttggcacatttaaataaaatgtttctaactagatttttgatttgtgttcaatattaacacttcttaatttgatatatttgagagtcagacattataattgttaaccttattcatacatacctacattcagaattgaaaggtgttggttaagtcttgaacatcactattctatgcataaaacttggccaggatcttaagggactttgaaaattccatcttacccttgtagctctgggtaagatgacctgagtcccttatgatacagcctgaatgcatcatgacagatccttaagttagctaatccgtttgaagttggtgttagtaggtattgtatgatcagtggtgaagcaagtaggaccactgatgtgtctaaatgagcatgacaggaactaaacgaaactgattaaatgtatgagaaatagaaactgatttctggatgatctttatactaattgcagctttcaggctactaggtggcatagtgttaattaggactccccaagatatggggagttctactctcaatggtcttgtttctttgctttctacattagttaaccagttttataccaaaaaatgcatgtttgaggaattgtctgaaattgggacaaaacaccttcatgtaaaccagctttgcaaaattttccagcccagatactcttcatctattcaaatggattgtcttattctgagcaaagacctgttgttaatcttcaagctaggttttgcagttcccaaccacaacattcttctattttgccaggctggtgcaaagtaattaaagatgtcaatcagaaatgtcaatgagactaaagtggttttgtaaatctcagctatatttagcaacactccatgtagctaatattttttggtagcatctggtagaccttagaatgttacatagccagtaggttctttattcaaattttaagtatcttaagaatagtagggcagtaacagttacttttgagagttttctggtcaagcttttaccaggcattctctagccttggtacaaaaaaaaaaaaacctgctggttgcgcagatacctaggcttgtccattttatgcatttcagcaaagtcattggatactattgcaacttgggaatactggtctgcatcaagtttattcggtagtttgaccgctagtatgttggaagttatttggattgtttttggaattttgactggctgaattatggttggtataaagttatgtgtataactggcaggcttatttatctgttgcacttggttagctttaattgttctgtattatttaaagataagtttactcaacaataaatctgcagagattgaacaaataaaaaaaaaaaataattt

SEQ ID NO: 317114 - DNA, 1101 bp, Homo sapiens
agcggccgcatatataaacgcgaacccgggctgttcctcgtagtgccgccgggactcttggcgggtgaaggtgtgtgtcagcttttgcgtcactcgagccctgggcgctgcttgctaaagagccgagcacgcgggtctgtcatcatgtcgcgttacgggcggtacggaggagaaaccaaggtgtatgttggtaacctgggaactggcgctggcaaaggagagttagaaagggctttcagttattatggtcctttaagaactgtatggattgcgagaaatcctccaggatttgcctttgtggaattcgaagatcctagagatgcagaagatgcagtacgaggactggatggaaaggtgatttgtggctcccgagtgagggttgaactatcgacaggcatgcctcggagatcacgttttgatagaccacctgcccgacgtccctttgatccaaatgatagatgctatgagtgtggcgaaaagggacattatgcttatgattgtcatcgttacagccggcgaagaagaagcaggtcacggtctagatcacattctcgatccagaggaaggcgatactctcgctcacgcagcaggagcaggggacgaaggtcaaggtcagcatctcctcgacgatcaagatctatctctcttcgtagatcaagatcagcttcactcagaagatctaggtctggttctataaaaggatcgaggtatttccaatccccgtcgaggtcaagatcaagatccaggtctatttcacgaccaagaagcagccgatcaaagtccagatctccatctccaaaaagaagtcgttccccatcaggaagtcctcgcagaagtgcaagtcctgaaagaatggactgaagctctcaagttcaccctttagggaaaagttattttgtttacattattataagggatttgtgatgtctgtaaagtgtaacctaggaaagataattcaaccatctaatcaaaatggatctggattactatgtaaattcacagcagtaagataatataaattttgttgaatgtattaacatcatatggtctgaaaatgtgggtttttatttggcacatttaaataaaatgtttctaactaga

SEQ ID NO: 317115 - DNA, 579 bp, Homo sapiens
caagtaattgaaatgggggttccttatgtctggtaacactttgtttgacagtgtgttagacagaataaggcaagtgttgcatcttgtttagttttagcttctttatgcctgaccaacctaatacagtgttgagtagttaaggaaattcctttggactgattgatataattgtgtttttcactttttttattaagatccccgtcgaggtcaagatcaagatccaggtctatttcacgaccaagaagcagccgatcaaagtccagatctccatctccaaaaagaagtcgttccccatcaggaagtcctcgcagaagtgcaagtcctgaaagaatggactgaagctctcaagttcaccctttagggaaaagttattttgtttacattattataagggatttgtgatgtctgtaaagtgtaacctaggaaagataattcaaccatctaatcaaaatggatctggattactatgtaaattcacagcagtaagataatataaattttgttgaatgtattaacatcatatggtctgaaaatgtgggtttttatttggcacatttaaataaaatgtttctaactaga

SEQ ID NO: 317116 - DNA, 1392 bp, Homo sapiens
agcggccgcatatataaacgcgaacccgggctgttcctcgtagtgccgccgggactcttggcgggtgaaggtgtgtgtcagcttttgcgtcactcgagccctgggcgctgcttgctaaagagccgagcacgcgggtctgtcatcatgtcgcgttacgggcggtacggaggagaaaccaaggtgtatgttggtaacctgggaactggcgctggcaaaggagagttagaaagggctttcagttattatggtcctttaagaactgtatggattgaaaagggacattatgcttatgattgtcatcgttacagccggcgaagaagaagcaggtcacggtctagatcacattctcgatccagaggaaggcgatactctcgctcacgcagcaggagcaggggacgaaggtcaaggtcagcatctcctcgacgatcaagatctatctctcttcgtagatcaagatcagcttcactcagaagatctaggtctggttctataaaaggatcgaggtatttccacaacccgtcgaggtcaagatcaagatccagctattacgaccaagaagcagccgatcaagtccagactcattcaagagtgtccatagagtctcgatgcttccgcgcgttgggagctctcccatatggactagtgattagtcagccacgccaggggatgaaggactgctacaaggagtgtgaagaggaatggggaccacgggaagctggtggggtcctcacccatctgtggtttttagtccgatggaacagatactatcccatccacagaaagcctttatctactaggagactaagaaaaagaaaaatactcagacttgctaggaccacaggtgtgggtgtttgttgggaaaaagtattgggaagatcggggtccatagggcgaggcgtctctgatcccctttgaggtttaactttctgcttttgatttcctgttagcatttggcctcctacagtggctgactaataaaagggttccggggttttttcccaatccccgtcgaggtcaagctccaagatccaggtctatttccacgacccaagaagccagccgatcaaagtcccagattctccatctccaaaaagaagtcgttccccatcaggaagtcctcgcagaagtgcaagtcctgaaagaatggactgaagctctcaagttcaccctttagggaaaagttattttgtttacattattataagggatttgtgatgtctgtaaagtgtaacctaggaaagataattcaaccatctaatcaaaatggatctggattactatgtaaattcacagcagtaagataatataaattttgttgaatgtattaacatcatatggtctgaaaatgtgggtttttatttggcacatttaaataaaatgtttctaactaga

SEQ ID NO: 317117 - DNA, 943 bp, Homo sapiens
acactgcactccgtatctattactcgtgccacgagaaaaagaacacgctagtacaggaccaggtcaaggtcagcatctcctcgacgatcaagatctatctctcttcgtagatcaagatcagcttcactcagaagatctaggtctggttctataaaaggatcgaggtatttccaatccccgccgaggtattgacacgacccacgtctctctccctcccacaaaaccctcactccgcgcgcctgtgttaccttcccatcctaacctgcttactggtacggctgtcctcttctgccccctctctctccaccgagtgtccccggtcccctatctacggaaatctatgtccactttctcgtcacaaatccgcccccccggcacgccgcaatctcccccatcgtttcccgccgctttgcttaatcgtcccccccctttcatcctcgccgggtcttaacgcgcacttcacccaccgccgattcaagctttcgtccatcgccgcacggcacgtgcccccccccccgcctgcggtcctcccgcttctctcttaggtccccctcgccaccaccacccgtcgcccgtgtttatgccccgaccgcctatatttcgacccttcgatccttaaccctctcccgtgacttccgccgaatcaaccactccctgatactagccccatgctcccgttggccgtggtacggcccgcgccctccatctaccacccggttccgcaccggaaagaccacgtttctccggcaagcccccactcatgtgctccttactctgctcgcgatcgcgagtcaccgccgtcctatcttaattcactgtgacggtgccctactagcttaccccccgcaggcgaaaagcaataatagagtaacggtgagctccgcgtcgtagcactcggtgctttgctgcactatcctgttctcctttccctcttcccctcccg

SEQ ID NO: 317118 - DNA, 908 bp, Homo sapiens
  misc_feature (29)..(29): n is a, c, g, or t
cgtcaatacgtctgaagctacgcccaacncccacacctagtcaaggtcagcatctcctcgacgatcaagatctatctctcttcgtagatcaagatcagcttcactcagaagatctaggtctggttctataaaaggatcgaggtatttccaatccccgtcgaggtcaagatcaagatccaggtctatttcacgaccaagaagcagtaaaaggatcccgtctgagtccagatctccctttgtaatacgaatttagttcgcgtctaaaacacctgatgcaggcgctacccgagacagattggaccgcccatctccgcccgccctttaccgcccccccgaacgactatttatttacaccgaccaccacgggctatgccagtgtggcgaacccctctttgtatactcacctccaatccaccctctcgttcttctccgcgtctgctcccgccccccatcatatatgaataagactaactgacgttctactatcccccctgccccttccagttactcttttcattcccacctacacatggattccttcccatggccatcactaccccccgcctgcccagtcaatcaagatcctccgtcttccactccgactgaaagcgagcagcacgaccatattatgactcccagcttgcacctagctcgtaataaagccaccgcccaccgtacatataccccaatttcgccgtacgcccgcttgaatattcttaccgtgcacctgactctatgtccctctcgggttcgtcgcgtggtcccgccgcgggccctaattctctatcgataatccattgtttacacccgcgcctccacaaagttgtagtcgcttcctactgtcgtccgcgaatacgggtcaccctatacattgtcaacgccccgcattgctatctccccccgccaac

SEQ ID NO: 317119 - DNA, 288 bp, Homo sapiens
caagtaattgaaatgggggttccttatgtctggtaacactttgtttgacagtgtgttagacagaataaggcaagtgttgcatcttgtttagttttagcttctttatgcctgaccaacctaatacagtgttgagtagttaaggaaattcctttggactgattgatataattgtgtttttcactttttttattaagatccccgtcgaggtcaagatcaagatccaggtctatttcacgaccaagaagcagggtagggtaaaaatttgattatgcttttctagttatatgg

SEQ ID NO: 317120 - DNA, 2356 bp, Homo sapiens
agcggccgcatatataaacgcgaacccgggctgttcctcgtagtgccgccgggactcttggcgggtgaaggtgtgtgtcagcttttgcgtcactcgagccctgggcgctgcttgctaaagagccgagcacgcgggtctgtcatcatgtcgcgttacgggcggtacggaggagaaaccaaggtgtatgttggtaacctgggaactggcgctggcaaaggagagttagaaagggctttcagttattatggtcctttaagaactgtatggattgcgagaaatcctccaggatttgcctttgtggaattcgaagatcctagagatgcagaagatgcagtacgaggactggatggaaaggtgatttgtggctcccgagtgagggttgaactatcgacaggcatgcctcggagatcacgttttgatagaccacctgcccgacgtccctttgatccaaatgatagatgctatgagtgtggcgaaaagggacattatgcttatgattgtcatcgttacagccggcgaagaagaagcaggtcacggtctagatcacattctcgatccagaggaaggcgatactctcgctcacgcagcaggagcaggggacgaaggtcaaggtcagcatctcctcgacgatcaagatctatctctcttcgtagatcaagatcagcttcactcagaagatctaggtctggttctataaaaggatcgaggtatttccaatccccgtcgaggtcaagatcaagatccaggtctatttcacgaccaagaagcagccgatcaaagtccagatctccatctccaaaaagaagtcgttccccatcaggaagtcctcgcagaagtgcaagtcctgaaagaatggactgaagctctcaagttcaccctttagggaaaagttattttgtttacattattataagggatttgtgatgtctgtaaagtgtaacctaggaaagataattcaaccatctaatcaaaatggatctggattactatgtaaattcacagcagtaagataatataaattttgttgaatgtattaacatcatatggtctgaaaatgtgggtttttatttggcacatttaaataaaatgtttctaactagatttttgatttgtgttcaatattaacacttcttaatttgatatatttgagagtcagacattataattgttaaccttattcatacatacctacattcagaattgaaaggtgttggttaagtcttgaacatcactattctatgcataaaacttggccaggatcttaagggactttgaaaattccatcttacccttgtagctctgggtaagatgacctgagtcccttatgatacagcctgaatgcatcatgacagatccttaagttagctaatccgtttgaagttggtgttagtaggtattgtatgatcagtggtgaagcaagtaggaccactgatgtgtctaaatgagcatgacaggaactaaacgaaactgattaaatgtatgagaaatagaaactgatttctggatgatctttatactaattgcagctttcaggctactaggtggcatagtgttaattaggactccccaagatatggggagttctactctcaatggtcttgtttctttgctttctacattagttaaccagttttataccaaaaaatgcatgtttgaggaattgtctgaaattgggacaaaacaccttcatgtaaaccagctttgcaaaattttccagcccagatactcttcatctattcaaatggattgtcttattctgagcaaagacctgttgttaatcttcaagctaggttttgcagttcccaaccacaacattcttctattttgccaggctggtgcaaagtaattaaagatgtcaatcagaaatgtcaatgagactaaagtggttttgtaaatctcagctatatttagcaacactccatgtagctaatattttttggtagcatctggtagaccttagaatgttacatagccagtaggttctttattcaaattttaagtatcttaagaatagtagggcagtaacagttacttttgagagttttctggtcaagcttttaccaggcattctctagccttggtacaaaaaaaagtcattggatactattgcaacttgggaatactggtctgcatcaagtttattcggtagtttgaccgctagtatgttggaagttatttggattgtttttggaattttgactggctgaattatggttggtataaagttatgtgtataactggcaggcttatttatctgttgcacttggttagctttaattgttctgtattatttaaagataagtttactcaacaataaatctgcagagattgaacaaataaaaaaaaaaaataattt

SEQ ID NO: 317121 - DNA, 2154 bp, Homo sapiens
agcggccgcatatataaacgcgaacccgggctgttcctcgtagtgccgccgggactcttggcgggtgaaggtgtgtgtcagcttttgcgtcactcgagccctgggcgctgcttgctaaagagccgagcacgcgggtctgtcatcatgtcgcgttacgggcggtacggaggagaaaccaaggtgtatgttggtaacctgggaactggcgctggcaaaggagagttagaaagggctttcagttattatggtcctttaagaactgtatggattgcgagaaatcctccaggatttgcctttgtggaattcgaagatcctagagatgcagaagatgcagtacgaggactggatggaaaggtgatttgtggctcccgagtgagggttgaactatcgacaggcatgcctcggagatcacgttttgatagaccacctgcccgacgtccctttgatccaaatgatagatgctatgagtgtggcgaaaagggacattatgcttatgattgtcatcgttacagccggcgaagaagaagcaggtcacggtctagatcacattctcgatccagaggaaggcgatactctcgctcacgcagcaggagcaggggacgaaggtcaaggtcagcatctcctcgacgatcaagatctatctctcttcgtagatcaagatcagcttcactcagaagatctaggtctggttctataaaaggatcgaggtatttccaatccccgtcgaggtcaagatcaagatccaggtctatttcacgaccaagaagcagccgatcaaagtccagatctccatctccaaaaagaagtcgttccccatcaggaagtcctcgcagaagtgcaagtcctgaaagaatggactgaagctctcaagttcaccctttagggaaaagttattttgtttacattattataagggatttgtgatgtctgtaaagtgtaacctaggaaagataattcaaccatctaatcaaaatggatctggattactatgtaaattcacagcagtaagataatataaattttgttgaatgtattaacatcatatggtctgaaaatgtgggtttttatttggcacatttaaataaaatgtttctaactagatttttgatttgtgttcaatattaacacttcttaatttgatatatttgagagtcagacattataattgttaaccttattcatacatacctacattcagaattgaaaggtgttggttaagtcttgaacatcactattctatgcataaaacttggccaggatcttaagggactttgaaaattccatcttacccttgtagctctgggtaagatgacctgagtcccttatgatacagcctgaatgcatcatgacagatccttaagttagctaatccgtttgaagttggtgttagtaggtattgtatgatcagtggtgaagcaagtaggaccactgatgtgtctaaatgagcatgacaggaactaaacgaaactgattaaatgtatgagaaatagaaactgatttctggatgatctttatactaattgcagctttcaggctactaggtggcatagtgttaattaggactccccaagatatggggagttctactctcaatggtcttgtttctttgctttctacattagttaaccagttttataccaaaaaatgcatgtttgaggaattgtctgaaattgggacaaaacaccttcatgtaaaccagctttgcaaaattttccagcccagatactcttcatctattcaaatggattgtcttattctgagcaaagacctgttgttaatcttcaagctaggttttgcagttcccaaccacaacattcttctattttgccaggctggtgcaaagtaattaaagatgtcaatcagaaatgtcaatgagactaaagtggttttgtaaatctcagctatatttagcaacactccatgtagctaatattttttggtagcatctggtagaccttagaatgttacatagccagtaggttctttattcaaattttaagtatcttaagaatagtagggcagtaacagttacttttgagagttttctggtcaagcttttaccaggcattctctagccttggtacaaaaatgacagaaaactctcgatggtctgttcttagctttctacattagtgaccaggataccatgatgct

SEQ ID NO: 317122 - DNA, 3369 bp, Homo sapiens
agcggccgcatatataaacgcgaacccgggctgttcctcgtagtgccgccgggactcttggcgggtgaaggtgtgtgtcagcttttgcgtcactcgagccctgggcgctgcttgctaaagagccgagcacgcgggtctgtcatcatgtcgcgttacgggcggtacggaggagaaaccaaggtgtatgttggtaacctgggaactggcgctggcaaaggagagttagaaagggctttcagttattatggtcctttaagaactgtatggattgcgagaaatcctccaggatttgcctttgtggaattcgaagatcctagagatgcagaagatgcagtacgaggactggatggaaaggtgatttgtggctcccgagtgagggttgaactatcgacaggcatgcctcggagatcacgttttgatagaccacctgcccgacgtccctttgatccaaatgatagatgctatgagtgtggcgaaaagggacattatgcttatgattgtcatcgttacagccggcgaagaagaagcaggtcacggtctagatcacattctcgatccagaggaaggcgatactctcgctcacgcagcaggagcaggggacgaaggtcaaggtcagcatctcctcgacgatcaagatctatctctcttcgtagatcaagatcagcttcactcagaagatctaggtctggttctataaaaggatcgaggtatttccaatccccgtcgaggtcaagatcaagatccaggtctatttcacgaccaagaagcagccgatcaaagtccagatctccatctccaaaaagaaggtaagctaaatgttttgttgccaaatcttgcctgtcaagtgtggcctctgcagaatttgtttgcttactgctttgcagtctttgagctctttggagaattggtgctatatagattaaaatactatgctaagtttctgaaatactttttttttttgattcagtaacattagtttatacttttgctggaaatacttagtcataaaatgttagggtgattattaagatgtgattggtcctgtgagtacttggtagaaattttggtaagatagatgccttttccccacatgtacaatagatacaaagtgtggagaaaagtcttggaaatagttacctgcctagtgcttctttatgaccagaaaacttcaaatagttgtcatatttatctagtgcttcttaatgaccagaagacttcaaatagttgtcatatttaactgcaggttgaccttgcaattttgacaaggaggatagcctaatttttttttttttctgggatggagttttcgctctgtccccaggcttggagtgcagtggctcaatcttggctcactgcagcctccgattcccgggttcaagcaattatcctgtctcagcctcttgagcagttgggattacaggcacccaccgccaagcctggctaattttttgtatttctagtagagacggagtttcaccatgttggcgaggttggtcttaaactcctgatcttaggtgatcacctgcctcggcctctcccaaagtgctggggttacaggcgtgagccaccgtgcctggccagggtagcctaatcttaagccagggacaaaagatgaatatatgtaagtttcatgtcatttttaggtctttgctataggaaattagtaccttaggccacctttgaagttattgaaagttagtacatgtacatgagagtttcaattgacactaattggatccaaacctaatgtttttctttttagtcgttccccatcaggaagtcctcgcagaagtgcaagtcctgaaagaatggactgaagctctcaagttcaccctttagggaaaagttattttgtttacattattataagggatttgtgatgtctgtaaagtgtaacctaggaaagataattcaaccatctaatcaaaatggatctggattactatgtaaattcacagcagtaagataatataaattttgttgaatgtattaacatcatatggtctgaaaatgtgggtttttatttggcacatttaaataaaatgtttctaactagatttttgatttgtgttcaatattaacacttcttaatttgatatatttgagagtcagacattataattgttaaccttattcatacatacctacattcagaattgaaaggtgttggttaagtcttgaacatcactattctatgcataaaacttggccaggatcttaagggactttgaaaattccatcttacccttgtagctctgggtaagatgacctgagtcccttatgatacagcctgaatgcatcatgacagatccttaagttagctaatccgtttgaagttggtgttagtaggtattgtatgatcagtggtgaagcaagtaggaccactgatgtgtctaaatgagcatgacaggaactaaacgaaactgattaaatgtatgagaaatagaaactgatttctggatgatctttatactaattgcagctttcaggctactaggtggcatagtgttaattaggactccccaagatatggggagttctactctcaatggtcttgtttctttgctttctacattagttaaccagttttataccaaaaaatgcatgtttgaggaattgtctgaaattgggacaaaacaccttcatgtaaaccagctttgcaaaattttccagcccagatactcttcatctattcaaatggattgtcttattctgagcaaagacctgttgttaatcttcaagctaggttttgcagttcccaaccacaacattcttctattttgccaggctggtgcaaagtaattaaagatgtcaatcagaaatgtcaatgagactaaagtggttttgtaaatctcagctatatttagcaacactccatgtagctaatattttttggtagcatctggtagaccttagaatgttacatagccagtaggttctttattcaaattttaagtatcttaagaatagtagggcagtaacagttacttttgagagttttctggtcaagcttttaccaggcattctctagccttggtacaaaaaaaaaaaaacctgctggttgcgcagatacctaggcttgtccattttatgcatttcagcaaagtcattggatactattgcaacttgggaatactggtctgcatcaagtttattcggtagtttgaccgctagtatgttggaagttatttggattgtttttggaattttgactggctgaattatggttggtataaagttatgtgtataactggcaggcttatttatctgttgcacttggttagctttaattgttctgtattatttaaagataagtttactcaacaataaatctgcagagattgaacaaataaaaaaaaaaaataattt

SEQ ID NO: 317123 - DNA, 3290 bp, Homo sapiens
agcggccgcatatataaacgcgaacccgggctgttcctcgtagtgccgccgggactcttggcgggtgaaggtgtgtgtcagcttttgcgtcactcgagccctgggcgctgcttgctaaagagccgagcacgcgggtctgtcatcatgtcgcgttacgggcggtacggaggagaaaccaaggtgtatgttggtaacctgggaactggcgctggcaaaggagagttagaaagggctttcagttattatggtcctttaagaactgtatggattgcgagaaatcctccaggatttgcctttgtggaattcgaagatcctagagatgcagaagatgcagtacgaggactggatggaaaggtgatttgtggctcccgagtgagggttgaactatcgacaggcatgcctcggagatcacgttttgatagaccacctgcccgacgtccctttgatccaaatgatagatgctatgagtgtggcgaaaagggacattatgcttatgattgtcatcgttacagccggcgaagaagaagcagaggtatttattttaataaaggaatggttggtattctagttaatcaagtaattcttttattagcaaggcagaaactagtgtttttctataaacttgaatgttaattgtacaggtgtattttacaatttttgtttaattaaaaaaatgttactatattaataatcaacctggtcaaaacctttcaggtttcttcgtttgagtcagtcgccttgattcagaatgtcacgagccttatgatatcatgctgaggcgccttgcaaatccgacaattaagatcctcctagaccttgaggtgatcagcataagaggccagatcccctcgagtcatctacacctagcttcaccttattctttaaagggcagaaaatttgagacggtgatcgccgtaacagtaaatttggcttacaattggggcccccctccggtttagaaagaggaacaccagattgaccacattcccaactagaaaaatcttcttgcgtcaatcaagcctcacctggctcatttggctgtcagtttgatcgtcgttagattgaagaaaacatctagatgcagcgatcggctatagatacttctagatcgtctagatctactagaccatgggccaaagagggtcgacctgcaaacttgcaaggtttattttaaatacacattacagtgttttatattatgtaatgctaagttgtaattcagcttttaacaaatctttttttaggtagtaaaaaaaaaaatactcaacaactaataggcccagagtttatttccaaatgagacactaaatttaaatagttttgagatttgatttcagcagaggcacacaaactcttaaaaacgagttattgtctgacattttgttttttctctaacttgaaaaataggtcacggtctagatcacattctcgatccagaggaaggcgatactctcgctcacgcagcaggagcaggggacgaaggtcaaggtcagcatctcctcgacgatcaagatctatctctcttcgtagatcaagatcagcttcactcagaagatctaggtctggttctataaaaggatcgaggtatttccaatccccgtcgaggtcaagatcaagatccaggtctatttcacgaccaagaagcagccgatcaaagtccagatctccatctccaaaaagaagtcgttccccatcaggaagtcctcgcagaagtgcaagtcctgaaagaatggactgaagctctcaagttcaccctttagggaaaagttattttgtttacattattataagggatttgtgatgtctgtaaagtgtaacctaggaaagataattcaaccatctaatcaaaatggatctggattactatgtaaattcacagcagtaagataatataaattttgttgaatgtattaacatcatatggtctgaaaatgtgggtttttatttggcacatttaaataaaatgtttctaactagatttttgatttgtgttcaatattaacacttcttaatttgatatatttgagagtcagacattataattgttaaccttattcatacatacctacattcagaattgaaaggtgttggttaagtcttgaacatcactattctatgcataaaacttggccaggatcttaagggactttgaaaattccatcttacccttgtagctctgggtaagatgacctgagtcccttatgatacagcctgaatgcatcatgacagatccttaagttagctaatccgtttgaagttggtgttagtaggtattgtatgatcagtggtgaagcaagtaggaccactgatgtgtctaaatgagcatgacaggaactaaacgaaactgattaaatgtatgagaaatagaaactgatttctggatgatctttatactaattgcagctttcaggctactaggtggcatagtgttaattaggactccccaagatatggggagttctactctcaatggtcttgtttctttgctttctacattagttaaccagttttataccaaaaaatgcatgtttgaggaattgtctgaaattgggacaaaacaccttcatgtaaaccagctttgcaaaattttccagcccagatactcttcatctattcaaatggattgtcttattctgagcaaagacctgttgttaatcttcaagctaggttttgcagttcccaaccacaacattcttctattttgccaggctggtgcaaagtaattaaagatgtcaatcagaaatgtcaatgagactaaagtggttttgtaaatctcagctatatttagcaacactccatgtagctaatattttttggtagcatctggtagaccttagaatgttacatagccagtaggttctttattcaaattttaagtatcttaagaatagtagggcagtaacagttacttttgagagttttctggtcaagcttttaccaggcattctctagccttggtacaaaaaaaaaaaaacctgctggttgcgcagatacctaggcttgtccattttatgcatttcagcaaagtcattggatactattgcaacttgggaatactggtctgcatcaagtttattcggtagtttgaccgctagtatgttggaagttatttggattgtttttggaattttgactggctgaattatggttggtataaagttatgtgtataactggcaggcttatttatctgttgcacttggttagctttaattgttctgtattatttaaagataagtttactcaacaataaatctgcagagattgaacaaataaaaaaaaaaaataattt

SEQ ID NO: 317124 - DNA, 2377 bp, Homo sapiens
agcggccgcatatataaacgcgaacccgggctgttcctcgtagtgccgccgggactcttggcgggtgaaggtgtgtgtcagcttttgcgtcactcgagccctgggcgctgcttgctaaagagccgagcacgcgggtctgtcatcatgtcgcgttacgggcggtacggaggagaaaccaaggtgtatgttggtaacctgggaactggcgctggcaaaggagagttagaaagggctttcagttattatggtcctttaagaactgtatggattgcgagaaatcctccaggatttgcctttgtggaattcgaagatcctagagatgcagaagatgcagtacgaggactggatggaaaggtgatttgtggctcccgagtgagggttgaactatcgacaggcatgcctcggagatcacgttttgatagaccacctgcccgacgtccctttgatccaaatgatagatgctatgagtgtggcgaaaagggacattatgcttatgattgtcatcgttacagccggcgaagaagaagcaggtcacggtctagatcacattctcgatccagaggaaggcgatactctcgctcacgcagcaggagcaggggacgaaggtcaaggtcagcatctcctcgacgatcaagatctatctctcttcgtagatcaagatcagcttcactcagaagatctaggtctggttctataaaaggatcgaggtatttccaatccccgtcgaggtcaagatcaagatccaggtctatttcacgaccaagaagcagtcgttccccatcaggaagtcctcgcagaagtgcaagtcctgaaagaatggactgaagctctcaagttcaccctttagggaaaagttattttgtttacattattataagggatttgtgatgtctgtaaagtgtaacctaggaaagataattcaaccatctaatcaaaatggatctggattactatgtaaattcacagcagtaagataatataaattttgttgaatgtattaacatcatatggtctgaaaatgtgggtttttatttggcacatttaaataaaatgtttctaactagatttttgatttgtgttcaatattaacacttcttaatttgatatatttgagagtcagacattataattgttaaccttattcatacatacctacattcagaattgaaaggtgttggttaagtcttgaacatcactattctatgcataaaacttggccaggatcttaagggactttgaaaattccatcttacccttgtagctctgggtaagatgacctgagtcccttatgatacagcctgaatgcatcatgacagatccttaagttagctaatccgtttgaagttggtgttagtaggtattgtatgatcagtggtgaagcaagtaggaccactgatgtgtctaaatgagcatgacaggaactaaacgaaactgattaaatgtatgagaaatagaaactgatttctggatgatctttatactaattgcagctttcaggctactaggtggcatagtgttaattaggactccccaagatatggggagttctactctcaatggtcttgtttctttgctttctacattagttaaccagttttataccaaaaaatgcatgtttgaggaattgtctgaaattgggacaaaacaccttcatgtaaaccagctttgcaaaattttccagcccagatactcttcatctattcaaatggattgtcttattctgagcaaagacctgttgttaatcttcaagctaggttttgcagttcccaaccacaacattcttctattttgccaggctggtgcaaagtaattaaagatgtcaatcagaaatgtcaatgagactaaagtggttttgtaaatctcagctatatttagcaacactccatgtagctaatattttttggtagcatctggtagaccttagaatgttacatagccagtaggttctttattcaaattttaagtatcttaagaatagtagggcagtaacagttacttttgagagttttctggtcaagcttttaccaggcattctctagccttggtacaaaaaaaaaaaaacctgctggttgcgcagatacctaggcttgtccattttatgcatttcagcaaagtcattggatactattgcaacttgggaatactggtctgcatcaagtttattcggtagtttgaccgctagtatgttggaagttatttggattgtttttggaattttgactggctgaattatggttggtataaagttatgtgtataactggcaggcttatttatctgttgcacttggttagctttaattgttctgtattatttaaagataagtttactcaacaataaatctgcagagattgaacaaataaaaaaaaaaaataattt

SEQ ID NO: 317125 - DNA, 3106 bp, Homo sapiens
agcggccgcatatataaacgcgaacccgggctgttcctcgtagtgccgccgggactcttggcgggtgaaggtgtgtgtcagcttttgcgtcactcgagccctgggcgctgcttgctaaagagccgagcacgcgggtctgtcatcatgtcgcgttacgggcggtacggaggagaaaccaaggtgtatgttggtaacctgggaactggcgctggcaaaggagagttagaaagggctttcagttattatggtcctttaagaactgtatggattgcgagaaatcctccaggatttgcctttgtggaattcgaagatcctagagatgcagaagatgcagtacgaggactggatggaaaggtgatttgtggctcccgagtgagggttgaactatcgacaggcatgcctcggagatcacgttttgatagaccacctgcccgacgtccctttgatccaaatgatagatgctatgagtgtggcgaaaagggacattatgcttatgattgtcatcgttacagccggcgaagaagaagcaggtttcttcgtttgagtcagtcgccttgattcagaatgtcacgagccttatgatatcatgctgaggcgccttgcaaatccgacaattaagatcctcctagaccttgaggtgatcagcataagaggccagatcccctcgagtcatctacacctagcttcaccttattctttaaagggcagaaaatttgagacggtgatcgccgtaacagtaaatttggcttacaattggggcccccctccggtttagaaagaggaacaccagattgaccacattcccaactagaaaaatcttcttgcgtcaatcaagcctcacctggctcatttggctgtcagtttgatcgtcgttagattgaagaaaacatctagatgcagcgatcggctatagatacttctagatcgtctagatctactagaccatgggccaaagagggtcgacctgcaaacttgcaaggtttattttaaatacacattacagtgttttatattatgtaatgctaagttgtaattcagcttttaacaaatctttttttaggtagtaaaaaaaaaaatactcaacaactaataggcccagagtttatttccaaatgagacactaaatttaaatagttttgagatttgatttcagcagaggcacacaaactcttaaaaacgagttattgtctgacattttgttttttctctaacttgaaaaataggtcacggtctagatcacattctcgatccagaggaaggcgatactctcgctcacgcagcaggagcaggggacgaaggtcaaggtcagcatctcctcgacgatcaagatctatctctcttcgtagatcaagatcagcttcactcagaagatctaggtctggttctataaaaggatcgaggtatttccaatccccgtcgaggtcaagatcaagatccaggtctatttcacgaccaagaagcagccgatcaaagtccagatctccatctccaaaaagaagtcgttccccatcaggaagtcctcgcagaagtgcaagtcctgaaagaatggactgaagctctcaagttcaccctttagggaaaagttattttgtttacattattataagggatttgtgatgtctgtaaagtgtaacctaggaaagataattcaaccatctaatcaaaatggatctggattactatgtaaattcacagcagtaagataatataaattttgttgaatgtattaacatcatatggtctgaaaatgtgggtttttatttggcacatttaaataaaatgtttctaactagatttttgatttgtgttcaatattaacacttcttaatttgatatatttgagagtcagacattataattgttaaccttattcatacatacctacattcagaattgaaaggtgttggttaagtcttgaacatcactattctatgcataaaacttggccaggatcttaagggactttgaaaattccatcttacccttgtagctctgggtaagatgacctgagtcccttatgatacagcctgaatgcatcatgacagatccttaagttagctaatccgtttgaagttggtgttagtaggtattgtatgatcagtggtgaagcaagtaggaccactgatgtgtctaaatgagcatgacaggaactaaacgaaactgattaaatgtatgagaaatagaaactgatttctggatgatctttatactaattgcagctttcaggctactaggtggcatagtgttaattaggactccccaagatatggggagttctactctcaatggtcttgtttctttgctttctacattagttaaccagttttataccaaaaaatgcatgtttgaggaattgtctgaaattgggacaaaacaccttcatgtaaaccagctttgcaaaattttccagcccagatactcttcatctattcaaatggattgtcttattctgagcaaagacctgttgttaatcttcaagctaggttttgcagttcccaaccacaacattcttctattttgccaggctggtgcaaagtaattaaagatgtcaatcagaaatgtcaatgagactaaagtggttttgtaaatctcagctatatttagcaacactccatgtagctaatattttttggtagcatctggtagaccttagaatgttacatagccagtaggttctttattcaaattttaagtatcttaagaatagtagggcagtaacagttacttttgagagttttctggtcaagcttttaccaggcattctctagccttggtacaaaaaaaaaaaaacctgctggttgcgcagatacctaggcttgtccattttatgcatttcagcaaagtcattggatactattgcaacttgggaatactggtctgcatcaagtttattcggtagtttgaccgctagtatgttggaagttatttggattgtttttggaattttgactggctgaattatggttggtataaagttatgtgtataactggcaggcttatttatctgttgcacttggttagctttaattgttctgtattatttaaagataagtttactcaacaataaatctgcagagattgaacaaataaaaaaaaaaaataattt

SEQ ID NO: 317126 - DNA, 3254 bp, Homo sapiens
agcggccgcatatataaacgcgaacccgggctgttcctcgtagtgccgccgggactcttggcgggtgaaggtgtgtgtcagcttttgcgtcactcgagccctgggcgctgcttgctaaagagccgagcacgcgggtctgtcatcatgtcgcgttacgggcggtacggaggagaaaccaaggtgtatgttggtaacctgggaactggcgctggcaaaggagagttagaaagggctttcagttattatggtcctttaagaactgtatggattgcgagaaatcctccaggatttgcctttgtggaattcgaagatcctagagatgcagaagatgcagtacgaggactggatggaaaggtgatttgtggctcccgagtgagggttgaactatcgacaggcatgcctcggagatcacgttttgatagaccacctgcccgacgtccctttgatccaaatgatagatgctatgagtgtggcgaaaagggacattatgcttatgattgtcatcgttacagccggcgaagaagaagcagaggtatttattttaataaaggaatggttggtattctagttaatcaagtaattcttttattagcaaggcagaaactagtgtttttctataaacttgaatgttaattgtacaggtgtattttacaatttttgtttaattaaaaaaatgttactatattaataatcaacctggtcaaaacctttcaggtttcttcgtttgagtcagtcgccttgattcagaatgtcacgagccttatgatatcatgctgaggcgccttgcaaatccgacaattaagatcctcctagaccttgaggtgatcagcataagaggccagatcccctcgagtcatctacacctagcttcaccttattctttaaagggcagaaaatttgagacggtgatcgccgtaacagtaaatttggcttacaattggggcccccctccggtttagaaagaggaacaccagattgaccacattcccaactagaaaaatcttcttgcgtcaatcaagcctcacctggctcatttggctgtcagtttgatcgtcgttagattgaagaaaacatctagatgcagcgatcggctatagatacttctagatcgtctagatctactagaccatgggccaaagagggtcgacctgcaaacttgcaaggtttattttaaatacacattacagtgttttatattatgtaatgctaagttgtaattcagcttttaacaaatctttttttaggtagtaaaaaaaaaaatactcaacaactaataggcccagagtttatttccaaatgagacactaaatttaaatagttttgagatttgatttcagcagaggcacacaaactcttaaaaacgagttattgtctgacattttgttttttctctaacttgaaaaataggtcacggtctagatcacattctcgatccagaggaaggcgatactctcgctcacgcagcaggagcaggggacgaaggtcaaggtcagcatctcctcgacgatcaagatctatctctcttcgtagatcaagatcagcttcactcagaagatctaggtctggttctataaaaggatcgaggtatttccaatccccgtcgaggtcaagatcaagatccaggtctatttcacgaccaagaagcagtcgttccccatcaggaagtcctcgcagaagtgcaagtcctgaaagaatggactgaagctctcaagttcaccctttagggaaaagttattttgtttacattattataagggatttgtgatgtctgtaaagtgtaacctaggaaagataattcaaccatctaatcaaaatggatctggattactatgtaaattcacagcagtaagataatataaattttgttgaatgtattaacatcatatggtctgaaaatgtgggtttttatttggcacatttaaataaaatgtttctaactagatttttgatttgtgttcaatattaacacttcttaatttgatatatttgagagtcagacattataattgttaaccttattcatacatacctacattcagaattgaaaggtgttggttaagtcttgaacatcactattctatgcataaaacttggccaggatcttaagggactttgaaaattccatcttacccttgtagctctgggtaagatgacctgagtcccttatgatacagcctgaatgcatcatgacagatccttaagttagctaatccgtttgaagttggtgttagtaggtattgtatgatcagtggtgaagcaagtaggaccactgatgtgtctaaatgagcatgacaggaactaaacgaaactgattaaatgtatgagaaatagaaactgatttctggatgatctttatactaattgcagctttcaggctactaggtggcatagtgttaattaggactccccaagatatggggagttctactctcaatggtcttgtttctttgctttctacattagttaaccagttttataccaaaaaatgcatgtttgaggaattgtctgaaattgggacaaaacaccttcatgtaaaccagctttgcaaaattttccagcccagatactcttcatctattcaaatggattgtcttattctgagcaaagacctgttgttaatcttcaagctaggttttgcagttcccaaccacaacattcttctattttgccaggctggtgcaaagtaattaaagatgtcaatcagaaatgtcaatgagactaaagtggttttgtaaatctcagctatatttagcaacactccatgtagctaatattttttggtagcatctggtagaccttagaatgttacatagccagtaggttctttattcaaattttaagtatcttaagaatagtagggcagtaacagttacttttgagagttttctggtcaagcttttaccaggcattctctagccttggtacaaaaaaaaaaaaacctgctggttgcgcagatacctaggcttgtccattttatgcatttcagcaaagtcattggatactattgcaacttgggaatactggtctgcatcaagtttattcggtagtttgaccgctagtatgttggaagttatttggattgtttttggaattttgactggctgaattatggttggtataaagttatgtgtataactggcaggcttatttatctgttgcacttggttagctttaattgttctgtattatttaaagataagtttactcaacaataaatctgcagagattgaacaaataaaaaaaaaaaataattt

SEQ ID NO: 317127 - DNA, 3235 bp, Homo sapiens
agcggccgcatatataaacgcgaacccgggctgttcctcgtagtgccgccgggactcttggcgggtgaaggtgtgtgtcagcttttgcgtcactcgagccctgggcgctgcttgctaaagagccgagcacgcgggtctgtcatcatgtcgcgttacgggcggtacggaggagaaaccaaggtgtatgttggtaacctgggaactggcgctggcaaaggagagttagaaagggctttcagttattatggtcctttaagaactgtatggattgcgagaaatcctccaggatttgcctttgtggaattcgaagatcctagagatgcagaagatgcagtacgaggactggatggaaaggtgatttgtggctcccgagtgagggttgaactatcgacaggcatgcctcggagatcacgttttgatagaccacctgcccgacgtccctttgatccaaatgatagatgctatgagtgtggcgaggtatttattttaataaaggaatggttggtattctagttaatcaagtaattcttttattagcaaggcagaaactagtgtttttctataaacttgaatgttaattgtacaggtgtattttacaatttttgtttaattaaaaaaatgttactatattaataatcaacctggtcaaaacctttcaggtttcttcgtttgagtcagtcgccttgattcagaatgtcacgagccttatgatatcatgctgaggcgccttgcaaatccgacaattaagatcctcctagaccttgaggtgatcagcataagaggccagatcccctcgagtcatctacacctagcttcaccttattctttaaagggcagaaaatttgagacggtgatcgccgtaacagtaaatttggcttacaattggggcccccctccggtttagaaagaggaacaccagattgaccacattcccaactagaaaaatcttcttgcgtcaatcaagcctcacctggctcatttggctgtcagtttgatcgtcgttagattgaagaaaacatctagatgcagcgatcggctatagatacttctagatcgtctagatctactagaccatgggccaaagagggtcgacctgcaaacttgcaaggtttattttaaatacacattacagtgttttatattatgtaatgctaagttgtaattcagcttttaacaaatctttttttaggtagtaaaaaaaaaaatactcaacaactaataggcccagagtttatttccaaatgagacactaaatttaaatagttttgagatttgatttcagcagaggcacacaaactcttaaaaacgagttattgtctgacattttgttttttctctaacttgaaaaataggtcacggtctagatcacattctcgatccagaggaaggcgatactctcgctcacgcagcaggagcaggggacgaaggtcaaggtcagcatctcctcgacgatcaagatctatctctcttcgtagatcaagatcagcttcactcagaagatctaggtctggttctataaaaggatcgaggtatttccaatccccgtcgaggtcaagatcaagatccaggtctatttcacgaccaagaagcagccgatcaaagtccagatctccatctccaaaaagaagtcgttccccatcaggaagtcctcgcagaagtgcaagtcctgaaagaatggactgaagctctcaagttcaccctttagggaaaagttattttgtttacattattataagggatttgtgatgtctgtaaagtgtaacctaggaaagataattcaaccatctaatcaaaatggatctggattactatgtaaattcacagcagtaagataatataaattttgttgaatgtattaacatcatatggtctgaaaatgtgggtttttatttggcacatttaaataaaatgtttctaactagatttttgatttgtgttcaatattaacacttcttaatttgatatatttgagagtcagacattataattgttaaccttattcatacatacctacattcagaattgaaaggtgttggttaagtcttgaacatcactattctatgcataaaacttggccaggatcttaagggactttgaaaattccatcttacccttgtagctctgggtaagatgacctgagtcccttatgatacagcctgaatgcatcatgacagatccttaagttagctaatccgtttgaagttggtgttagtaggtattgtatgatcagtggtgaagcaagtaggaccactgatgtgtctaaatgagcatgacaggaactaaacgaaactgattaaatgtatgagaaatagaaactgatttctggatgatctttatactaattgcagctttcaggctactaggtggcatagtgttaattaggactccccaagatatggggagttctactctcaatggtcttgtttctttgctttctacattagttaaccagttttataccaaaaaatgcatgtttgaggaattgtctgaaattgggacaaaacaccttcatgtaaaccagctttgcaaaattttccagcccagatactcttcatctattcaaatggattgtcttattctgagcaaagacctgttgttaatcttcaagctaggttttgcagttcccaaccacaacattcttctattttgccaggctggtgcaaagtaattaaagatgtcaatcagaaatgtcaatgagactaaagtggttttgtaaatctcagctatatttagcaacactccatgtagctaatattttttggtagcatctggtagaccttagaatgttacatagccagtaggttctttattcaaattttaagtatcttaagaatagtagggcagtaacagttacttttgagagttttctggtcaagcttttaccaggcattctctagccttggtacaaaaaaaaaaaaacctgctggttgcgcagatacctaggcttgtccattttatgcatttcagcaaagtcattggatactattgcaacttgggaatactggtctgcatcaagtttattcggtagtttgaccgctagtatgttggaagttatttggattgtttttggaattttgactggctgaattatggttggtataaagttatgtgtataactggcaggcttatttatctgttgcacttggttagctttaattgttctgtattatttaaagataagtttactcaacaataaatctgcagagattgaacaaataaaaaaaaaaaataattt

SEQ ID NO: 317128 - DNA, 2791 bp, Homo sapiens
ctactactactaaattcgcggccgcgtcgacaggtatttattttaataaaggaatggttggtattctagttaatcaagtaattcttttattagcaaggcagaaactagtgtttttctataaacttgaatgttaattgtacaggtgtattttacaatttttgtttaattaaaaaaatgttactatattaataatcaacctggtcaaaacctttcaggtttcttcgtttgagtcagtcgccttgattcagaatgtcacgagccttatgatatcatgctgaggcgccttgcaaatccgacaattaagatcctcctagaccttgaggtgatcagcataagaggccagatcccctcgagtcatctacacctagcttcaccttattctttaaagggcagaaaatttgagacggtgatcgccgtaacagtaaatttggcttacaattggggcccccctccggtttagaaagaggaacaccagattgaccacattcccaactagaaaaatcttcttgcgtcaatcaagcctcacctggctcatttggctgtcagtttgatcgtcgttagattgaagaaaacatctagatgcagcgatcggctatagatacttctagatcgtctagatctactagaccatgggccaaagagggtcgacctgcaaacttgcaaggtttattttaaatacacattacagtgttttatattatgtaatgctaagttgtaattcagcttttaacaaatctttttttaggtagtaaaaaaaaaaatactcaacaactaataggcccagagtttatttccaaatgagacactaaatttaaatagttttgagatttgatttcagcagaggcacacaaactcttaaaaacgagttattgtctgacattttgttttttctctaacttgaaaaataggtcacggtctagatcacattctcgatccagaggaaggcgatactctcgctcacgcagcaggagcaggggacgaaggtcaaggtcagcatctcctcgacgatcaagatctatctctcttcgtagatcaagatcagcttcactcagaagatctaggtctggttctataaaaggatcgaggtatttccaatccccgtcgaggtcaagatcaagatccaggtctatttcacgaccaagaagcagccgatcaaagtccagatctccatctccaaaaagaagtcgttccccatcaggaagtcctcgcagaagtgcaagtcctgaaagaatggactgaagctctcaagttcaccctttagggaaaagttattttgtttacattattataagggatttgtgatgtctgtaaagtgtaacctaggaaagataattcaaccatctaatcaaaatggatctggattactatgtaaattcacagcagtaagataatataaattttgttgaatgtattaacatcatatggtctgaaaatgtgggtttttatttggcacatttaaataaaatgtttctaactagatttttgatttgtgttcaatattaacacttcttaatttgatatatttgagagtcagacattataattgttaaccttattcatacatacctacattcagaattgaaaggtgttggttaagtcttgaacatcactattctatgcataaaacttggccaggatcttaagggactttgaaaattccatcttacccttgtagctctgggtaagatgacctgagtcccttatgatacagcctgaatgcatcatgacagatccttaagttagctaatccgtttgaagttggtgttagtaggtattgtatgatcagtggtgaagcaagtaggaccactgatgtgtctaaatgagcatgacaggaactaaacgaaactgattaaatgtatgagaaatagaaactgatttctggatgatctttatactaattgcagctttcaggctactaggtggcatagtgttaattaggactccccaagatatggggagttctactctcaatggtcttgtttctttgctttctacattagttaaccagttttataccaaaaaatgcatgtttgaggaattgtctgaaattgggacaaaacaccttcatgtaaaccagctttgcaaaattttccagcccagatactcttcatctattcaaatggattgtcttattctgagcaaagacctgttgttaatcttcaagctaggttttgcagttcccaaccacaacattcttctattttgccaggctggtgcaaagtaattaaagatgtcaatcagaaatgtcaatgagactaaagtggttttgtaaatctcagctatatttagcaacactccatgtagctaatattttttggtagcatctggtagaccttagaatgttacatagccagtaggttctttattcaaattttaagtatcttaagaatagtagggcagtaacagttacttttgagagttttctggtcaagcttttaccaggcattctctagccttggtacaaaaaaaaaaaaacctgctggttgcgcagatacctaggcttgtccattttatgcatttcagcaaagtcattggatactattgcaacttgggaatactggtctgcatcaagtttattcggtagtttgaccgctagtatgttggaagttatttggattgtttttggaattttgactggctgaattatggttggtataaagttatgtgtataactggcaggcttatttatctgttgcacttggttagctttaattgttctgtattatttaaagataagtttactcaacaataaatctgcagagattgaacaaataaaaaaaaaaaataattt

SEQ ID NO: 317129 - DNA, 1734 bp, Homo sapiens
agcggccgcatatataaacgcgaacccgggctgttcctcgtagtgccgccgggactcttggcgggtgaaggtgtgtgtcagcttttgcgtcactcgagccctgggcgctgcttgctaaagagccgagcacgcgggtctgtcatcatgtcgcgttacgggcggtacggaggagaaaccaaggtgtatgttggtaacctgggaactggcgctggcaaaggagagttagaaagggctttcagttattatggtcctttaagaactgtatggattgcgagaaatcctccaggatttgcctttgtggaattcgaagatcctagagatgcagaagatgcagtacgaggactggatggaaaggtgatttgtggctcccgagtgagggttgaactatcgacaggcatgcctcggagatcacgttttgatagaccacctgcccgacgtccctttgatccaaatgatagatgctatgagtgtggcgaaaagggacattatgcttatgattgtcatcgttacagccggcgaagaagaagcagaggtatttattttaataaaggaatggttggtattctagttaatcaagtaattcttttattagcaaggcagaaactagtgtttttctataaacttgaatgttaattgtacaggtgtattttacaatttttgtttaattaaaaaaatgttactatattaataatcaacctggtcaaaacctttcaggtttcttcgtttgagtcagtcgccttgattcagaatgtcacgagccttatgatatcatgctgaggcgccttgcaaatccgacaattaagatcctcctagaccttgaggtgatcagcataagaggccagatcccctcgagtcatctacacctagcttcaccttattctttaaagggcagaaaatttgagacggtgatcgccgtaacagtaaatttggcttacaattggggcccccctccggtttagaaagaggaacaccagattgaccacattcccaactagaaaaatcttcttgcgtcaatcaagcctcacctggctcatttggctgtcagtttgatcgtcgttagattgaagaaaacatctagatgcagcgatcggctatagatacttctagatcgtctagatctactagaccatgggccaaagagggtcgacctgcaaacttgcaaggtcacggtctagatcacattctcgatccagaggaaggcgatactctcgctcacgcagcaggagcaggggacgaaggtcaaggtcagcatctcctcgacgatcaagatctatctctcttcgtagatcaagatcagcttcactcagaagatctaggtctggttctataaaaggatcgaggtatttccaatccccgtcgaggtcaagatcaagatccaggtctatttcacgaccaagaagcagccgatcaaagtccagatctccatctccaaaaagaagtcgttccccatcaggaagtcctcgcagaagtgcaagtcctgaaagaatggactgaagctctcaagttcaccctttagggaaaagttattttgtttacattattataagggatttgtgatgtctgtaaagtgtaacctaggaaagataattcaaccatctaatcaaaatggatctggattactatgtaaattcacagcagtaagataatataaattttgttgaatgtattaacatcatatggtctgaaaatgtgggtttttatttggcacatttaaataaaatgtttctaactaga

SEQ ID NO: 317130 - DNA, 2571 bp, Homo sapiens
gcgcatttcctcagcgctttcccgccacttcagcggacagatctggccgcagctaaaccaaggtgtatgttggtaacctgggaactggcgctggcaaaggagagttagaaagggctttcagttattatggtcctttaagaactgtatggattgcgagaaatcctccaggatttgcctttgtggaattcgaagatcctagagatgcagaagatgcagtacgaggactggatggaaaggtgatttgtggctcccgagtgagggttgaactatcgacaggcatgcctcggagatcacgttttgatagaccacctgcccgacgtccctttgatccaaatgatagatgctatgagtgtggcgaaaagggacattatgcttatgattgtcatcgttacagccggcgaagaagaagcagggcagaaaatttgagacggtgatcgccgtaacagtaaatttggcttacaattggggcccccctccggtttagaaagaggaacaccagattgaccacattcccaactagaaaaatcttcttgcgtcaatcaagcctcacctggctcatttggctgtcagtttgatcgtcgttagattgaagaaaacatctagatgcagcgatcggctatagatacttctagatcgtctagatctactagaccatgggccaaagagggtcgacctgcaaacttgcaaggtcacggtctagatcacattctcgatccagaggaaggcgatactctcgctcacgcagcaggagcaggggacgaaggtcaaggtcagcatctcctcgacgatcaagatctatctctcttcgtagatcaagatcagcttcactcagaagatctaggtctggttctataaaaggatcgaggtatttccaatccccgtcgaggtcaagatcaagatccaggtctatttcacgaccaagaagcagccgatcaaagtccagatctccatctccaaaaagaagtcgttccccatcaggaagtcctcgcagaagtgcaagtcctgaaagaatggactgaagctctcaagttcaccctttagggaaaagttattttgtttacattattataagggatttgtgatgtctgtaaagtgtaacctaggaaagataattcaaccatctaatcaaaatggatctggattactatgtaaattcacagcagtaagataatataaattttgttgaatgtattaacatcatatggtctgaaaatgtgggtttttatttggcacatttaaataaaatgtttctaactagatttttgatttgtgttcaatattaacacttcttaatttgatatatttgagagtcagacattataattgttaaccttattcatacatacctacattcagaattgaaaggtgttggttaagtcttgaacatcactattctatgcataaaacttggccaggatcttaagggactttgaaaattccatcttacccttgtagctctgggtaagatgacctgagtcccttatgatacagcctgaatgcatcatgacagatccttaagttagctaatccgtttgaagttggtgttagtaggtattgtatgatcagtggtgaagcaagtaggaccactgatgtgtctaaatgagcatgacaggaactaaacgaaactgattaaatgtatgagaaatagaaactgatttctggatgatctttatactaattgcagctttcaggctactaggtggcatagtgttaattaggactccccaagatatggggagttctactctcaatggtcttgtttctttgctttctacattagttaaccagttttataccaaaaaatgcatgtttgaggaattgtctgaaattgggacaaaacaccttcatgtaaaccagctttgcaaaattttccagcccagatactcttcatctattcaaatggattgtcttattctgagcaaagacctgttgttaatcttcaagctaggttttgcagttcccaaccacaacattcttctattttgccaggctggtgcaaagtaattaaagatgtcaatcagaaatgtcaatgagactaaagtggttttgtaaatctcagctatatttagcaacactccatgtagctaatattttttggtagcatctggtagaccttagaatgttacatagccagtaggttctttattcaaattttaagtatcttaagaatagtagggcagtaacagttacttttgagagttttctggtcaagcttttaccaggcattctctagccttggtacaaaaaaaaaaaaacctgctggttgcgcagatacctaggcttgtccattttatgcatttcagcaaagtcattggatactattgcaacttgggaatactggtctgcatcaagtttattcggtagtttgaccgctagtatgttggaagttatttggattgtttttggaattttgactggctgaattatggttggtataaagttatgtgtataactggcaggcttatttatctgttgcacttggttagctttaattgttctgtattatttaaagataagtttactcaacaataaatctgcagagattgaacaaataaaaaaaaaaaataattt

SEQ ID NO: 317131 - DNA, 1914 bp, Homo sapiens
ctactactactaaattcgcggccgcgtcgacgtcacggtctagatcacattctcgatccagaggaaggcgatactctcgctcacgcagcaggagcaggggacgaaggtcaaggtcagcatctcctcgacgatcaagatctatctctcttcgtagatcaagatcagcttcactcagaagatctaggtctggttctataaaaggatcgaggtatttccaatccccgtcgaggtcaagatcaagatccaggtctatttcacgaccaagaagcagccgatcaaagtccagatctccatctccaaaaagaagtcgttccccatcaggaagtcctcgcagaagtgcaagtcctgaaagaatggactgaagctctcaagttcaccctttagggaaaagttattttgtttacattattataagggatttgtgatgtctgtaaagtgtaacctaggaaagataattcaaccatctaatcaaaatggatctggattactatgtaaattcacagcagtaagataatataaattttgttgaatgtattaacatcatatggtctgaaaatgtgggtttttatttggcacatttaaataaaatgtttctaactagatttttgatttgtgttcaatattaacacttcttaatttgatatatttgagagtcagacattataattgttaaccttattcatacatacctacattcagaattgaaaggtgttggttaagtcttgaacatcactattctatgcataaaacttggccaggatcttaagggactttgaaaattccatcttacccttgtagctctgggtaagatgacctgagtcccttatgatacagcctgaatgcatcatgacagatccttaagttagctaatccgtttgaagttggtgttagtaggtattgtatgatcagtggtgaagcaagtaggaccactgatgtgtctaaatgagcatgacaggaactaaacgaaactgattaaatgtatgagaaatagaaactgatttctggatgatctttatactaattgcagctttcaggctactaggtggcatagtgttaattaggactccccaagatatggggagttctactctcaatggtcttgtttctttgctttctacattagttaaccagttttataccaaaaaatgcatgtttgaggaattgtctgaaattgggacaaaacaccttcatgtaaaccagctttgcaaaattttccagcccagatactcttcatctattcaaatggattgtcttattctgagcaaagacctgttgttaatcttcaagctaggttttgcagttcccaaccacaacattcttctattttgccaggctggtgcaaagtaattaaagatgtcaatcagaaatgtcaatgagactaaagtggttttgtaaatctcagctatatttagcaacactccatgtagctaatattttttggtagcatctggtagaccttagaatgttacatagccagtaggttctttattcaaattttaagtatcttaagaatagtagggcagtaacagttacttttgagagttttctggtcaagcttttaccaggcattctctagccttggtacaaaaaaaaaaaaacctgctggttgcgcagatacctaggcttgtccattttatgcatttcagcaaagtcattggatactattgcaacttgggaatactggtctgcatcaagtttattcggtagtttgaccgctagtatgttggaagttatttggattgtttttggaattttgactggctgaattatggttggtataaagttatgtgtataactggcaggcttatttatctgttgcacttggttagctttaattgttctgtattatttaaagataagtttactcaacaataaatctgcagagattgaacaaataaaaaaaaaaaataattt

SEQ ID NO: 317132 - DNA, 2624 bp, Homo sapiens
aatagaatttctcatgttttgacagccgatcaaagtccagatctccatctccaaaaagaaggtaagctaaatgttttgttgccaaatcttgcctgtcaagtgtggcctctgcagaatttgtttgcttactgctttgcagtctttgagctctttggagaattggtgctatatagattaaaatactatgctaagtttctgaaatactttttttttttgattcagtaacattagtttatacttttgctggaaatacttagtcataaaatgttagggtgattattaagatgtgattggtcctgtgagtacttggtagaaattttggtaagatagatgccttttccccacatgtacaatagatacaaagtgtggagaaaagtcttggaaatagttacctgcctagtgcttctttatgaccagaaaacttcaaatagttgtcatatttatctagtgcttcttaatgaccagaagacttcaaatagttgtcatatttaactgcaggttgaccttgcaattttgacaaggaggatagcctaatttttttttttttctgggatggagttttcgctctgtccccaggcttggagtgcagtggctcaatcttggctcactgcagcctccgattcccgggttcaagcaattatcctgtctcagcctcttgagcagttgggattacaggcacccaccgccaagcctggctaattttttgtatttctagtagagacggagtttcaccatgttggcgaggttggtcttaaactcctgatcttaggtgatcacctgcctcggcctctcccaaagtgctggggttacaggcgtgagccaccgtgcctggccagggtagcctaatcttaagccagggacaaaagatgaatatatgtaagtttcatgtcatttttaggtctttgctataggaaattagtaccttaggccacctttgaagttattgaaagttagtacatgtacatgagagtttcaattgacactaattggatccaaacctaatgtttttctttttagtcgttccccatcaggaagtcctcgcagaagtgcaagtcctgaaagaatggactgaagctctcaagttcaccctttagggaaaagttattttgtttacattattataagggatttgtgatgtctgtaaagtgtaacctaggaaagataattcaaccatctaatcaaaatggatctggattactatgtaaattcacagcagtaagataatataaattttgttgaatgtattaacatcatatggtctgaaaatgtgggtttttatttggcacatttaaataaaatgtttctaactagatttttgatttgtgttcaatattaacacttcttaatttgatatatttgagagtcagacattataattgttaaccttattcatacatacctacattcagaattgaaaggtgttggttaagtcttgaacatcactattctatgcataaaacttggccaggatcttaagggactttgaaaattccatcttacccttgtagctctgggtaagatgacctgagtcccttatgatacagcctgaatgcatcatgacagatccttaagttagctaatccgtttgaagttggtgttagtaggtattgtatgatcagtggtgaagcaagtaggaccactgatgtgtctaaatgagcatgacaggaactaaacgaaactgattaaatgtatgagaaatagaaactgatttctggatgatctttatactaattgcagctttcaggctactaggtggcatagtgttaattaggactccccaagatatggggagttctactctcaatggtcttgtttctttgctttctacattagttaaccagttttataccaaaaaatgcatgtttgaggaattgtctgaaattgggacaaaacaccttcatgtaaaccagctttgcaaaattttccagcccagatactcttcatctattcaaatggattgtcttattctgagcaaagacctgttgttaatcttcaagctaggttttgcagttcccaaccacaacattcttctattttgccaggctggtgcaaagtaattaaagatgtcaatcagaaatgtcaatgagactaaagtggttttgtaaatctcagctatatttagcaacactccatgtagctaatattttttggtagcatctggtagaccttagaatgttacatagccagtaggttctttattcaaattttaagtatcttaagaatagtagggcagtaacagttacttttgagagttttctggtcaagcttttaccaggcattctctagccttggtacaaaaaaaaaaaaacctgctggttgcgcagatacctaggcttgtccattttatgcatttcagcaaagtcattggatactattgcaacttgggaatactggtctgcatcaagtttattcggtagtttgaccgctagtatgttggaagttatttggattgtttttggaattttgactggctgaattatggttggtataaagttatgtgtataactggcaggcttatttatctgttgcacttggttagctttaattgttctgtattatttaaagataagtttactcaacaataaatctgcagagattgaacaaataaaaaaaaaaaataattt

SEQ ID NO: 317133 - DNA, 2057 bp, Homo sapiens
agcggccgcatatataaacgcgaacccgggctgttcctcgtagtgccgccgggactcttggcgggtgaaggtgtgtgtcagcttttgcgtcactcgagccctgggcgctgcttgctaaagagccgagcacgcgggtctgtcatcatgtcgcgttacgggcggtacggaggagaaaccaaggtgtatgttggtaacctgggaactggcgctggcaaaggagagttagaaagggctttcagttattatggtcctttaagaactgtatggattgcgagaaatcctccaggatttgcctttgtggaattcgaagatcctagagatgcagaagatgcagtacgaggactggatggaaaggtgatttgtggctcccgagtgagggttgaactatcgacaggcatgcctcggagatcacgttttgatagaccacctgcccgacgtccctttgatccaaatgatagatgctatgagtgtggcgaaaagggacattatgcttatgattgtcatcgttacagccggcgaagaagaagcaggtcacggtctagatcacattctcgatccagaggaaggcgatactctcgctcacgcagcaggagcaggggacgaaggtcaaggtcagcatctcctcgacgatcaagatctatctctcttcgtagatcaagatcagcttcactcagaagatctaggtctggttctataaaaggatcgaggtatttccaatccccgtcgaggtcaagatcaagatccaggtctatttcacgaccaagaagcagccgatcaaagtccagatctccatctccaaaaagaaggtaagctaaatgttttgttgccaaatcttgcctgtcaagtgtggcctctgcagaatttgtttgcttactgctttgcagtctttgagctctttggagaattggtgctatatagattaaaatactatgctaagtttctgaaatactttttttttttgattcagtaacattagtttatacttttgctggaaatacttagtcataaaatgttagggtgattattaagatgtgattggtcctgtgagtacttggtagaaattttggtaagatagatgccttttccccacatgtacaatagatacaaagtgtggagaaaagtcttggaaatagttacctgcctagtgcttctttatgaccagaaaacttcaaatagttgtcatatttatctagtgcttcttaatgaccagaagacttcaaatagttgtcatatttaactgcaggttgaccttgcaattttgacaaggaggatagcctaatttttttttttttctgggatggagttttcgctctgtccccaggcttggagtgcagtggctcaatcttggctcactgcagcctccgattcccgggttcaagcaattatcctgtctcagcctcttgagcagttgggattacaggcacccaccgccaagcctggctaattttttgtatttctagtagagacggagtttcaccatgttggcgaggttggtcttaaactcctgatcttaggtgatcacctgcctcggcctctcccaaagtgctggggttacaggcgtgagccaccgtgcctggccagggtagcctaatcttaagccagggacaaaagatgaatatatgtaagtttcatgtcatttttaggtctttgctataggaaattagtaccttaggccacctttgaagttattgaaagttagtacatgtacatgagagtttcaattgacactaattggatccaaacctaatgtttttctttttagtcgttccccatcaggaagtcctcgcagaagtgcaagtcctgaaagaatggactgaagctctcaagttcaccctttagggaaaagttattttgtttacattattataagggatttgtgatgtctgtaaagtgtaacctaggaaagataattcaaccatctaatcaaaatggatctggattactatgtaaattcacagcagtaagataatataaattttgttgaatgtattaacatcatatggtctgaaaatgtgggtttttatttggcacatttaaataaaatgtttctaactaga

SEQ ID NO: 317134 - DNA, 1065 bp, Homo sapiens
agcggccgcatatataaacgcgaacccgggctgttcctcgtagtgccgccgggactcttggcgggtgaaggtgtgtgtcagcttttgcgtcactcgagccctgggcgctgcttgctaaagagccgagcacgcgggtctgtcatcatgtcgcgttacgggcggtacggaggagaaaccaaggtgtatgttggtaacctgggaactggcgctggcaaaggagagttagaaagggctttcagttattatggtcctttaagaactgtatggattgcgagaaatcctccaggatttgcctttgtggaattcgaagatcctagagatgcagaagatgcagtacgaggactggatggaaaggtgatttgtggctcccgagtgagggttgaactatcgacaggcatgcctcggagatcacgttttgatagaccacctgcccgacgtccctttgatccaaatgatagatgctatgagtgtggcgaaaagggacattatgcttatgattgtcatcgttacagccggcgaagaagaagcaggtcacggtctagatcacattctcgatccagaggaaggcgatactctcgctcacgcagcaggagcaggggacgaaggtcaaggtcagcatctcctcgacgatcaagatctatctctcttcgtagatcaagatcagcttcactcagaagatctaggtctggttctataaaaggatcgaggtatttccaatccccgtcgaggtcaagatcaagatccaggtctatttcacgaccaagaagcagtcgttccccatcaggaagtcctcgcagaagtgcaagtcctgaaagaatggactgaagctctcaagttcaccctttagggaaaagttattttgtttacattattataagggatttgtgatgtctgtaaagtgtaacctaggaaagataattcaaccatctaatcaaaatggatctggattactatgtaaattcacagcagtaagataatataaattttgttgaatgtattaacatcatatggtctgaaaatgtgggtttttatttggcacatttaaataaaatgtttctaactaga

SEQ ID NO: 317135 - DNA, 1076 bp, Homo sapiens
attcggcacgaggcggcacgagggttagctaatccgtttgaagttggtgttagtaggtattgtatgatcagtggtgaagcaagtaggaccactgatgtgtctaaatgagcatgacaggaactaaacgaaactgattaaatgtatgagaaatagaaactgatttctggatgatctttatactaattgcagctttcaggctactaggtggcatagtgttaattaggactccccaagatatggggagttctactctcaatggtcttgtttctttgctttctacattagttaaccagttttataccaaaaaatgcatgtttgaggaattgtctgaaattgggacaaaacaccttcatgtaaaccagctttgcaaaattttccagcccagatactcttcatctattcaaatggattgtcttattctgagcaaagacctgttgttaatcttcaagctaggttttgcagttcccaaccacaacattcttctattttgccaggctggtgcaaagtaattaaagatgtcaatcagaaatgtcaatgagactaaagtggttttgtaaatctcagctatatttagcaacactccatgtagctaatattttttggtagcatctggtagaccttagaatgttacatagccagtaggttctttattcaaattttaagtatcttaagaatagtagggcagtaacagttacttttgagagttttctggtcaagcttttaccaggcattctctagccttggtacaaaaaaaaaaaaacctgctggttgcgcagatacctaggcttgtccattttatgcatttcagcaaagtcattggatactattgcaacttgggaatactggtctgcatcaagtttattcggtagtttgaccgctagtatgttggaagttatttggattgtttttggaattttgactggctgaattatggttggtataaagttatgtgtataactggcaggcttatttatctgttgcacttggttagctttaattgttctgtattatttaaagataagtttactcaacaataaatctgcagagattgaacaaataaaaaaaaaaaataattt

SEQ ID NO: 317136 - DNA, 1942 bp, Homo sapiens
agcggccgcatatataaacgcgaacccgggctgttcctcgtagtgccgccgggactcttggcgggtgaaggtgtgtgtcagcttttgcgtcactcgagccctgggcgctgcttgctaaagagccgagcacgcgggtctgtcatcatgtcgcgttacgggcggtacggaggagaaaccaaggtgtatgttggtaacctgggaactggcgctggcaaaggagagttagaaagggctttcagttattatggtcctttaagaactgtatggattgcgagaaatcctccaggatttgcctttgtggaattcgaagatcctagagatgcagaagatgcagtacgaggactggatggaaaggtgatttgtggctcccgagtgagggttgaactatcgacaggcatgcctcggagatcacgttttgatagaccacctgcccgacgtccctttgatccaaatgatagatgctatgagtgtggcgaaaagggacattatgcttatgattgtcatcgttacagccggcgaagaagaagcagaggtatttattttaataaaggaatggttggtattctagttaatcaagtaattcttttattagcaaggcagaaactagtgtttttctataaacttgaatgttaattgtacaggtgtattttacaatttttgtttaattaaaaaaatgttactatattaataatcaacctggtcaaaacctttcaggtttcttcgtttgagtcagtcgccttgattcagaatgtcacgagccttatgatatcatgctgaggcgccttgcaaatccgacaattaagatcctcctagaccttgaggtgatcagcataagaggccagatcccctcgagtcatctacacctagcttcaccttattctttaaagggcagaaaatttgagacggtgatcgccgtaacagtaaatttggcttacaattggggcccccctccggtttagaaagaggaacaccagattgaccacattcccaactagaaaaatcttcttgcgtcaatcaagcctcacctggctcatttggctgtcagtttgatcgtcgttagattgaagaaaacatctagatgcagcgatcggctatagatacttctagatcgtctagatctactagaccatgggccaaagagggtcgacctgcaaacttgcaaggtttattttaaatacacattacagtgttttatattatgtaatgctaagttgtaattcagcttttaacaaatctttttttaggtagtaaaaaaaaaaatactcaacaactaataggcccagagtttatttccaaatgagacactaaatttaaatagttttgagatttgatttcagcagaggcacacaaactcttaaaaacgagttattgtctgacattttgttttttctctaacttgaaaaataggtcacggtctagatcacattctcgatccagaggaaggcgatactctcgctcacgcagcaggagcaggggacgaaggtcaaggtcagcatctcctcgacgatcaagatctatctctcttcgtagatcaagatcagcttcactcagaagatctaggtctggttctataaaaggatcgaggtatttccaatccccgtcgaggtcaagatcaagatccaggtctatttcacgaccaagaagcagtcgttccccatcaggaagtcctcgcagaagtgcaagtcctgaaagaatggactgaagctctcaagttcaccctttagggaaaagttattttgtttacattattataagggatttgtgatgtctgtaaagtgtaacctaggaaagataattcaaccatctaatcaaaatggatctggattactatgtaaattcacagcagtaagataatataaattttgttgaatgtattaacatcatatggtctgaaaatgtgggtttttatttggcacatttaaataaaatgtttctaactaga

SEQ ID NO: 317137 - DNA, 913 bp, Homo sapiens
agtgttgctctggctgtctagaggatccctataggcgctaggtggcatagtgttaattaggactccccaagatatggggagttctactctcaatggtcttgtttctttgctttctacattagttaaccagttttataccaaaaaatgcatgtttgaggaattgtctgaaattgggacaaaacaccttcatgtaaaccagctttgcaaaattttccagcccagatactcttcatctattcaaatggattgtcttattctgagcaaagacctgttgttaatcttcaagctaggttttgcagttcccaaccacaacattcttctattttgccaggctggtgcaaagtaattaaagatgtcaatcagaaatgtcaatgagactaaagtggttttgtaaatctcagctatatttagcaacactccatgtagctaatattttttggtagcatctggtagaccttagaatgttacatagccagtaggttctttattcaaattttaagtatcttaagaatagtagggcagtaacagttacttttgagagttttctggtcaagcttttaccaggcattctctagccttggtacaaaaaaaaaaaaacctgctggttgcgcagatacctaggcttgtccattttatgcatttcagcaaagtcattggatactattgcaacttgggaatactggtctgcatcaagtttattcggtagtttgaccgctagtatgttggaagttatttggattgtttttggaattttgactggctgaattatggttggtataaagttatgtgtataactggcaggcttatttatctgttgcacttggttagctttaattgttctgtattatttaaagataagtttactcaacaataaatctgcagagattgaacaaataaaaaaaaaaaataattt

SEQ ID NO: 317138 - DNA, 1102 bp, Homo sapiens
agcggccgcatatataaacgcgaacccgggctgttcctcgtagtgccgccgggactcttggcgggtgaaggtgtgtgtcagcttttgcgtcactcgagccctgggcgctgcttgctaaagagccgagcacgcgggtctgtcatcatgtcgcgttacgggcggtacggaggagaaaccaaggtgtatgttggtaacctgggaactggcgctggcaaaggagagttagaaagggctttcagttattatggtcctttaagaactgtatggattgcgagaaatcctccaggatttgcctttgtggaattcgaagatcctagagatgcagaagatgcagtacgaggactggatggaaaggtgatttgtggctcccgagtgagggttgaactatcgacaggcatgcctcggagatcacgttttgatagaccacctgcccgacgtccctttgatccaaatgatagatgctatgagtgtggcgaaaagggacattatgcttatgattgtcatcgttacagccggcgaagaagaagcaggtcacggtctagatcacattctcgatccagaggaaggcgatactctcgctcacgcagcaggagcaggggacgaaggtcaaggtcagcatctcctcgacgatcaagatctatctctcttcgtagatcaagatcagcttcactcagaagatctaggtctggttctataaaaggatcgaggtatttccaatccccgtcgaggtcaagatcaagatccaggtctatttcacgaccaagaagcagcgatcaaagtcccagattctccatctccaaaaagaagtcgttccccatcaggaagtcctcgcagaagtgcaagtcctgaaagaatggactgaagctctcaagttcaccctttagggaaaagttattttgtttacattattataagggatttgtgatgtctgtaaagtgtaacctaggaaagataattcaaccatctaatcaaaatggatctggattactatgtaaattcacagcagtaagataatataaattttgttgaatgtattaacatcatatggtctgaaaatgtgggtttttatttggcacatttaaataaaatgtttctaactaga

SEQ ID NO: 317139 - DNA, 1509 bp, Homo sapiens
  misc_feature (1484)..(1484): n is a, c, g, or t
agcggccgcatatataaacgcgaacccgggctgttcctcgtagtgccgccgggactcttggcgggtgaaggtgtgtgtcagcttttgcgtcactcgagccctgggcgctgcttgctaaagagccgagcacgcgggtctgtcatcatgtcgcgttacgggcggtacggaggagaaaccaaggtgtatgttggtaacctgggaactggcgctggcaaaggagagttagaaagggctttcagttattatggtcctttaagaactgtatggattgcgagaaatcctccaggatttgcctttgtggaattcgaagatcctagagatgcagaagatgcagtacgaggactggatggaaaggtgatttgtggctcccgagtgagggttgaactatcgacaggcatgcctcggagatcacgttttgatagaccacctgcccgacgtccctttgatccaaatgatagatgctatgagtgtggcgaaaagggacattatgcttatgattgtcatcgttacagccggcgaagaagaagcagaggtatttattttaataaaggaatggttggtattctagttaatcaagtaattcttttattagcaaggcagaaactagtgtttttctataaacttgaatgttaattgtacaggtgtattttacaatttttgtttaattaaaaaaatgttactatattaataatcaacctggtcaaaacctttcaggtttcttcgtttgagtcagtcgccttgattcagaatgtcacgagccttatgatatcatgctgaggcgccttgcaaatccgacaattaagatcctcctagaccttgaggtgatcagcataagaggccagatcccctcgagtcatctacacctagcttcaccttattctttaaagggcagaaaatttgagacggtgatcgccgtaacagtaaatttggcttacaattggggcccccctccggtttagaaagaggaacaccagattgaccacattcccaactagaaaaatcttcttgcgtcaatcaagcctcacctggctcatttggctgtcagtttgatcgtcgttagattgaagaaaacatctagatgcagcgatcggctatagatacttctagatcgtctagatctactagaccatgggccaaagagggtcgacctgcaaacttgcaaggtcacggtctagatcacattctcgatccagaggaaggcgatactctcgctcacgcagcaggagcaggggacgaaggtcaaggtcagcatctcctcgacgatcaagatctatctctcttcgtagatcaagatcagcttcactcagaagatctaggtctggttctataaaaggatcgaggtatttccaatccccgtcgaggtcaagatcaagatccaggtctatttcacgaccaagaagcagcgatcaaagtcccagattctccatctccaaaaagaagtcggtcccccaatcagggaaggtcccccgcaggaaggtgcaaanttcccggaaaaggatttggacttga

SEQ ID NO: 317140 - DNA, 954 bp, Homo sapiens
agcggccgcatatataaacgcgaacccgggctgttcctcgtagtgccgccgggactcttggcgggtgaaggtgtgtgtcagcttttgcgtcactcgagccctgggcgctgcttgctaaagagccgagcacgcgggtctgtcatcatgtcgcgttacgggcggtacggaggagaaaccaaggtgtatgttggtaacctgggaactggcgctggcaaaggagagttagaaagggctttcagttattatggtcctttaagaactgtatggattgcgagaaatcctccaggatttgcctttgtggaattcgaagatcctagagatgcagaagatgcagtacgaggactggatggaaagtgatttgtcgctcacgcacaggagcagggacgaaggtcaaggtcagcatctcctcgacgatcaagatctatctctcttcgtagatcaagatcagcttcactcagaagatctaggtctggttctataaaaggatcgaggtatttccacctcctgagtagctgggactgccattgtgtaccacagtgcccagctgagggatctgtgccttaagtgagatccccgtcgaggtcaagatcaagatccaggtctatttcacgaccaagaagcagccgatcaaagtccagatctccatctccaaaaagaagtcgttccccatcaggaagtcctcgcagaagtgcaagtcctgaaagaatggactgaagctctcaagttcaccctttagggaaaagttattttgtttacattattataagggatttgtgatgtctgtaaagtgtaacctaggaaagataattcaaccatctaatcaaaatggatctggattactatgtaaattcacagcagtaagataatataaattttgttgaatgtattaacatcatatggtctgaaaatgtgggtttttatttggcacatttaaataaaatgtttctaactaga

SEQ ID NO: 317141 - DNA, 680 bp, Homo sapiens
ccaggttccgccccacgcctcggtgtatcctaccacgcgtttctgcttgtgttcgggagggtcaccccgcattatttagaacgttaagaattttgtcaaaagtctagtttctcagggatttgcggactttcaccagttttacgactaagttttgtcttggatagagggcattaaatgtgctttacccaatcttgaggatggcccgttttaaggcaaataagtaattgaaacttgggccagattttgcgtaacgtgcattcttctatttgcgtttttaaacagaaaccaaggtgtatgttggtaacctgggaactggcgctggcaaaggagagttagaaagggctttcagttattatggtcctttaagaactgtatggattgcgagaaatcctccaggatttgcctttgtggaattcgaagatcctagagatgcagaagatgcagtacgaggactggatggaaagtaagtaagatgttatgaatcttctgttcattaaaatatactgtggctagataatgaacttagtgctaaatttggattctgaagtctggaagagaccttaaatagctggtcatagtgttaaatgctaaaggcacacgaaggttaaagaagatagcggagatggagttagggcttggtaaagaccgccaaagtttgttgggggggaaggagtggttgg

SEQ ID NO: 317142 - DNA, 2553 bp, Homo sapiens
  misc_feature (1250)..(1250): n is a, c, g, or t
catcagtcaggaggccgtgcagtccgagatgggctcgtctcgggcaccctggatggggcgtgtgggtgggcacgggatgatggcactgctgctggctggtctcctcctgccagggaccttggctaagagcattggcaccttctcagacccctgtaaggaccccacgcgtatcacctcccctaacgacccctgcctcactgggaagggtgactccagcggcttcagtagctacagtggctccagcagttctggcagctccatttccagtgccagaagctctggtggtggctccagtggtagctccagcggatccagcattgcccagggtggttctgcaggatcttttaagccaggaacggggtattcccaggtcagctactcctccggatctggctctagtctacaaggtgcatccggttcctcccagctggggagcagcagctctcactcgggaagcagcggctctcactcgggaagcagcagctctcattcgagcagcagcagcagctttcagttcagcagcagcagcttccaagtagggaatggctctgctctgccaaccaatgacaactcttaccgcggaatactaaacccttcccagcctggacaaagctcttcctcttcccaaacctctggggtatccagcagtggccaaagcgtcagctccaaccagcgtccctgtagttcggacatccccgactctccctgcagtggagggcccatcgtctcgcactctggcccctacatccccagctcccactctgtgtcagggggtcagaggcctgtggtggtggtggtggaccagcacggttctggtgcccctggagtggttcaaggtcccccctgtagcaatggtggccttccaggcaagccctgtcccccaatcacctctgtagacaaatcctatggtggctacgaggtggtgggtggctcctctgacagttatctggttccaggcatgacctacagtaagggtaaaatctatcctgtgggctacttcaccaaagagaaccctgtgaaaggctctccaggggtcccttcctttgcagctgggccccccatctctgagggcaaatacttctccagcaaccccatcatccccagccagtcggcagcttcctcggccattgcgttccagccagtggggactggtggggtccagctctgtggaggcggctccacgggctccaagggaccctgctctccctccagttctcgagtccccagcagttctagcatttccagcagcnccggttcaccctaccatccctgcggcagtgcttcccagagcccctgctccccaccaggcaccggctccttcagcagcagctccagttcccaatcgagtggcaaaatcatccttcagccttgtggcagcaagtccagctcttctggtcacccttgcatgtctgtctcctccttgacactgactgggggccccgatggctctccccatcctgatccctccgctggtgccaagccctgtggctccagcagtgctggaaagatcccctgccgctccatccgggatatcctagcccaagtgaagcctctggggccccagctagctgaccctgaagttttcctaccccaaggagagttactcgacagtccataagtcaactgttgtgtgtgtgcatgccttgggcacaaacaagcacatacactatatcccatatgggagaaggccagtgcccaggcatagggttagctcagtttccctccttcccaaaagagtggttctgctttctctactaccctaaggttgcagactctctcttatcaccccttcctccttcctcttctcaaaatggtagattcaaagctcctctcttgattctctcctactgtttaaattcccattccaccacagtgcccctcagccagatcaccaccccttacaattccctctactgtgttgaaatggtccattgagtaacacccccatcaccttctcaactgggaaacccctgaaatgctctcagagcacctctgacgcctgaagaagttataccttcctcttcccctttaccaaataaagcaaagtcaaaccatcatctggaaacagtggccacttttcactgacctctcttcgacatctagtcaacccacccaatatgccactgggctttcgctcccaattccaccccaccctccattacagagctcaccacgccctcctagatcaccgtccccaacacacccattgcctctcaaggcccttatctcagccccttcctgtggccatttccctcagtgcccagatgattccctgggtgagggagacactggggcaccctcagaggttggagcaggctccctgctgtccctggatcctggacagatggctcagtaaactgtggggactaggtgcagactttttgccttcttggagtcctgggtctcctctgagagtctgggtggtgctcttcctacgcctctagaggtctctgtgtccctcattttccttcaaaagcgggctgtgtttctcttctaccttccagctcctcccacagaggaggaagacaataaatatttgttgaactgaaagca

SEQ ID NO: 317143 - DNA, 901 bp, Homo sapiens
tggtctttgaagctgctgcgctctcacctcaccctgcaaggcaggctcttttctgggctggcagtgcctgtgtgatgggcctcctctcctatgacttactccaggctcactgcccggcaccttctggagcacaccaaagccgaatccctcttctcaaaatggtagattcaaagctcctctcttgattctctcctactgtttaaattcccattccaccacagtgcccctcagccagatcaccaccccttacaattccctctactgtgttgaaatggtccattgagtaacacccccatcaccttctcaactgggaaacccctgaaatgctctcagagcacctctgacgcctgaagaagttataccttcctcttcccctttaccaaataaagcaaagtcaaaccatcatctggaaacagtggccacttttcactgacctctcttcgacatctagtcaacccacccaatatgccactgggctttcgctcccaattccaccccaccctccattacagagctcaccacgccctcctagatcaccgtccccaacacacccattgcctctcaaggcccttatctcagccccttcctgtggccatttccctcagtgcccagatgattccctgggtgagggagacactggggcaccctcagaggttggagcaggctccctgctgtccctggatcctggacagatggctcagtaaactgtggggactaggtgcagactttttgccttcttggagtcctgggtctcctctgagagtctgggtggtgctcttcctacgcctctagaggtctctgtgtccctcattttccttcaaaagcgggctgtgtttctcttctaccttccagctcctcccacagaggaggaagacaataaatatttgttgaactgaaagca

SEQ ID NO: 317144 - DNA, 366 bp, Homo sapiens
ttaaattcgcggccgcgtcgactttttccacacatagattgacgtttccctgagctctttattcaattccattagtctatctgtttattattttatgtataccataatgtattcaaatatagaataaacagtttaggggatggataagaatcaataatattttccatctttcaaaacaatataaatacatctataaattggacaatagatcaaatgtttactccataacggacagggatctcaagaatccatgataggtaagaatatttcttaaactatcctggagcctatacataatgactacagagtctttttatcagacaactgataaaagaaagagagacagtgactattagaaatgtgttt

SEQ ID NO: 317145 - DNA, 1199 bp, Homo sapiens
gtaaattcagcacccccaccaccccctccgccgccaccttccagtgttttggcttctgggcatcataccacatcagctcaagccttacaccacccacctcatcaaggacctccactttttccttcgagtgctcatccaactgtaccaccgtatccctcacaagctacacatcataccactttgggaccgggaccccagcaccagccttctggaacagggccacattgtccattacctgtcacaggtcctcatctccagccccaaggaccaaacagtattccaacacctactgcttcagggttctgtcctcatcctggctctgtggccctgccacatggggttcaaggacctcagcaggcatctccagtgcctggacagattccaattcacagagcacaggtgccaccaacatttcaaaacaattaccatgggtcagggtggcattaaaatggactccaaaaacatttttttaaatgttctgtaagataaactgtatatttcatatgtacctgttaaggtactttttaaagcttgtacatgaacctttgtataaaaaacaccagtgctctttcgttgtatttttctcatttttgctttttaaaattcctttaaaaaatgtgctgttaagccagtattaggtatctttattttgtaagtgaacattccagctgtttttttctggcagatctgatgctgatttgatgctgtatgatcttttttttttttttagttaaattcatttagtgaatgttctattattttatacatacacattaagtactcagctaagtaatggcactatgaggattttttttttctttcctgtcagcagcagttctgtgaatgcatcttaggtataaaaatgcaatacagatttttatattttggtgtggacatggctcattttgttttaccagttatttgcaagcaaaatgtaatttaatgtatagatgatttctaatgtctcctgacaaactgtaaatactgcatttcttttgcgtatataattgcttacagcttttctcatttgatatatagcattgtacatatgacaagtcttttgcaaaactgtgtgatctttgtgaaagtagtacagtatatgacctttaatttcttttttattttaaatatactgtcacactgaagcactggttgggcattttaattcatgttaataaatcacaattatgtcagtttta

SEQ ID NO: 317146 - DNA, 662 bp, Homo sapiens
accggcccttgattgggcacagaaattgtgagcagacagtagtagtgatataataaaagaaggcaatcaaaatttaattttatcatgccctctcacaggtttgtgttataattgtaagcccatattacttgtgttagtagttttgtctataggtaacataatgacagtagtgtaaagtttctgttcaagaaacatatgttgtaaagttactttatacaagatacctgccaaaggaaatggtcttactttcaaatgactttgaaagcatgtataattgcaaacagagcaggagttgaaatgggcacagaaatttaatgtatagatgatttctaatgtctcctgacaaactgtaaatactgcatttcttttgcgtatataattgcttacagcttttctcatttgatatatagcattgtacatatgacaagtcttttgcaaaactgtgtgatctttgtgaaagtagtacagtatatgacctttaatttctgtgcccatttcaaatattttgcatatcgcacctgcgtcgagaggctggaaggctgacgcacccagcaacgtagtgtttatccctccgacataaccaagcaagctctgctatacagattggacttctgcggccatcacgatcattgtcgcggaaatttctgtgcccattacaaggt

SEQ ID NO: 317147 - DNA, 2599 bp, Homo sapiens
gtaaattcagcacccccaccaccccctccgccgccaccttccagtgttttggcttctgggcatcataccacatcagctcaagccttacaccacccacctcatcaaggacctccactttttccttcgagtgctcatccaactgtaccaccgtatccctcacaagctacacatcataccactttgggaccgggaccccagcaccagccttctggaacagggccacattgtccattacctgtcacaggtcctcatctccagccccaaggaccaaacagtattccaacacctactgcttcagggttctgtcctcatcctggctctgtggccctgccacatggggttcaaggacctcagcaggcatctccagtgcctggacagattccaattcacagagcacaggtgccaccaacatttcaaaacaattaccatgggtcagggtggcattaaaatggactccaaaaacatttttttaaatgttctgtaagataaactgtatatttcatatgtacctgttaaggtactttttaaagcttgtacatgaacctttgtataaaaaacaccagtgctctttcgttgtatttttctcatttttgctttttaaaattcctttaaaaaatgtgctgttaagccagtattaggtatctttattttgtaagtgaacattccagctgtttttttctggcagatctgatgctgatttgatgctgtatgatcttttttttttttttagttaaattcatttagtgaatgttctattattttatacatacacattaagtactcagctaagtaatggcactatgaggattttttttttctttcctgtcagcagcagttctgtgaatgcatcttaggtataaaaatgcaatacagatttttatattttggtgtggacatggctcattttgttttaccagttatttgcaagcaaaatgtaatttaatgtatagatgatttctaatgtctcctgacaaactgtaaatactgcatttcttttgcgtatataattgcttacagcttttctcatttgatatatagcattgtacatatgacaagtcttttgcaaaactgtgtgatctttgtgaaagtagtacagtatatgacctttaatttcttttttattttaaatatactgtcacactgaagcactggttgggcattttaattcatgttaataaatcacaattatgtcagttttaccagattgtcctgtacaacttctaagatcgggatctgtgtgtttctacagaagttctagttttcaaatatagattgtaaggagccttcaattttctttagcgactactacctcagcaacaggaggcagcaaggggctgttcctgtggtggtttctgtttgcatttttgcaggagccataggaaactactgaaatgattgtgctgggtaaattaaggatctggcatcatacaaaatgaagccagaccactaatgcattacagtagttcttgaatacaaggtacaacaactgtttgaaaatatgggtagtttgcccaaaacaggaaaatttgtcttgggtgtaaaaactaaagaaaaaaggcattattcctagatctctcagtgaaatgaaaatggcctcttaagtgaacgtttttattgctaaaatataaaatgctagttagttattaattattaatcttcaaaaaattaaaaatttcccagcctttgtcttctacctctgaggattcagtaagtacatccaataataatgatactgttttatcaatcaacatatttttcatcatccaattacctgacataatttggcacaggatacaaattctgtgcatcagagaaagtaaacactaaaatgactgcgtgacctcattcagtcatgtttttacactttgaacctctatttatttccttttgaaaattagctaatgatggtacattaacgcagctcacttagggctcaatcctaatcacagcttcaaattttagaagaacatataggccaagtttgccatcctcaatttgtccaacaaaattctatttatggtatttagtaaagaaacatttgtctgagaagaaatggttttacatcatctatcctgatagtttcaaacagaataaaggtaactagcatgtgaaataaaaatattcttcttaaaaggtttgtccttctaagcattttaaattcttcactggcttgaaatgtgcctactacagaaatatgcatacagaagcttttgtgtgaactgcagaatcttatacattttgattccttgatgaagtatatactctaaaatacagtcttctaccaaaatttcattcaagttatttaaaagggggagaaaaaaggagaatttaggaaataacctgaactatggatagaaactgaagaagttctctactccaatggaaagtttccttactttatcgtggtaactagttatgtatggtccaggtatgggaagaagcaagttagtaaatcggttttcacctaagaagtttatgactctgaagatcttatatccaccttttctctgcctttgggcagttctgtctgccaacttctagatagccagctcctgtatctgctataaacacatatgtgatccactgcttgtcattttcc

SEQ ID NO: 317148 - DNA, 1429 bp, Homo sapiens
gtaaattcagcacccccaccaccccctccgccgccaccttccagtgttttggcttctgggcatcataccacatcagctcaagccttacaccacccacctcatcaaggacctccactttttccttcgagtgctcatccaactgtaccaccgtatccctcacaagctacacatcataccactttgggaccgggaccccagcaccagccttctggaacagggccacattgtccattacctgtcacaggtcctcatctccagccccaaggaccaaacagtattccaacacctactgcttcagggttctgtcctcatcctggctctgtggccctgccacatggggttcaaggacctcagcaggcatctccagtgcctggacagattccaattcacagagcacaggtgccaccaacatttcaaaacaattaccatgggtcagggtggcattaaaatggactccaaaaacatttttttaaatgttctgtaagataaactgtatatttcatatgtacctgttaaggtactttttaaagcttgtacatgaacctttgtataaaaaacaccagtgctctttcgttgtatttttctcatttttgctttttaaaattcctttaaaaaatgtgctgttaagccagtattaggtatctttattttgtaagtgaacattccagctgtttttttctggcagatctgatgctgatttgatgctgtatgatcttttttttttttttagttaaattcatttagtgaatgttctattattttatacatacacattaagtactcagctaagtaatggcactatgaggattttttttttctttcctgtcagcagcagttctgtgaatgcatcttaggtataaaaatgcaatacagatttttatattttggtgtggacatggctcattttgttttaccagttatttgcaagcaaaatgtaatttaatgtatagatgatttctaatgtctcctgacaaactgtaaatactgcatttcttttgcgtatataattgcttacagcttttctcatttgatatatagcattgtacatatgacaagtcttttgcaaaactgtgtgatctttgtgaaagtagtacagtatatgacctttaatttcttttttattttaaatatactgtcacactgaagcactggttgggcattttaattcatgttaataaatcacaattatgtcagttttaaaacacaaaacaaaaaaccaacaataaaaacaacacgcgtgggtgcgggacgcactgcgggagaccccctggagaaaaagctttttcgaagcaccacttgcggtgtgggggcgccgcggggggcccccatggtgggttacagtggaacagttggctacagagagtggttccccaagggagaacaccggtcgcaggcaaaagaggcgtgggaattccaccgcaaaaaaaag

SEQ ID NO: 317149 - DNA, 1313 bp, Homo sapiens
gtaaattcagcacccccaccaccccctccgccgccaccttccagtgttttggcttctgggcatcataccacatcagctcaagccttacaccacccacctcatcaaggacctccactttttccttcgagtgctcatccaactgtaccaccgtatccctcacaagctacacatcataccactttgggaccgggaccccagcaccagccttctggaacagggccacattgtccattacctgtcacaggtcctcatctccagccccaaggaccaaacagtattccaacacctactgcttcagggttctgtcctcatcctggctctgtggccctgccacatggggttcaaggacctcagcaggcatctccagtgcctggacagattccaattcacagagcacaggtgccaccaacatttcaaaacaattaccatgggtcagggtggcattaaaatggactccaaaaacatttttttaaatgttctgtaagataaactgtatatttcatatgtacctgttaaggtactttttaaagcttgtacatgaacctttgtataaaaaacaccagtgctctttcgttgtatttttctcatttttgctttttaaaattcctttaaaaaatgtgctgttaagccagtattaggtatctttattttgtaagtgaacattccagctgtttttttctggcagatctgatgctgatttgatgctgtatgatcttttttttttttttagttaaattcatttagtgaatgttctattattttatacatacacattaagtactcagctaagtaatggcactatgaggattttttttttctttcctgtcagcagcagttctgtgaatgcatcttaggtataaaaatgcaatacagatttttatattttggtgtggacatggctcattttgttttaccagttatttgcaagcaaaatgtaatttaatgtatagatgatttctaatgtctcctgacaaactgtaaatactgcatttcttttgcgtatataattgcttacagcttttctcatttgatatatagcattgtacatatgacaagtcttttgcaaaactgtgtgatctttgtgaaagtagtacagtatatgacctttaatttctgtgcccatttcaatgaaatgggcacagaaatatcccatgtatttcccccacacaggcacagcatccctcatcatcagcatcccccaccagagtggtatgtaagttacagttaatgagccgacattgacacatcatcacctaaagtccatagttaacactaaggttctctctaggtgaagtacatgctgtgggttagga

SEQ ID NO: 317150 - DNA, 2141 bp, Homo sapiens
accggcccttgattgggcacagaaattgtgagcagacagtagtagtgatataataaaagaaggcaatcaaaatttaattttatcatgccctctcacaggtttgtgttataattgtaagcccatattacttgtgttagtagttttgtctataggtaacataatgacagtagtgtaaagtttctgttcaagaaacatatgttgtaaagttactttatacaagatacctgccaaaggaaatggtcttactttcaaatgactttgaaagcatgtataattgcaaacagagcaggagttgaaatgggcacagaaattgccttccttgacctccctgaaatctcattatctatctcagacaactgaggaatgcaaccacacctggatggacctgttacaagatagtgcctgcctctcaggctcattcgaatttcaaagagaatcatttacaagttaatttctgtgcccttgaaatgggcacagaaatttaatgtatagatgatttctaatgtctcctgacaaactgtaaatactgcatttcttttgcgtatataattgcttacagcttttctcatttgatatatagcattgtacatatgacaagtcttttgcaaaactgtgtgatctttgtgaaagtagtacagtatatgacctttaatttcttttttattttaaatatactgtcacactgaagcactggttgggcattttaattcatgttaataaatcacaattatgtcagttttaccagattgtcctgtacaacttctaagatcgggatctgtgtgtttctacagaagttctagttttcaaatatagattgtaaggagccttcaattttctttagcgactactacctcagcaacaggaggcagcaaggggctgttcctgtggtggtttctgtttgcatttttgcaggagccataggaaactactgaaatgattgtgctgggtaaattaaggatctggcatcatacaaaatgaagccagaccactaatgcattacagtagttcttgaatacaaggtacaacaactgtttgaaaatatgggtagtttgcccaaaacaggaaaatttgtcttgggtgtaaaaactaaagaaaaaaggcattattcctagatctctcagtgaaatgaaaatggcctcttaagtgaacgtttttattgctaaaatataaaatgctagttagttattaattattaatcttcaaaaaattaaaaatttcccagcctttgtcttctacctctgaggattcagtaagtacatccaataataatgatactgttttatcaatcaacatatttttcatcatccaattacctgacataatttggcacaggatacaaattctgtgcatcagagaaagtaaacactaaaatgactgcgtgacctcattcagtcatgtttttacactttgaacctctatttatttccttttgaaaattagctaatgatggtacattaacgcagctcacttagggctcaatcctaatcacagcttcaaattttagaagaacatataggccaagtttgccatcctcaatttgtccaacaaaattctatttatggtatttagtaaagaaacatttgtctgagaagaaatggttttacatcatctatcctgatagtttcaaacagaataaaggtaactagcatgtgaaataaaaatattcttcttaaaaggtttgtccttctaagcattttaaattcttcactggcttgaaatgtgcctactacagaaatatgcatacagaagcttttgtgtgaactgcagaatcttatacattttgattccttgatgaagtatatactctaaaatacagtcttctaccaaaatttcattcaagttatttaaaagggggagaaaaaaggagaatttaggaaataacctgaactatggatagaaactgaagaagttctctactccaatggaaagtttccttactttatcgtggtaactagttatgtatggtccaggtatgggaagaagcaagttagtaaatcggttttcacctaagaagtttatgactctgaagatcttatatccaccttttctctgcctttgggcagttctgtctgccaacttctagatagccagctcctgtatctgctataaacacatatgtgatccactgcttgtcattttcc

SEQ ID NO: 317151 - DNA, 1971 bp, Homo sapiens
accggcccttgattgggcacagaaattgtgagcagacagtagtagtgatataataaaagaaggcaatcaaaatttaattttatcatgccctctcacaggtttgtgttataattgtaagcccatattacttgtgttagtagttttgtctataggtaacataatgacagtagtgtaaagtttctgttcaagaaacatatgttgtaaagttactttatacaagatacctgccaaaggaaatggtcttactttcaaatgactttgaaagcatgtataattgcaaacagagcaggagttgaaatgggcacagaaatttaatgtatagatgatttctaatgtctcctgacaaactgtaaatactgcatttcttttgcgtatataattgcttacagcttttctcatttgatatatagcattgtacatatgacaagtcttttgcaaaactgtgtgatctttgtgaaagtagtacagtatatgacctttaatttcttttttattttaaatatactgtcacactgaagcactggttgggcattttaattcatgttaataaatcacaattatgtcagttttaccagattgtcctgtacaacttctaagatcgggatctgtgtgtttctacagaagttctagttttcaaatatagattgtaaggagccttcaattttctttagcgactactacctcagcaacaggaggcagcaaggggctgttcctgtggtggtttctgtttgcatttttgcaggagccataggaaactactgaaatgattgtgctgggtaaattaaggatctggcatcatacaaaatgaagccagaccactaatgcattacagtagttcttgaatacaaggtacaacaactgtttgaaaatatgggtagtttgcccaaaacaggaaaatttgtcttgggtgtaaaaactaaagaaaaaaggcattattcctagatctctcagtgaaatgaaaatggcctcttaagtgaacgtttttattgctaaaatataaaatgctagttagttattaattattaatcttcaaaaaattaaaaatttcccagcctttgtcttctacctctgaggattcagtaagtacatccaataataatgatactgttttatcaatcaacatatttttcatcatccaattacctgacataatttggcacaggatacaaattctgtgcatcagagaaagtaaacactaaaatgactgcgtgacctcattcagtcatgtttttacactttgaacctctatttatttccttttgaaaattagctaatgatggtacattaacgcagctcacttagggctcaatcctaatcacagcttcaaattttagaagaacatataggccaagtttgccatcctcaatttgtccaacaaaattctatttatggtatttagtaaagaaacatttgtctgagaagaaatggttttacatcatctatcctgatagtttcaaacagaataaaggtaactagcatgtgaaataaaaatattcttcttaaaaggtttgtccttctaagcattttaaattcttcactggcttgaaatgtgcctactacagaaatatgcatacagaagcttttgtgtgaactgcagaatcttatacattttgattccttgatgaagtatatactctaaaatacagtcttctaccaaaatttcattcaagttatttaaaagggggagaaaaaaggagaatttaggaaataacctgaactatggatagaaactgaagaagttctctactccaatggaaagtttccttactttatcgtggtaactagttatgtatggtccaggtatgggaagaagcaagttagtaaatcggttttcacctaagaagtttatgactctgaagatcttatatccaccttttctctgcctttgggcagttctgtctgccaacttctagatagccagctcctgtatctgctataaacacatatgtgatccactgcttgtcattttcc

SEQ ID NO: 317152 - DNA, 378 bp, Homo sapiens
ggctcttctctgtttctaatattgataaagaacttctactactatgttagtaacgttattctaaaggaaaggtgcaagggaaagagttaacaggtcttagtgtaacattttgtcatttatttcaatctctcatgggagcttcattaagctttttataacaggaaggctgagggaattcaggaaaaatgaaaaattgcatagctacaagaaaatataaaagagtaacccgacagaatagaaagaacacagagctggtagtaagtagacttcattaagaatcctggattaggccaggcacggtggttcaggagtgtaatcccagcactttgggaggccgaggtgggtggattacctgaggttgggagttcaagaccagcc

SEQ ID NO: 317153 - DNA, 2365 bp, Homo sapiens
ggctgcgccacgtcggcgcgcggcggccgcgcccccttaacggcagtggcactcacccggctcgcgcggccccggcgccccacgcgcgcgcgtcgttctcccgcccgctcgctccccggcgctcacacctgagctcactcgcgcacgcccgcccggcccgagaaccgcgccgccgcctcggccccgcggaagccccgccgcgccatgtcttcgcctcccgaagggaaactagagactaaagctggacacccgcccgccgtgaaagctggtggaatgcgaattgtgcagaaacacccacatacaggagacaccaaagaagagaaagacaaggatgaccaggaatgggaaagccccagtccacctaaacccactgtgttcatctctggggtcatcgcccggggtgacaaagatttccccccggcggctgcgcaggtggctcaccagaagccgcatgcctccatggacaagcatccttccccaagaacccagcacatccagcagccacgcaagtgagcctggagtccaccagcctgccccatggccccggctctgctgcacttggtatttccctgacagagagaaccagcagtttcgcccaaatcctactctgctgggaaatctaaggcaaaaccaagtgctctgtcctttgccttacatttccatatttaaaactagaaacagctccagcccaaaccttgtttatggggagtctggttggatgtcatttgaggatcattgtgcccctagaggtgccattagcagaatttgccaagatccgagaaaaattttagctttagttctatttcagcagtcacctgacgtccttgtctatggtcttaaaaacaagaaggcacacatttgagaagatgagattaaggttaggagaaaacctcagtcattgcatgctttttagtatgggccaataaaatctcaacacctgtgggagagtaagaactaagggaatgagtttgggcggcccctcataaaggaccttagaggcagggaacagcaatgccaaatttccctctctcgtgagatgggggatcctgtgcaggctgatgaggcacccatgagaaaagccgaaaaagcatgcatcttagaaatagcccctcaattccaggagtcaacatgccaaagaatgaggctggagacaggtagctccgagggaggacttctggcatgagatctcggcacggcaagcccagcatcgcctcagcccagacaggctccaccaggagatcaagcaagggctgcctttcaggagtcacctcctgagccacttcagagttctggaagtgaccacggaccagggtggaggaatagacttctagttcattctgggacacttgagccagagagttgaaagcttggaaagaccagataagaaacctgccctttgtctccctagggacatgagacaccacattccatttgtgctagaaaaacctatccactgatgagtctaactgttccaaacgcctcccacctggtgtgcacagctgcctgggtccattgtcacttgggtgcatcaggttgtcctccgatttttagatgagtttcctgtctagagatgtcctagtctgctcactggctggtggcagtagggtaccctgcgtcctcgaaaagccagagggttcacctagtcagacgaaactccagaacagtgcttgtggagggcctgactgtcctgctcacccacagccgatctgctgcaggtcagcaactgtgtcgtgagcagctgccaaccaccagcctttctggtgctgttctccagttcacgtctgccagctggtgagggcagaggcagacctggtcagacccagcgcccctcctccctgagggagcatggcacagcctcacacttgaaagacggtgtttggtttcccatctaatcaacttaagggaagccggcatgtacccttcaaggccctgtcaccacctatttcctgatcagttggtataaactgagggtggcttttagagacccagacttggttggcagcgctgccatggaacaccccagcaagcacctcccagcctgcctttcggagcagcacccaggaggggatgccgcgctccagcaacaccaggtcaggcctgtgcagacccctgccctgccgctgcagaaatccagaagcatccttaatgcttctcagtcttcagccagagggagggctgttatttccagaggtgcgctttttatgtacttttagctagatgtggcatgcatctgtgagctttagatcattaaatccaaaatgtttgcctaaatgagtttatcagttgttaacttcaagaatattaaatgatttataataaagctcctgcatttctctccaaaaaaaaaaaggggccccaaagaacc

SEQ ID NO: 317154 - DNA, 2285 bp, Homo sapiens
ggctgcgccacgtcggcgcgcggcggccgcgcccccttaacggcagtggcactcacccggctcgcgcggccccggcgccccacgcgcgcgcgtcgttctcccgcccgctcgctccccggcgctcacacctgagctcactcgcgcacgcccgcccggcccgagaaccgcgccgccgcctcggccccgcggaagccccgccgcgccatgtcttcgcctcccgaagggaaactagagactaaagctggacacccgcccgccgtgaaagctggtggaatgcgaattgtgcagaaacacccacatacaggagacaccaaagaagagaaagacaaggatgaccaggaatgggaaagccccagtccacctaaacccactgtgttcatctctggggtcatcgcccggggtgacaaagatttccccccggcggctgcgcaggtggctcaccagaagccgcatgcctccatggacaagcatccttccccaagaacccagcacatccagcagccacgcaagtgagcctggagtccaccagcctgccccatggccccggctctgctgcacttggtatttccctgacagagagaaccagcagtttcgcccaaatcctactctgctgggaaatctaaggcaaaaccaagtgctctgtcctttgccttacatttccatatttaaaactagaaacagctccagcccaaaccttgtttatggggagtctggttggatgtcatttgaggatcattgtgcccctagaggtgccattagcagaatttgccaagatccgagaaaaattttagctttagttctatttcagcagtcacctgacgtccttgtctatggtcttaaaaacaagaaggcacacatttgagaagatgagattaaggttaggagaaaacctcagtcattgcatgctttttagtatgggccaataaaatctcaacacctgtgggagagtaagaactaagggaatgagtttgggcggcccctcataaaggaccttagaggcagggaacagcaatgccaaatttccctctctcgtgagatgggggatcctgtgcaggctgatgaggcacccatgagaaaagccgaaaaagcatgcatcttagaaatagcccctcaattccaggagtcaacatgccaaagaatgaggctggagacaggtagctccgagggaggacttctggcatgagatctcggcacggcaagcccagcatcgcctcagcccagacaggctccaccaggagatcaagcaagggctgcctttcaggagtcacctcctgagccacttcagagttctggaagtgaccacggaccagggtggaggaatagacttctagttcattctgggacacttgagccagagagttgaaagcttggaaagaccagataagaaacctgccctttgtctccctagggacatgagacaccacattccatttgtgctagaaaaacctatccactgatgagtctaactgttccaaacgcctcccacctggtgtgcacagctgcctgggtccattgtcacttgggtgcatcaggttgtcctccgatttttagatgagtttcctgtctagagatgtcctagtctgctcactggctggtggcagtagggtaccctgcgtcctcgggcctgactgtcctgctcacccacagccgatctgctgcaggtcagcaactgtgtcgtgagcagctgccaaccaccagcctttctggtgctgttctccagttcacgtctgccagctggtgagggcagaggcagacctggtcagacccagcgcccctcctccctgagggagcatggcacagcctcacacttgaaagacggtgtttggtttcccatctaatcaacttaagggaagccggcatgtacccttcaaggccctgtcaccacctatttcctgatcagttggtataaactgagggtggcttttagagacccagacttggttggcagcgctgccatggaacaccccagcaagcacctcccagcctgcctttcggagcagcacccaggaggggatgccgcgctccagcaacaccaggtcaggcctgtgcagacccctgccctgccgctgcagaaatccagaagcatccttaatgcttctcagtcttcagccagagggagggctgttatttccagaggtgcgctttttatgtacttttagctagatgtggcatgcatctgtgagctttagatcattaaatccaaaatgtttgcctaaatgagtttatcagttgttaacttcaagaatattaaatgatttataataaagctcctgcatttctctcca

SEQ ID NO: 317155 - DNA, 1721 bp, Homo sapiens
  misc_feature (24)..(24): n is a, c, g, or t
  misc_feature (35)..(35): n is a, c, g, or t
  misc_feature (41)..(41): n is a, c, g, or t
aaggtgtccttgtgggttaacccngcccccttccnggttancgggatattaaaatagaaacagctccagcccaaaccttgtttatggggagtctggttggatgtcatttgaggatcattgtgcccctagaggtgccattagcagaatttgccaagatccgagaaaaattttagctttagttctatttcagcagtcacctgacgtccttgtctatggtcttaaaaacaagaaggcacacatttgagaagatgagattaaggttaggagaaaacctcagtcattgcatgctttttagtatgggccaataaaatctcaacacctgtgggagagtaagaactaagggaatgagtttgggcggcccctcataaaggaccttagaggcagggaacagcaatgccaaatttccctctctcgtgagatgggggatcctgtgcaggctgatgaggcacccatgagaaaagccgaaaaagcatgcatcttagaaatagcccctcaattccaggagtcaacatgccaaagaatgaggctggagacaggtagctccgagggaggacttctggcatgagatctcggcacggcaagcccagcatcgcctcagcccagacaggctccaccaggagatcaagcaagggctgcctttcaggagtcacctcctgagccacttcagagttctggaagtgaccacggaccagggtggaggaatagacttctagttcattctgggacacttgagccagagagttgaaagcttggaaagaccagataagaaacctgccctttgtctccctagggacatgagacaccacattccatttgtgctagaaaaacctatccactgatgagtctaactgttccaaacgcctcccacctggtgtgcacagctgcctgggtccattgtcacttgggtgcatcaggttgtcctccgatttttagatgagtttcctgtctagagatgtcctagtctgctcactggctggtggcagtagggtaccctgcgtcctcgaaaagccagagggttcacctagtcagacgaaactccagaacagtgcttgtggagggcctgactgtcctgctcacccacagccgatctgctgcaggtcagcaactgtgtcgtgagcagctgccaaccaccagcctttctggtgctgttctccagttcacgtctgccagctggtgagggcagaggcagacctggtcagacccagcgcccctcctccctgagggagcatggcacagcctcacacttgaaagacggtgtttggtttcccatctaatcaacttaagggaagccggcatgtacccttcaaggccctgtcaccacctatttcctgatcagttggtataaactgagggtggcttttagagacccagacttggttggcagcgctgccatggaacaccccagcaagcacctcccagcctgcctttcggagcagcacccaggaggggatgccgcgctccagcaacaccaggtcaggcctgtgcagacccctgccctgccgctgcagaaatccagaagcatccttaatgcttctcagtcttcagccagagggagggctgttatttccagaggtgcgctttttatgtacttttagctagatgtggcatgcatctgtgagctttagatcattaaatccaaaatgtttgcctaaatgagtttatcagttgttaacttcaagaatattaaatgatttataataaagctcctgcatttctctcca

SEQ ID NO: 317156 - DNA, 2953 bp, Homo sapiens
  misc_feature (2341)..(2342): n is a, c, g, or t
ggctgcgccacgtcggcgcgcggcggccgcgcccccttaacggcagtggcactcacccggctcgcgcggccccggcgccccacgcgcgcgcgtcgttctcccgcccgctcgctccccggcgctcacacctgagctcactcgcgcacgcccgcccggcccgagaaccgcgccgccgcctcggccccgcggaagccccgccgcgccatgtcttcgcctcccgaagggaaactagagactaaagctggacacccgcccgccgtgaaagctggtggaatgcgaattgtgcagaaacacccacatacaggagacaccaaagaagagaaagacaaggatgaccaggaatgggaaagccccagtccacctaaacccactgtgttcatctctggggtcatcgcccggggtgacaaagatttccccccggcggctgcgcaggtggctcaccagaagccgcatgcctccatggacaagcatccttccccaagaacccagcacatccagcagccacgcaagtgagcctggagtccaccagcctgccccatggccccggctctgctgcacttggtatttccctgacagagagaaccagcagtttcgcccaaatcctactctgctgggaaatctaaggcaaaaccaagtgctctgtcctttgccttacatttccatatttaaaactagaaacagctccagcccaaaccttgtttatggggagtctggttggatgtcatttgaggatcattgtgcccctagaggtgccattagcagaatttgccaagatccgagaaaaattttagctttagttctatttcagcagtcacctgacgtccttgtctatggtcttaaaaacaagaaggcacacatttgagaagatgagattaaggttaggagaaaacctcagtcattgcatgctttttagtatgggccaataaaatctcaacacctgtgggagagtaagaactaagggaatgagtttgggcggcccctcataaaggaccttagaggcagggaacagcaatgccaaatttccctctctcgtgagatgggggatcctgtgcaggctgatgaggcacccatgagaaaagccgaaaaagcatgcatcttagaaatagcccctcaattccaggagtcaacatgccaaagaatgaggctggagacaggtagctccgagggaggacttctggcatgagatctcggcacggcaagcccagcatcgcctcagcccagacaggctccaccaggagatcaagcaagggctgcctttcaggagtcacctcctgagccacttcagagttctggaagtgaccacggaccagggtggaggaatagacttctagttcattctgggacacttgagccagagagttgaaagcttggaaagaccagataagaaacctgccctttgtctccctagggacatgagacaccacattccatttgtgctagaaaaacctatccactgatgagtctaactgttccaaacgcctcccacctggtgtgcacagctgcctgggtccattgtcacttgggtgcatcaggttgtcctccgatttttagatgagtttcctgtctagagatgtcctagtctgctcactggctggtggcagtagggtaccctgcgtcctcgaaaagccagagggttcacctagtcagacgaaactccagaacagtgcttgtggagggcctgactgtcctgctcacccacagccgatctgctgcaggtcagcaactgtgtcgtgagcagctgccaaccaccagcctttctggtgctgttctccagttcacgtctgccagctggtgagggcagaggcagacctggtcagacccagcgcccctcctccctgagggagcatggcacagcctcacacttgaaagacggtgtttggtttcccatctaatcaacttaagggaagccggcatgtacccttcaaggccctgtcaccacctatttcctgatcagttggtataaactgagggtggcttttagagacccagacttggttggcagcgctgccatggaacaccccagcaagcacctcccagcctgcctttcggagcagcacccaggaggggatgccgcgctccagcaacaccaggtcaggcctgtgcagacccctgccctgccgctgcagaaatccagaagcatccttaatgcttctcagtcttcagccagagggagggctgttatttccagaggtgcgctttttatgtacttttagctagatgtggcatgcatctgtgagctttagatcattaaatccaaaatgtttgcctaaatgagtttatcagttgttaacttcaagaatattaaatgatttataataaagctcctgcatttctctccaannaaaaaaaaaaaacaaaaaaaaaaaaaaaaacaacacacaacaaaaaaaaaaacaaaaaaaaaaacaaaaaacaccgacaccaaaacacaagcggggggcaccacacacaacaacccggaagcggcgccacaatcaacacaccaccataccaaacaagagccccaaaagagggcgcaaacaacacacaagaggggcacgcaaactacaaaagaggcaggagaggacaacagacacgcggacaacaggagcgaccacccacccccgcgggcggcgacacaaccaccccatcacccacaccccacgacagccccgcgaggcaacacaccacaccccaagcaaacgaggcggcacaccacggagaaacaccaccgcaaaaactcagcagccccacggaaccgccatgacacgcccacacaacgcgcgggggcgaccagcaccgacacaacaggcacggcacgacgagcaggcgaacacagagcgagccgcacgcgacgcggcgcaggaacagacacgaagcgcggacagagagacgggcagacagcagcgagcagcacgggacagcggcagaacgcaggagacgaagcgcgcagcgagaagaacaacgtgaacaa

SEQ ID NO: 317157 - DNA, 1728 bp, Homo sapiens
ggctgcgccacgtcggcgcgcggcggccgcgcccccttaacggcagtggcactcacccggctcgcgcggccccggcgccccacgcgcgcgcgtcgttctcccgcccgctcgctccccggcgctcacacctgagctcactcgcgcacgcccgcccggcccgagaaccgcgccgccgcctcggccccgcggaagccccgccgcgccatgtcttcgcctcccgaagggaaactagagactaaagctggacacccgcccgccgtgaaagctggtggaatgcgaattgtgcagaaacacccacatacaggagacaccaaagaagagaaagacaaggatgaccaggaatgggaaagccccagtccacctaaacccactgtgttcatctctggggtcatcgcccggggtgacaaagatttccccccggcggctgcgcaggtggctcaccagaagccgcatgcctccatggacaagcatccttccccaagaacccagcacatccagcagccacgcaagagtcaacatgccaaagaatgaggctggagacaggtagctccgagggaggacttctggcatgagatctcggcacggcaagcccagcatcgcctcagcccagacaggctccaccaggagatcaagcaagggctgcctttcaggagtcacctcctgagccacttcagagttctggaagtgaccacggaccagggtggaggaatagacttctagttcattctgggacacttgagccagagagttgaaagcttggaaagaccagataagaaacctgccctttgtctccctagggacatgagacaccacattccatttgtgctagaaaaacctatccactgatgagtctaactgttccaaacgcctcccacctggtgtgcacagctgcctgggtccattgtcacttgggtgcatcaggttgtcctccgatttttagatgagtttcctgtctagagatgtcctagtctgctcactggctggtggcagtagggtaccctgcgtcctcgaaaagccagagggttcacctagtcagacgaaactccagaacagtgcttgtggagggcctgactgtcctgctcacccacagccgatctgctgcaggtcagcaactgtgtcgtgagcagctgccaaccaccagcctttctggtgctgttctccagttcacgtctgccagctggtgagggcagaggcagacctggtcagacccagcgcccctcctccctgagggagcatggcacagcctcacacttgaaagacggtgtttggtttcccatctaatcaacttaagggaagccggcatgtacccttcaaggccctgtcaccacctatttcctgatcagttggtataaactgagggtggcttttagagacccagacttggttggcagcgctgccatggaacaccccagcaagcacctcccagcctgcctttcggagcagcacccaggaggggatgccgcgctccagcaacaccaggtcaggcctgtgcagacccctgccctgccgctgcagaaatccagaagcatccttaatgcttctcagtcttcagccagagggagggctgttatttccagaggtgcgctttttatgtacttttagctagatgtggcatgcatctgtgagctttagatcattaaatccaaaatgtttgcctaaatgagtttatcagttgttaacttcaagaatattaaatgatttataataaagctcctgcatttctctcca

SEQ ID NO: 317158 - DNA, 2304 bp, Homo sapiens
ggctgcgccacgtcggcgcgcggcggccgcgcccccttaacggcagtggcactcacccggctcgcgcggccccggcgccccacgcgcgcgcgtcgttctcccgcccgctcgctccccggcgctcacacctgagctcactcgcgcacgcccgcccggcccgagaaccgcgccgccgcctcggccccgcggaagccccgccgcgccatgtcttcgcctcccgaagggaaactagagactaaagctggacacccgcccgccgtgaaagctggtggaatgcgaattgtgcagaaacacccacatacaggagacaccaaagaagagaaagacaaggatgaccaggaatgggaaagccccagtccacctaaacccactgtgttcatctctggggtcatcgcccggggtgacaaagatttccccccggcggctgcgcaggtggctcaccagaagccgcatgcctccatggacaagcatccttccccaagaacccagcacatccagcagccacgcaagtgagcctggagtccaccagcctgccccatggccccggctctgctgcacttggtatttccctgacagagagaaccagcagtttcgcccaaatcctactctgctgggaaatctaaggcaaaaccaagtgctctgtcctttgccttacatttccatatttaaaactagaaacagctccagcccaaaccttgtttatggggagtctggttggatgtcatttgaggatcattgtgcccctagaggtgccattagcagaatttgccaagatccgagaaaaattttagctttagttctatttcagcagtcacctgacgtccttgtctatggtcttaaaaacaagaaggcacacatttgagaagatgagattaaggttaggagaaaacctcagtcattgcatgctttttagtatgggccaataaaatctcaacacctgtgggagagtaagaactaagggaatgagtttgggcggcccctcataaaggaccttagaggcagggaacagcaatgccaaatttccctctctcgtgagatgggggatcctgtgcaggctgatgaggcacccatgagaaaagccgaaaaagcatgcatcttagaaatagcccctcaattccaggagtcaacatgccaaagaatgaggctggagacaggtagctccgagggaggacttctggcatgagatctcggcacggcaagcccagcatcgcctcagcccagacaggctccaccaggagatcaagcaagggctgcctttcaggagtcacctcctgagccacttcagagttctggaagtgaccacggaccagggtggaggaatagacttctagttcattctgggacacttgagccagagagttgaaagcttggaaagaccagataagaaacctgccctttgtctccctagggacatgagacaccacattccatttgtgctagaaaaacctatccactgatgagtctaactgttccaaacgcctcccacctggtgtgcacagctgcctgggtccattgtcacttgggtgcatcaggttgtcctccgatttttagatgagtttcctgtctagagatgtcctagtctgctcactggctggtggcagtagggtaccctgcgtcctcgaaaagccagagggttcacctagtcagacgaaactccagaacagtgcttgtggagggcctgactgtcctgctcacccacagccgatctgctgcaggtcagcaactgtgtcgtgagcagctgccaaccaccagcctttctggtgctgttctccagttcacgtctgccagctggtgagggcagaggcagacctggtcagacccagcgcccctcctccctgagggagcatggcacagcctcacacttgaaagacggtgtttggtttcccatctaatcaacttaagggaagccggcatgtacccttcaaggccctgtcaccacctatttcctgatcagttggtataaactgagggtggcttttagagacccagacttggttggcagcgctgccatggaacaccccagcaagcacctcccagcctgcctttcggagcagcacccaggaggggatgccgcgctccagcaacaccaggtcaggcctgtgcagacccctgccctgccgctcttcagccagagggagggctgttatttccagaggtgcgctttttatgtacttttagctagatgtggcatgcatctgtgagctttagatcattaaatccaaaatgtttgcctaaatgagtttatcagttgttaacttcaagaatattaaatgatttataataaagctcctgcatttctctcca

SEQ ID NO: 317159 - DNA, 1903 bp, Homo sapiens
ggctgcgccacgtcggcgcgcggcggccgcgcccccttaacggcagtggcactcacccggctcgcgcggccccggcgccccacgcgcgcgcgtcgttctcccgcccgctcgctccccggcgctcacacctgagctcactcgcgcacgcccgcccggcccgagaaccgcgccgccgcctcggccccgcggaagccccgccgcgccatgtcttcgcctcccgaagggaaactagagactaaagctggacacccgcccgccgtgaaagctggtggaatgcgaattgtgcagaaacacccacatacaggagacaccaaagaagagaaagacaaggatgaccaggaatgggaaagccccagtccacctaaacccactgtgttcatctctggggtcatcgcccggggtgacaaagatttccccccggcggctgcgcaggtggctcaccagaagccgcatgcctccatggacaagcatccttccccaagaacccagcacatccagcagccacgcaagtgagcctggagtccaccagcctgccccatggccccggctctgctgcacttggtatttccctgacagagagaaccagcagtttcgcccaaatcctactctgctgggaaatctaaggcaaaaccaagtgctctgtcctttgccttacatttccatatttaaaactagaaacagctccagcccaaaccttgtttatggggagtctggttggatgtcatttgaggatcattgtgcccctagaggtgccattagcagaatttgccaagatccgagaaaaattttagctttagttctatttcagcagtcacctgacgtccttgtctatggtcttaaaaacaagaaggcacacatttgagaagatgagattaaggttaggagaaaacctcagtcattgcatgctttttagtatgggccaataaaatctcaacacctgtgggagagtaagaactaagggaatgagtttgggcggcccctcataaaggaccttagaggcagggaacagcaatgccaaatttccctctctcgtgagatgggggatcctgtgcaggctgatgaggcacccatgagaaaagccgaaaaagcatgcatcttagaaatagcccctcaattccaggagtcaacatgccaaagaatgaggctggagacaggtagctccgagggaggacttctggcatgagatctcggcacggcaagcccagcatcgcctcagcccagacaggctccaccaggagatcaagcaagggctgcctttcaggagtcacctcctgagccacttcagagttctggaagtgaccacggaccagggtggaggaatagacttctagttcattctgggacacttgagccagagagttgaaagcttggaaagaccagataagaaacctgccctttgtctccctagggacatgagacaccacattccatttgtgctagaaaaacctatccactgatgagtctaactgttccaaacgcctcccacctggtgtgcacagctgcctgggtccattgtcacttgggtgcatcaggttgtcctccgatttttagatgagtttcctgtctagagatgtcctagtctgctcactggctggtggcagtagggtaccctgcgtcctcgaaaagccagagggttcacctagtcagacgaaactccagaacagtgcttgtggagggcctgactgtcctgctcacccacagccgatctgctgcaggtcagcaactgtgtcgtgagcagctgccaaccaccagcctagtctgggtctcttaaacgccaccctcagtttataccaactgatcaggaaatacgctggtgacaggcccttgaatgggtacatgccggcttcccgtaagttgattagatgggaaaccaaacaccgtctttcaagtgtgaggctgtgcc

SEQ ID NO: 317160 - DNA, 1425 bp, Homo sapiens
ggctgcgccacgtcggcgcgcggcggccgcgcccccttaacggcagtggcactcacccggctcgcgcggccccggcgccccacgcgcgcgcgtcgttctcccgcccgctcgctccccggcgctcacacctgagctcactcgcgcacgcccgcccggcccgagaaccgcgccgccgcctcggccccgcggaagccccgccgcgccatgtcttcgcctcccgaagggaaactagagactaaagctggacacccgcccgccgtgaaagctggtggaatgcgaattgtgcagaaacacccacatacaggagacaccaaagaagagaaagacaaggatgaccaggaatgggaaagccccagtccacctaaacccactgtgttcatctctggggtcatcgcccggggtgacaaagatttccccccggcggctgcgcaggtggctcaccagaagccgcatgcctccatggacaagcatccttccccaagaacccagcacatccagcagccacgcaagtgagcctggagtccaccagcctgccccatggccccggctctgctgcacttggtatttccctgacagagagaaccagcagtttcgcccaaatcctactctgctgggaaatctaaggcaaaaccaagtgctctgtcctttgccttacatttccatatttaaaactagaaacagctccagcccaaaccttgtttatggggagtctggttggatgtcatttgaggatcattgtgcccctagaggtgccattagcagaatttgccaagatccgagaaaaattttagctttagttctatttcagcagtcacctgacgtccttgtctatggtcttaaaaacaagaaggcacacatttgagaagatgagattaaggttaggagaaaacctcagtcattgcatgctttttagtatgggccaataaaatctcaacacctgtgggagagtaagaactaagggaatgagtttgggcggcccctcataaaggaccttagaggcagggaacagcaatgccaaatttccctctctcgtgagatgggggatcctgtgcaggctgatgaggcacccatgagaaaagccgaaaaagcatgcatcttagaaatagcccctcaattccaggagtcaacatgccaaagaatgaggctggagacaggtagctccgagggaggacttctggcatgagatctcggcacggcaagcccagcatcgcctcagcccagacaggctccaccaggagatcaagcaagggctgcctttcaggagtcacctcctgagccacttcagagttctggaagtgaccacggaccagggtggaggaatagacttctagttcattctgggacacttgagccagagagttgaaagcttggaaagaccagataagaaacctgcctctagtcagttttctaatcctcggggcaccg

SEQ ID NO: 317161 - DNA, 1208 bp, Homo sapiens
  misc_feature (1192)..(1192): n is a, c, g, or t
  misc_feature (1204)..(1204): n is a, c, g, or t
ggctgcgccacgtcggcgcgcggcggccgcgcccccttaacggcagtggcactcacccggctcgcgcggccccggcgccccacgcgcgcgcgtcgttctcccgcccgctcgctccccggcgctcacacctgagctcactcgcgcacgcccgcccggcccgagaaccgcgccgccgcctcggccccgcggaagccccgccgcgccatgtcttcgcctcccgaagggaaactagagactaaagctggacacccgcccgccgtgaaagctggtggaatgcgaattgtgcagaaacacccacatacaggagacaccaaagaagagaaagacaaggatgaccaggaatgggaaagccccagtccacctaaacccactgtgttcatctctggggtcatcgcccggggtgacaaagatttccccccggcggctgcgcaggtggctcaccagaagccgcatgcctccatggacaagcatccttccccaagaacccagcacatccagcagccacgcaagtgagcctggagtccaccagcctgccccatggccccggctctgctgcacttggtatttccctgacagagagaaccagcagtttcgcccaaatcctactctgctgggaaatctaaggcaaaaccaagtgctctgtcctttgccttacatttccatatttaaaactagaaacagctccagcccaaaccttgtttatggggagtctggttggatgtcatttgaggatcattgtgcccctagaggtgccattagcagaatttgccaagatccgagaaaaattttagctttagttctatttcagcagtcacctgacgtccttgtctatggtcttaaaaacaagaaggcacacatttgagaagatgagattaaggttaggagaaaacctcagtcattgcatgctttttagtatgggccaataaaatctcaacacctgtgggagagtaagaactaagggaatgagtttgggcggcccctcataaaggaccttagaggcagggaacagcaatgccaaatttccctctctcgtgagatgggggatcctgtgcaggctgatgaggcacccatgagaaaagccgaaaaagcatgcatcttagaaatagcccctcaattccaggagtcaacatgccaaagaatgaggctggagacaggtcgccaggagttatgcagttcgggatgttgtaaaggnatggcaagagcnacag

SEQ ID NO: 317162 - DNA, 1209 bp, Homo sapiens
ggctgcgccacgtcggcgcgcggcggccgcgcccccttaacggcagtggcactcacccggctcgcgcggccccggcgccccacgcgcgcgcgtcgttctcccgcccgctcgctccccggcgctcacacctgagctcactcgcgcacgcccgcccggcccgagaaccgcgccgccgcctcggccccgcggaagccccgccgcgccatgtcttcgcctcccgaagggaaactagagactaaagctggacacccgcccgccgtgaaagctggtggaatgcgaattgtgcagaaacacccacatacaggagacaccaaagaagagaaagacaaggatgaccaggaatgggaaagccccagtccacctaaacccactgtgttcatctctggggtcatcgcccggggtgacaaagatttccccccggcggctgcgcaggtggctcaccagaagccgcatgcctccatggacaagcatccttccccaagaacccagcacatccagcagccacgcaagtgagcctggagtccaccagcctgccccatggccccggctctgctgcacttggtatttccctgacagagagaaccagcagtttcgcccaaatcctactctgctgggaaatctaaggcaaaaccaagtgctctgtcctttgccttacatttccatatttaaaactagaaacagctccagcccaaaccttgtttatggggagtctggttggatgtcatttgaggatcattgtgcccctagaggtgccattagcagaatttgccaagatccgagaaaaattttagctttagttctatttcagcagtcacctgacgtccttgtctatggtcttaaaaacaagaaggcacacatttgagaagatgagattaaggttaggagaaaacctcagtcattgcatgctttttagtatgggccaataaaatctcaacacctgtgggagagtaagaactaagggaatgagtttgggcggcccctcataaaggactgcagaaatccagaagcatccttaatgcttctcagtcttcagccagagggagggctgttatttccagaggtgcgctttttatgtacttttagctagatgtggcatgcatctgtgagctttagatcattaaatccaaaatgtttgcctaaatgagtttatcagttgttaacttcaagaatattaaatgatttataataaagctcctgcatttctctcca

SEQ ID NO: 317163 - DNA, 483 bp, Homo sapiens
ggctgcgccacgtcggcgcgcggcggccgcgcccccttaacggcagtggcactcacccggctcgcgcggccccggcgccccacgcgcgcgcgtcgttctcccgcccgctcgctccccggcgctcacacctgagctcactcgcgcacgcccgcccggcccgagaaccgcgccgccgcctcggccccgcggaagccccgccgcgccatgtcttcgcctcccgaagggaaactagagactaaagctggacacccgcccgccgtgaaagctggtggaatgcgaattgtgcagaaacacccacatacaggagacaccaaagaagagaaagacaaggatgaccaggaatgggaaagccccaggtgggatgatgctagcgactcttgagcatgttttccaaaaaccctattcggttaaacattaacatttgttctctgttctatgattctgataactcctgggctatgtggggccctgttctgtgtattt

SEQ ID NO: 317164 - DNA, 2339 bp, Homo sapiens
ggctgcgccacgtcggcgcgcggcggccgcgcccccttaacggcagtggcactcacccggctcgcgcggccccggcgccccacgcgcgcgcgtcgttctcccgcccgctcgctccccggcgctcacacctgagctcactcgcgcacgcccgcccggcccgagaaccgcgccgccgcctcggccccgcggaagccccgccgcgccatgtcttcgcctcccgaagggaaactagagactaaagctggacacccgcccgccgtgaaagctggtggaatgcgaattgtgcagaaacacccacatacaggagacaccaaagaagagaaagacaaggatgaccaggaatgggaaagccccagtccacctaaacccactgtgttcatctctggggtcatcgcccggggtgacaaagatttccccccggcggctgcgcaggtggctcaccagaagccgcatgcctccatggacaagcatccttccccaagaacccagcacatccagcagccacgcaagtgagcctggagtccaccagcctgccccatggccccggctctgctgcacttggtatttccctgacagagagaaccagcagtttcgcccaaatcctactctgctgggaaatctaaggcaaaaccaagtgctctgtcctttgccttacatttccatatttaaaactagaaacagctccagcccaaaccttgtttatggggagtctggttggatgtcatttgaggatcattgtgcccctagaggtgccattagcagaatttgccaagatccgagaaaaattttagctttagttctatttcagcagtcacctgacgtccttgtctatggtcttaaaaacaagaaggcacacatttgagaagatgagattaaggttaggagaaaacctcagtcattgcatgctttttagtatgggccaataaaatctcaacacctgtgggagagtaagaactaagggaatgagtttgggcggcccctcataaaggaccttagaggcagggaacagcaatgccaaatttccctctctcgtgagatgggggatcctgtgcaggctgatgaggcacccatgagaaaagccgaaaaagcatgcatcttagaaatagcccctcaattccaggagtcaacatgccaaagaatgaggctggagacaggtagctccgagggaggacttctggcatgagatctcggcacggcaagcccagcatcgcctcagcccagacaggctccaccaggagatcaagcaagggctgcctttcaggagtcacctcctgagccacttcagagttctggaagtgaccacggaccagggtggaggaatagacttctagttcattctgggacacttgagccagagagttgaaagcttggaaagaccagataagaaacctgccctttgtctccctagggacatgagacaccacattccatttgtgctagaaaaacctatccactgatgagtctaactgttccaaacgcctcccacctggtgtgcacagctgcctgggtccattgtcacttgggtgcatcaggttgtcctccgatttttagatgagtttcctgtctagagatgtcctagtctgctcactggctggtggcagtagggtaccctgcgtcctcgaaaagccagagggttcacctagtcagacgaaactccagaacagtgcttgtggagggcctgactgtcctgctcacccacagccgatctgctgcaggtcagcaactgtgtcgtgagcagctgccaaccaccagcctttctggtgctgttctccagttcacgtctgccagctggtgagggcagaggcagacctggtcagacccagcgcccctcctccctgagggagcatggcacagcctcacacttgaaagacggtgtttggtttcccatctaatcaacttaagggaagccggcatgtacccttcaaggccctgtcaccacctatttcctgatcagttggtataaactgagggtggcttttagagacccagacttggttggcagcgctgccatggaacaccccagcaagcacctcccagcctgcctttcggagcagcacccaggaggggatgccgcgctccagcaacaccaggtcaggcctgtgcagacccctgccctgccgctgcagaaatccagaagcatccttaatgcttctcagtcttcagccagagggagggctgttatttccagaggtgcgctttttatgtacttttagctagatgtggcatgcatctgtgagctttagatcattaaatccaaaatgtttgcctaaatgagtttatcagttgttaacttcaagaatattaaatgatttataataaagctcctgcatttctctcca

SEQ ID NO: 317165 - DNA, 2320 bp, Homo sapiens
ccaggtctggtacaccccgagttatggatatgtcgacccagcgcgcctcgcgtgtgcccctacggcgcgcgcgtcgttctcccgcccgctcgctccccggcgctcacacctgagctcactcgcgcacgcccgcccggcccgagaaccgcgccgccgcctcggccccgcggaagccccgccgcgccatgtcttcgcctcccgaagggaaactagagactaaagctggacacccgcccgccgtgaaagctggtggaatgcgaattgtgcagaaacacccacatacaggagacaccaaagaagagaaagacaaggatgaccaggaatgggaaagccccagtccacctaaacccactgtgttcatctctggggtcatcgcccggggtgacaaagatttccccccggcggctgcgcaggtggctcaccagaagccgcatgcctccatggacaagcatccttccccaagaacccagcacatccagcagccacgcaagtgagcctggagtccaccagcctgccccatggccccggctctgctgcacttggtatttccctgacagagagaaccagcagtttcgcccaaatcctactctgctgggaaatctaaggcaaaaccaagtgctctgtcctttgccttacatttccatatttaaaactagaaacagctccagcccaaaccttgtttatggggagtctggttggatgtcatttgaggatcattgtgcccctagaggtgccattagcagaatttgccaagatccgagaaaaattttagctttagttctatttcagcagtcacctgacgtccttgtctatggtcttaaaaacaagaaggcacacatttgagaagatgagattaaggttaggagaaaacctcagtcattgcatgctttttagtatgggccaataaaatctcaacacctgtgggagagtaagaactaagggaatgagtttgggcggcccctcataaaggaccttagaggcagggaacagcaatgccaaatttccctctctcgtgagatgggggatcctgtgcaggctgatgaggcacccatgagaaaagccgaaaaagcatgcatcttagaaatagcccctcaattccaggagtcaacatgccaaagaatgaggctggagacaggtagctccgagggaggacttctggcatgagatctcggcacggcaagcccagcatcgcctcagcccagacaggctccaccaggagatcaagcaagggctgcctttcaggagtcacctcctgagccacttcagagttctggaagtgaccacggaccagggtggaggaatagacttctagttcattctgggacacttgagccagagagttgaaagcttggaaagaccagataagaaacctgccctttgtctccctagggacatgagacaccacattccatttgtgctagaaaaacctatccactgatgagtctaactgttccaaacgcctcccacctggtgtgcacagctgcctgggtccattgtcacttgggtgcatcaggttgtcctccgatttttagatgagtttcctgtctagagatgtcctagtctgctcactggctggtggcagtagggtaccctgcgtcctcgaaaagccagagggttcacctagtcagacgaaactccagaacagtgcttgtggagggcctgactgtcctgctcacccacagccgatctgctgcaggtcagcaactgtgtcgtgagcagctgccaaccaccagcctttctggtgctgttctccagttcacgtctgccagctggtgagggcagaggcagacctggtcagacccagcgcccctcctccctgagggagcatggcacagcctcacacttgaaagacggtgtttggtttcccatctaatcaacttaagggaagccggcatgtacccttcaaggccctgtcaccacctatttcctgatcagttggtataaactgagggtggcttttagagacccagacttggttggcagcgctgccatggaacaccccagcaagcacctcccagcctgcctttcggagcagcacccaggaggggatgccgcgctccagcaacaccaggtcaggcctgtgcagacccctgccctgccgctgcagaaatccagaagcatccttaatgcttctcagtcttcagccagagggagggctgttatttccagaggtgcgctttttatgtacttttagctagatgtggcatgcatctgtgagctttagatcattaaatccaaaatgtttgcctaaatgagtttatcagttgttaacttcaagaatattaaatgatttataataaagctcctgcatttctctcca

SEQ ID NO: 317166 - DNA, 1950 bp, Homo sapiens
cgctagtagaggctggtgtgtaatcggcgaggctaaccactgtgttcatctctggggtcatcgcccggggtgacaaagatttccccccggcggctgcgcaggtggctcaccagaagccgcatgcctccatggacaagcatcctgccccatggccccggctctgctgcacttggtatttccctgacagagagaaccagcagtttcgcccaaatcctactctgctgggaaatctaaggcaaaaccaagtgctctgtcctttgccttacatttccatatttaaaactagaaacagctccagcccaaaccttgtttatggggagtctggttggatgtcatttgaggatcattgtgcccctagaggtgccattagcagaatttgccaagatccgagaaaaattttagctttagttctatttcagcagtcacctgacgtccttgtctatggtcttaaaaacaagaaggcacacatttgagaagatgagattaaggttaggagaaaacctcagtcattgcatgctttttagtatgggccaataaaatctcaacacctgtgggagagtaagaactaagggaatgagtttgggcggcccctcataaaggaccttagaggcagggaacagcaatgccaaatttccctctctcgtgagatgggggatcctgtgcaggctgatgaggcacccatgagaaaagccgaaaaagcatgcatcttagaaatagcccctcaattccaggagtcaacatgccaaagaatgaggctggagacaggtagctccgagggaggacttctggcatgagatctcggcacggcaagcccagcatcgcctcagcccagacaggctccaccaggagatcaagcaagggctgcctttcaggagtcacctcctgagccacttcagagttctggaagtgaccacggaccagggtggaggaatagacttctagttcattctgggacacttgagccagagagttgaaagcttggaaagaccagataagaaacctgccctttgtctccctagggacatgagacaccacattccatttgtgctagaaaaacctatccactgatgagtctaactgttccaaacgcctcccacctggtgtgcacagctgcctgggtccattgtcacttgggtgcatcaggttgtcctccgatttttagatgagtttcctgtctagagatgtcctagtctgctcactggctggtggcagtagggtaccctgcgtcctcgaaaagccagagggttcacctagtcagacgaaactccagaacagtgcttgtggagggcctgactgtcctgctcacccacagccgatctgctgcaggtcagcaactgtgtcgtgagcagctgccaaccaccagcctttctggtgctgttctccagttcacgtctgccagctggtgagggcagaggcagacctggtcagacccagcgcccctcctccctgagggagcatggcacagcctcacacttgaaagacggtgtttggtttcccatctaatcaacttaagggaagccggcatgtacccttcaaggccctgtcaccacctatttcctgatcagttggtataaactgagggtggcttttagagacccagacttggttggcagcgctgccatggaacaccccagcaagcacctcccagcctgcctttcggagcagcacccaggaggggatgccgcgctccagcaacaccaggtcaggcctgtgcagacccctgccctgccgctgcagaaatccagaagcatccttaatgcttctcagtcttcagccagagggagggctgttatttccagaggtgcgctttttatgtacttttagctagatgtggcatgcatctgtgagctttagatcattaaatccaaaatgtttgcctaaatgagtttatcagttgttaacttcaagaatattaaatgatttataataaagctcctgcatttctctcca

SEQ ID NO: 317167 - DNA, 2036 bp, Homo sapiens
ggctgcgccacgtcggcgcgcggcggccgcgcccccttaacggcagtggcactcacccggctcgcgcggccccggcgccccacgcgcgcgcgtcgttctcccgcccgctcgctccccggcgctcacacctgagctcactcgcgcacgcccgcccggcccgagaaccgcgccgccgcctcggccccgcggaagccccgccgcgccatgtcttcgcctcccgaagggaaactagagactaaagctggacacccgcccgccgtgaaagctggtggaatgcgaattgtgcagaaacacccacatacaggagacaccaaagaagagaaagacaaggatgaccaggaatgggaaagccccagtccacctaaacccactgtgttcatctctggggtcatcgcccggggtgacaaagatttccccccggcggctgcgcaggtggctcaccagaagccgcatgcctccatggacaagcatccttccccaagaacccagcacatccagcagccacgcaagtgagcctggagtccaccagcctgccccatggccccggctctgctgcacttggtatttccctgacagagagaaccagcagtttcgcccaaatcctactctgctgggaaatctaaggcaaaaccaagtgctctgtcctttgccttacatttccatatttaaaactagaaacagctccagcccaaaccttgtttatggggagtctggttggatgtcatttgaggatcattgtgcccctagaggtgccattagcagaatttgccaagatccgagaaaaattttagctttagttctatttcagcagtcacctgacgtccttgtctatggtcttaaaaacaagaaggcacacatttgagaagatgagattaaggttaggagaaaacctcagtcattgcatgctttttagtatgggccaataaaatctcaacacctgtgggagagtaagaactaagggaatgagtttgggcggcccctcataaaggaccttagaggcagggaacagcaatgccaaatttccctctctcgtgagatgggggatcctgtgcaggctgatgaggcacccatgagaaaagccgaaaaagcatgcatcttagaaatagcccctcaattccaggagtcaacatgccaaagaatgaggctggagacaggtagctccgagggaggacttctggcatgagatctcggcacagctgcctgggtccattgtcacttgggtgcatcaggttgtcctccgatttttagatgagtttcctgtctagagatgtcctagtctgctcactggctggtggcagtagggtaccctgcgtcctcgaaaagccagagggttcacctagtcagacgaaactccagaacagtgcttgtggagggcctgactgtcctgctcacccacagccgatctgctgcaggtcagcaactgtgtcgtgagcagctgccaaccaccagcctttctggtgctgttctccagttcacgtctgccagctggtgagggcagaggcagacctggtcagacccagcgcccctcctccctgagggagcatggcacagcctcacacttgaaagacggtgtttggtttcccatctaatcaacttaagggaagccggcatgtacccttcaaggccctgtcaccacctatttcctgatcagttggtataaactgagggtggcttttagagacccagacttggttggcagcgctgccatggaacaccccagcaagcacctcccagcctgcctttcggagcagcacccaggaggggatgccgcgctccagcaacaccaggtcaggcctgtgcagacccctgccctgccgctgcagaaatccagaagcatccttaatgcttctcagtcttcagccagagggagggctgttatttccagaggtgcgctttttatgtacttttagctagatgtggcatgcatctgtgagctttagatcattaaatccaaaatgtttgcctaaatgagtttatcagttgttaacttcaagaatattaaatgatttataataaagctcctgcatttctctcca

SEQ ID NO: 317168 - DNA, 2204 bp, Homo sapiens
ggctgcgccacgtcggcgcgcggcggccgcgcccccttaacggcagtggcactcacccggctcgcgcggccccggcgccccacgcgcgcgcgtcgttctcccgcccgctcgctccccggcgctcacacctgagctcactcgcgcacgcccgcccggcccgagaaccgcgccgccgcctcggccccgcggaagccccgccgcgccatgtcttcgcctcccgaagggaaactagagactaaagctggacacccgcccgccgtgaaagctggtggaatgcgaattgtgcagaaacacccacatacaggagacaccaaagaagagaaagacaaggatgaccaggaatgggaaagccccagtccacctaaacccactgtgttcatctctggggtcatcgcccggggtgacaaagatttccccccggcggctgcgcaggtggctcaccagaagccgcatgcctccatggacaagcatccttccccaagaacccagcacatccagcagccacgcaagtgagcctggagtccaccagcctgccccatggccccggctctgctgcacttggtatttccctgacagagagaaccagcagtttcgcccaaatcctactctgctgggaaatctaaggcaaaaccaagtgctctgtcctttgccttacatttccatatttaaaactagaaacagctccagcccaaaccttgtttatggggagtctggttggatgtcatttgaggatcattgtgcccctagaggtgccattagcagaatttgccaagatccgagaaaaattttagctttagttctatttcagcagtcacctgacgtccttgtctatggtcttaaaaacaagaaggcacacatttgagaagatgagattaaggttaggagaaaacctcagtcattgcatgctttttagtatgggccaataaaatctcaacacctgtgggagagtaagaactaagggaatgagtttgggcggcccctcataaaggaccttagaggcagggaacagcaatgccaaatttccctctctcgtgagatgggggatcctgtgcaggctgatgaggcacccatgagaaaagccgaaaaagcatgcatcttagaaatagcccctcaattccaggagtcaacatgccaaagaatgaggctggagacaggtagctccgagggaggacttctggcatgagatctcggcacggcaagcccagcatcgcctcagcccagacaggctccaccaggagatcaagcaagggctgcctttcaggagtcacctcctgagccacttcagagttctggaagtgaccacggaccagggtggaggaatagacttctagttcattctgggacacttgagccagagagttgaaagcttggaaagaccagataagaaacctgccctttgtctccctagggacatgagacaccacattccatttgtgctagaaaaacctatccactgatgagtctaactgttccaaacgcctcccacctggtgtgcacagctgcctgggtccattgtcacttgggtgcatcaggttgtcctccgatttttagatgagtttcctgtctagagatgtcctagtctgctcactggctggtggcagtagggtaccctgcgtcctcgaaaagccagagggttcacctagtcagacgaaactccagaacagtgcttgtggagggcctgactgtcctgctcacccacagccgatctgctgcaggtcagcaactgtgtcgtgagcagctgccaaccaccagcctttctggtgctgttctccagttcacgtctgccagctggtgagggcagaggcagacctggtcagacccagcgcccctcctccctgagggagcatggcacagcctcacacttgaaagacggtgtttggtttcccatctaatcaacttaagggaagccggcatgtacccttcaaggccctgtcaccacctatttcctgatcagttggtataaactgagggtggcttttagagacccagacttggttggcagcgctgccatggaacaccccagcaagcacctcccagcctgcctttcggagcagcacccaggaggggatgccgcgctccagcaacaccaggtcaggcctgtgcagacccctgccctgccgcgtgagaattcagagcatcttaagtctcaagcctccagcaaggaggcgcataccaaagtcgcgcctctatggactcagcacatg

SEQ ID NO: 317169 - DNA, 2307 bp, Homo sapiens
ggctgcgccacgtcggcgcgcggcggccgcgcccccttaacggcagtggcactcacccggctcgcgcggccccggcgccccacgcgcgcgcgtcgttctcccgcccgctcgctccccggcgctcacacctgagctcactcgcgcacgcccgcccggcccgagaaccgcgccgccgcctcggccccgcggaagccccgccgcgccatgtcttcgcctcccgaagggaaactagagactaaagctggacacccgcccgccgtgaaagctggtggaatgcgaattgtgcagaaacacccacatacaggagacaccaaagaagagaaagacaaggatgaccaggaatgggaaagccccagtccacctaaacccactgtgttcatctctggggtcatcgcccggggtgacaaagatttccccccggcggctgcgcaggtggctcaccagaagccgcatgcctccatggacaagcatccttccccaagaacccagcacatccagcagccacgcaagtgagcctggagtccaccagcctgccccatggccccggctctgctgcacttggtatttccctgacagagagaaccagcagtttcgcccaaatcctactctgctgggaaatctaaggcaaaaccaagtgctctgtcctttgccttacatttccatatttaaaactagaaacagctccagcccaaaccttgtttatggggagtctggttggatgtcatttgaggatcattgtgcccctagaggtgccattagcagaatttgccaagatccgagaaaaattttagctttagttctatttcagcagtcacctgacgtccttgtctatggtcttaaaaacaagaaggcacacatttgagaagatgagattaaggttaggagaaaacctcagtcattgcatgctttttagtatgggccaataaaatctcaacacctgtgggagagtaagaactaagggaatgagtttgggcggcccctcataaaggaccttagaggcagggaacagcaatgccaaatttccctctctcgtgagatgggggatcctgtgcaggctgatgaggcacccatgagaaaagccgaaaaagcatgcatcttagaaatagcccctcaattccaggagtcaacatgccaaagaatgaggctggagacaggtagctccgagggaggacttctggcatgagatctcggcacggcaagcccagcatcgcctcagcccagacaggctccaccaggagatcaagcaagggctgcctttcaggagtcacctcctgagccacttcagagttctggaagtgaccacggaccagggtggaggaatagacttctagttcattctgggacacttgagccagagagttgaaagcttggaaagaccagataagaaacctgccctttgtctccctagggacatgagacaccacattccatttgtgctagaaaaacctatccactgatgagtctaactgttccaaacgcctcccacctggtgtgcacagctgcctgggtccattgtcacttgggtgcatcaggttgtcctccgatttttagatgagtttcctgtctagagatgtcctagtctgctcactggctggtggcagtagggtaccctgcgtcctcgaaaagccagagggttcacctagtcagacgaaactccagaacagtgcttgtggagggcctgactgtcctgctcacccacagccgatctgctgcaggtcagcaactgtgtcgtgagcagctgccaaccaccagcctttctggtgctgttctccagttcacgtctgccagctggtgagggcagaggcagacctggtcagacccagcgcccctcctccctgagggagcatggcacagcctcacacttgaaagacggtgtttggtttcccatctaatcaacttaagggaagccggcatgtacccttcaaggccctgtcaccacctatttcctgatcagttggtataaactgagggtggcttttagagacccagacttggttggcagcgctgccatggaacaccccacacccaggaggggatgccgcgctccagcaacaccaggtcaggcctgtgcagacccctgccctgccgctgcagaaatccagaagcatccttaatgcttctcagtcttcagccagagggagggctgttatttccagaggtgcgctttttatgtacttttagctagatgtggcatgcatctgtgagctttagatcattaaatccaaaatgtttgcctaaatgagtttatcagttgttaacttcaagaatattaaatgatttataataaagctcctgcatttctctcca

SEQ ID NO: 317170 - DNA, 1841 bp, Homo sapiens
  misc_feature (1767)..(1767): n is a, c, g, or t
ggctgcgccacgtcggcgcgcggcggccgcgcccccttaacggcagtggcactcacccggctcgcgcggccccggcgccccacgcgcgcgcgtcgttctcccgcccgctcgctccccggcgctcacacctgagctcactcgcgcacgcccgcccggcccgagaaccgcgccgccgcctcggccccgcggaagccccgccgcgccatgtcttcgcctcccgaagggaaactagagactaaagctggacacccgcccgccgtgaaagctggtggaatgcgaattgtgcagaaacacccacatacaggagacaccaaagaagagaaagacaaggatgaccaggaatgggaaagccccagtccacctaaacccactgtgttcatctctggggtcatcgcccggggtgacaaagatttccccccggcggctgcgcaggtggctcaccagaagccgcatgcctccatggacaagcatccttccccaagaacccagcacatccagcagccacgcaagtgagcctggagtccaccagcctgccccatggccccggctctgctgcacttggtatttccctgacagagagaaccagcagtttcgcccaaatcctactctgctgggaaatctaaggcaaaaccaagtgctctgtcctttgccttacatttccatatttaaaactagaaacagctccagcccaaaccttgtttatggggagtctggttggatgtcatttgaggatcattgtgcccctagaggtgccattagcagaatttgccaagatccgagaaaaattttagctttagttctatttcagcagtcacctgacgtccttgtctatggtcttaaaaacaagaaggcacacatttgagaagatgagattaaggttaggagaaaacctcagtcattgcatgctttttagtatgggccaataaaatctcaacacctgtgggagagtaagaactaagggaatgagtttgggcggcccctcataaaggaccttagaggcagggaacagcaatgccaaatttccctctctcgtgagatgggggatcctgtgcaggctgatgaggcacccatgagaaaagccgaaaaagcatgcatcttagaaatagcccctcaattccaggagtcaacatgccaaagaatgaggctggagacaggtagctccgagggaggacttctggcatgagatctcggcacggcaagcccagcatcgcctcagcccagacaggctccaccaggagatcaagcaagggctgcctttcaggagtcacctcctgagccacttcagagttctggaagtgaccacggaccagggtggaggaatagacttctagttcattctgggacacttgagccagagagttgaaagcttggaaagaccagataagaaacctgccctttgtctccctagggacatgagacaccacattccatttgtgctagaaaaacctatccactgatgagtctaactgttccaaacgcctcccacctggtgtgcacagctgcctgggtccattgtcacttgggtgcatcaggttgtcctccgatttttagatgagtttcctgtctagagatgtcctagtctgctcactggctggtggcagtagggtaccctgcgtcctcgaaaagccagagggttcacctagtcagacgaaactccagaacagtgcttgtggagggcctgactgtcctgctcacccacagccgatctgctgcaggtcagcaactgtgtcgtgagcagctgccaaccaccagcctagcttccctaanaaatcatggcattcacacagcccataaaagcaagacagtttaccaaagaggtttttgccacatttgattatata

SEQ ID NO: 317171 - DNA, 1303 bp, Homo sapiens
ggctgcgccacgtcggcgcgcggcggccgcgcccccttaacggcagtggcactcacccggctcgcgcggccccggcgccccacgcgcgcgcgtcgttctcccgcccgctcgctccccggcgctcacacctgagctcactcgcgcacgcccgcccggcccgagaaccgcgccgccgcctcggccccgcggaagccccgccgcgccatgtcttcgcctcccgaagggaaactagagactaaagctggacacccgcccgccgtgaaagctggtggaatgcgaattgtgcagaaacacccacatacaggagacaccaaagaagagaaagacaaggatgaccaggaatgggaaagccccagtccacctaaacccactgtgttcatctctggggtcatcgcccggggtgacaaagatttccccccggcggctgcgcaggtggctcaccagaagccgcatgcctccatggacaagcatccttccccaagaacccagcacatccagcagccacgcaagtgagcctggagtccaccagcctgccccatggccccggctctgctgcacttggtatttccctgacagagagaaccagcagtttcgcccaaatcctactctgctgggaaatctaaggcaaaaccaagtgctctgtcctttgccttacatttccatatttaaaactagaaacagctccagcccaaaccttgtttatggggagtctggttggatgtcatttgaggatcattgtgcccctagaggtgccattagcagaatttgccaagatccgagaaaaattttagctttagttctatttcagcagtcacctgacgtccttgtctatggtcttaaaaacaagaaggcacacatttgagaagatgagattaaggttaggagaaaacctcagtcattgcatgctttttagtatgggccaataaaatctcaacacctgtgggagagtaagaactaagggaatgagtttgggcggcccctcataaaggaccttagaggcagggaacagcaatgccaaatttccctctctcgtgagatgggggatcctgtgcaggctgatgaggcacccatgagaaaagccgaaatgcagaaatccagaagcatccttaatgcttctcagtcttcagccagagggagggctgttatttccagaggtgcgctttttatgtacttttagctagatgtggcatgcatctgtgagctttagatcattaaatccaaaatgtttgcctaaatgagtttatcagttgttaacttcaagaatattaaatgatttataataaagctcctgcatttctctcca

SEQ ID NO: 317172 - DNA, 867 bp, Homo sapiens
  misc_feature (786)..(786): n is a, c, g, or t
ggctgcgccacgtcggcgcgcggcggccgcgcccccttaacggcagtggcactcacccggctcgcgcggccccggcgccccacgcgcgcgcgtcgttctcccgcccgctcgctccccggcgctcacacctgagctcactcgcgcacgcccgcccggcccgagaaccgcgccgccgcctcggccccgcggaagccccgccgcgccatgtcttcgcctcccgaagggaaactagagactaaagctggacacccgcccgccgtgaaagctggtggaatgcgaattgtgcagaaacacccacatacaggagacaccaaagaagagaaagacaaggatgaccaggaatgggaaagccccagtccacctaaacccactgtgttcatctctggggtcatcgcccggggtgacaaagatttccccccggcggctgcgcaggtggctcaccagaagccgcatgcctccatggacaagcatccttccccaagaacccagcacatccagcagccacgcaagtgagcctggagtccaccagcctgccccatggccccggctctgctgcacttggtatttccctgacagagagaaccagcagtttcgcccaaatcctactctgctgggaaatctaaggcaaaaccaagtgctctgtcctttgccttacatttccatatttaaaactagaaacagctccagcccaaaccttgtttatggggagtctggttggatgtcatttgaggatcattgtgcccctagaggtgccattagcagaatttgccatgtcttcgcctcccnaagggaaactagagactaaagctggacacccgcccgccgtgaaagctggtggaatgcgaattgtgcagatccgctatccgt

SEQ ID NO: 317173 - DNA, 573 bp, Homo sapiens
ctcacatacataccccatgcttcctgcagggacgctggtgggcgctggcctggggcttcctcacccacaaacaccatgcttcctgcagggacactggtgggtgctggcctgggggttcctcacccacaaacaccatgcttcctgcagggacactggtgggtgctggcctgggggttcctcacccacaaacaccatgcttcctgcagggacgttgatgggcgctggcctggacgttcctcacatacaaccgccatgcttcctgcagggacgctggtgggcgctggcctggggcttcctcacatacaaaccccatgcttcctgcaggggcgctggtgggccctggcctggggcttcctcacatacaaaccccatgcttcctacagggacgctggtggatgctggcctgaggcttcctcacacacaattgctatccttccgcagggacgctggtgggcactggcctggggcttcctcacccacaaaccccatgcttcctattgattaacctgagctttccgtgtttcctgacagggtgacaaagatttccccccggcggctgcgcaggtggctcac

SEQ ID NO: 317174 - DNA, 5577 bp, Homo sapiens
  misc_feature (4215)..(4215): n is a, c, g, or t
aggcgcactgccgtcgggcgggcctagcgggcgcggtcattgtcctggcagagcggcgagccggtgagtgtggctgcggggtcgcgcccaccctctacctgtgccgggggccggaacctggccccggggagggcgcggcctcggggagacggcgtgcaggcccagcactgttggtcaccgcaggcctgtcttcctattcaccgtgggcagcagagggatggctgctcagctgctgactgatgaggcactggaatcagtgacgttcagggatgtgactgtggacttcacccaggaggagtggcagcagctggagcctgcccagaaggacctgtacagggatgtcatgctggagaactacaggaacctggtctcactggactgggagactagacctgaaatgaaagagttggatccaaagaatgacatttcggaagacaagctctccgttgttggggaggccacggggggacccacgaggaatggtgccaggggtcctggctcagaaggagtgtgggaaccaggcagctggccagagaggccgcggggagatgcaggtgcagagtgggagccattgggaattccccaggggaacaaactcttagggggctcagtacccgcatgtcatgaactgaaggcatttgccaaccaaggctgtgtcctggtcccaccacggctggacgaccccacagaaaagggggcctgtccacccgtaaggcgtggcaagaacttctccagcacttcagacctcagtaagccccccatgccctgcgaggagaagaaaacctacgactgcagcgagtgtggcaaggcctttagccgaagctcgtccctgataaagcaccaaaggatccacacgggagaaaagccgtttgagtgtgacacctgtgggaagcacttcatcgagcgctcgtccctcaccatccaccagcgggtgcacacgggcgagaagccctatgcctgcggggactgcggcaaggccttcagccagcgcatgaacctcactgtgcaccagcgcacgcacacgggcgagaagccgtatgtgtgcgacgtgtgtggcaaggccttccggaagacttcctctctcacccagcacgagcggatccacacgggggagaagccctacgcgtgcggggactgcggcaaggccttcagccagaacatgcacctcatcgtgcaccagcgcacgcacaccggggagaagccgtacgtgtgccccgagtgcgggcgagccttcagccagaacatgcacctgaccgagcaccagcgcacgcacaccggggagaagccgtacgcctgcaaggagtgcggcaaggccttcaacaagagctcctcgctcaccctgcaccagaggaaccacaccggcgagaagccctacgtgtgcggcgagtgcggcaaggccttcagccagagctcctacctcatccagcaccagcgcttccacatcggcgtgaagccgttcgagtgcagcgagtgcggcaaggccttcagcaagaactcctcgctcacgcagcaccagcgcatccacaccggcgagaagccctacgagtgctacatctgcaagaagcacttcacggggcgctcgtccctcatcgtgcaccagatcgtgcacaccggggagaagccctacgtgtgcggcgagtgcggcaaggccttcagccagagcgcctacctcatcgagcaccagcggatccacaccggcgagaagccgtacaggtgcggccagtgcgggaagtccttcatcaagaactcctccctcactgtgcaccagcggatccacacgggcgagaagccctaccgatgcggcgagtgcgggaagaccttcagccgcaacacgaacctgacgcgccacctgcggattcacacctgagcgcctctgtgcagggctctcactggcggtgcccaggacggacgccagatggctgcgcgctttgtcagcagtgctgtgagaagttctcccctggggtggggactcggggtcaggggagctcaggaatgtggtgttgtggaggggctggctgatcacacatgccccctccttactgagcctcagaaagcaagcccctcggtgtctgacgtatctggggacacttcaaggttcactgtagctgagccatggccgctggtaacagacatcagggttccagactagccctcttgagtaactgtcctagagctgggacaggtcacgcctgcctccacatctctgtttcttcagcgggaaagtggagctggtggaggggagggaggagacatctccctctttgtcagatacatcctggagtccagatgcagcttgtcaccatctgcattttctccgtgggttgggagcgtgagggccttcctatccctccacccaccgtttccctgcagtgcacgctggcagccaccaagctaggaagtggcaggagtttgccggttgtttgtgaggggaaaaatttttttttcagagttagcaaataacagtaactactgctttgaatgccaaagtttcttagagtggtctgttacgttttttaaaaataaaacttttaattaagggagactatgttattttaaacagtcttctgttttggccagttgtctggtcaaaatcggcttcagtgattgtgggaggggcaagaaggaaaagaaacagcagcaggtttgatattcagaaagaaatatgcatggattcaataagtatatacatctgagcacagattatttttatagtgatttttgcagctaaatgtgaaggcaactgtcttaagtcccttcctgctgctgtaacaaaagaccttagactgggtaatttataaacaatagaaatttgtcactcatggttctggatgctgggaagtccaagatcaaggctctggcagatttggtgtctgatggggtatgttcttcataggtagtgcttgtgtcttgatgtgtgtcttcacgtggttgtaaacagcagacttcctcaggccccttataagggtgctaatcccagtcacaagggccctgacctcatgacctcccaaaggtcctccctcttcatactgttacattggggatcaagtttccaatatgtgaatacagggaagcaccaacagaccatatcagtaacttcgagtgagtttcctaaggccgactgaagctctgtttacacataagagtgttccccaaagtgcactttctctggggccttttaggccatacttttaattttgttatttgatactactggttgctaatgttctggcatttccagttgttccacactccctgacactggtgtacacaaataaataatacagaaaaaaattatatcagcaagcacattctgcaaataagaaaaacagccactcgggcacgtataaacaaggtggaccgtttttcaaattctggcagtcaagtgggcctcagggtgggtttgattcaggctctcatcattggagccatagctgtggttctctgtgatgctctggctctcccttcatacttcttaacatcatcctcaggctggcttcccacgtgggattgtggtggtttccagcagcgagtcttgatcagacattgctttagttgcatctgttgtgggaataaatgagaatatgtatgcactgcagagaatggagtgttaaaacagtcaacaaatgttagctaatatgtacacaagattttactactctttagcagcaaaatggaggggaagaccttctaaggccctttggagagatgaaatggctcatttaaccctcacaagatcctcgaggtagggattcatgtgcatgtcgtatagataaggaatctgaggttcagtgaggcaaggtaagcttcctgagggcacacaacatggaagtggaggggacagggtgtgagctggggtccacctgggctccgaggtccgtgctccttgcctacactggactacttctagagatggacatattgaatttctcaggacttgactcctggccttggtttcctggactccccagtgtgtgaagcagagatgggatcgaggctgcaccaccaccatccccctctcccatccagagaaccagccgggccacctctcaggtccctcctgtttcttttctctgcaacccaagctgatgtggagggcattgaggctcctctggggggatgctgtggtaccaggtgggtctcacatccctggtctcccgcctcctgggcaagctccccactcagggctccacgtttccccaagaggaaccctgaggnggctggaataatggccacattgacggagtcacttgtccaactctgagggggcgctctcatcacccccactctacagatggggaaacaggctcgcagaggttcaggcacctgcccaaggtcacacagctgctggattcaaacccattctgactccagaagctggactgcagtccacggcaccactccacccaccagttcctcagtcaggtacttactgaagccaaattaaatttacccccctgaaaatgtgggtttggcagggatcaagcaggtcaggaacctgctttttaacaagtcttctatcccatacatctgtccaaggcactatttggggttatgtgctggccttcgagttcaccctcactgggccctgtgtccctgtgtccctgtgtccccaggcctgacccaagcctggccttgaggtagaggtcatgggtgctgggtggggtctgaatgacccctttatcacttggagtaaatgccaaactcctcacaaacccctgtgtgacgcagcctctcccagctcccgtcccgctccccctgctcactctgcttcagccacactgtgctttcgttcagtcccagcgctggcccagcccactcccaccgcaggggcctctcccttcctggcccagcacccacgctgagcttcctcaggtccctgatgctcagtttcacgtgtcggcctggctgggctccagtgcccagcaggcccatcgcagtgagtcccggtggtgctgagaagacactttatagatgtggatgtcacccatgtcagctgactttaagtaaacgattattatctgcaatgtgtgtgggcctcatctaatcagttgaaggccttaagagcaaaaccagtttcttggagagtaaaaaactctgcctcaggattacagtgccaactccggcctgagtttccagcctaccagcctaccttatggatttgggacttgccagctcccacagtagcatgacccggttatttaaattaaatctatttatatataaaagtatacatatgccatatgtataacaagaaatatgaggtatataaaaggatatgtataagatatatatagggtagggcatggtgacccacacctgtaatcccagcactttgggaggccaaggtgggaggattacttgagaccaggagtttgagaccagcctaggcaacatagcaagacctcatctttacaaaacgttagaaaaattagccaggtgtggtggcgtgtgcctgtggtcccagctactcaagagacggaggtgggaggattgcccgagtccaggaattagaggttgcagtgaggtatgatcatgccattgcactccagcctgggtgacaagggaagactctctctt

SEQ ID NO: 317175 - DNA, 5450 bp, Homo sapiens
  misc_feature (4088)..(4088): n is a, c, g, or t
aggcgcactgccgtcgggcgggcctagcgggcgcggtcattgtcctggcagagcggcgagccggtgagtgtggctgcggggtcgcgcccaccctctacctgtgccgggggccggaacctggccccggggagggcgcggcctcggggagacggcgtgcaggcccagcactgttggtcaccgcaggcctgtcttcctattcaccgtgggcagcagagggatggctgctcagctgctgactgatgaggcactgactgggagactagacctgaaatgaaagagttggatccaaagaatgacatttcggaagacaagctctccgttgttggggaggccacggggggacccacgaggaatggtgccaggggtcctggctcagaaggagtgtgggaaccaggcagctggccagagaggccgcggggagatgcaggtgcagagtgggagccattgggaattccccaggggaacaaactcttagggggctcagtacccgcatgtcatgaactgaaggcatttgccaaccaaggctgtgtcctggtcccaccacggctggacgaccccacagaaaagggggcctgtccacccgtaaggcgtggcaagaacttctccagcacttcagacctcagtaagccccccatgccctgcgaggagaagaaaacctacgactgcagcgagtgtggcaaggcctttagccgaagctcgtccctgataaagcaccaaaggatccacacgggagaaaagccgtttgagtgtgacacctgtgggaagcacttcatcgagcgctcgtccctcaccatccaccagcgggtgcacacgggcgagaagccctatgcctgcggggactgcggcaaggccttcagccagcgcatgaacctcactgtgcaccagcgcacgcacacgggcgagaagccgtatgtgtgcgacgtgtgtggcaaggccttccggaagacttcctctctcacccagcacgagcggatccacacgggggagaagccctacgcgtgcggggactgcggcaaggccttcagccagaacatgcacctcatcgtgcaccagcgcacgcacaccggggagaagccgtacgtgtgccccgagtgcgggcgagccttcagccagaacatgcacctgaccgagcaccagcgcacgcacaccggggagaagccgtacgcctgcaaggagtgcggcaaggccttcaacaagagctcctcgctcaccctgcaccagaggaaccacaccggcgagaagccctacgtgtgcggcgagtgcggcaaggccttcagccagagctcctacctcatccagcaccagcgcttccacatcggcgtgaagccgttcgagtgcagcgagtgcggcaaggccttcagcaagaactcctcgctcacgcagcaccagcgcatccacaccggcgagaagccctacgagtgctacatctgcaagaagcacttcacggggcgctcgtccctcatcgtgcaccagatcgtgcacaccggggagaagccctacgtgtgcggcgagtgcggcaaggccttcagccagagcgcctacctcatcgagcaccagcggatccacaccggcgagaagccgtacaggtgcggccagtgcgggaagtccttcatcaagaactcctccctcactgtgcaccagcggatccacacgggcgagaagccctaccgatgcggcgagtgcgggaagaccttcagccgcaacacgaacctgacgcgccacctgcggattcacacctgagcgcctctgtgcagggctctcactggcggtgcccaggacggacgccagatggctgcgcgctttgtcagcagtgctgtgagaagttctcccctggggtggggactcggggtcaggggagctcaggaatgtggtgttgtggaggggctggctgatcacacatgccccctccttactgagcctcagaaagcaagcccctcggtgtctgacgtatctggggacacttcaaggttcactgtagctgagccatggccgctggtaacagacatcagggttccagactagccctcttgagtaactgtcctagagctgggacaggtcacgcctgcctccacatctctgtttcttcagcgggaaagtggagctggtggaggggagggaggagacatctccctctttgtcagatacatcctggagtccagatgcagcttgtcaccatctgcattttctccgtgggttgggagcgtgagggccttcctatccctccacccaccgtttccctgcagtgcacgctggcagccaccaagctaggaagtggcaggagtttgccggttgtttgtgaggggaaaaatttttttttcagagttagcaaataacagtaactactgctttgaatgccaaagtttcttagagtggtctgttacgttttttaaaaataaaacttttaattaagggagactatgttattttaaacagtcttctgttttggccagttgtctggtcaaaatcggcttcagtgattgtgggaggggcaagaaggaaaagaaacagcagcaggtttgatattcagaaagaaatatgcatggattcaataagtatatacatctgagcacagattatttttatagtgatttttgcagctaaatgtgaaggcaactgtcttaagtcccttcctgctgctgtaacaaaagaccttagactgggtaatttataaacaatagaaatttgtcactcatggttctggatgctgggaagtccaagatcaaggctctggcagatttggtgtctgatggggtatgttcttcataggtagtgcttgtgtcttgatgtgtgtcttcacgtggttgtaaacagcagacttcctcaggccccttataagggtgctaatcccagtcacaagggccctgacctcatgacctcccaaaggtcctccctcttcatactgttacattggggatcaagtttccaatatgtgaatacagggaagcaccaacagaccatatcagtaacttcgagtgagtttcctaaggccgactgaagctctgtttacacataagagtgttccccaaagtgcactttctctggggccttttaggccatacttttaattttgttatttgatactactggttgctaatgttctggcatttccagttgttccacactccctgacactggtgtacacaaataaataatacagaaaaaaattatatcagcaagcacattctgcaaataagaaaaacagccactcgggcacgtataaacaaggtggaccgtttttcaaattctggcagtcaagtgggcctcagggtgggtttgattcaggctctcatcattggagccatagctgtggttctctgtgatgctctggctctcccttcatacttcttaacatcatcctcaggctggcttcccacgtgggattgtggtggtttccagcagcgagtcttgatcagacattgctttagttgcatctgttgtgggaataaatgagaatatgtatgcactgcagagaatggagtgttaaaacagtcaacaaatgttagctaatatgtacacaagattttactactctttagcagcaaaatggaggggaagaccttctaaggccctttggagagatgaaatggctcatttaaccctcacaagatcctcgaggtagggattcatgtgcatgtcgtatagataaggaatctgaggttcagtgaggcaaggtaagcttcctgagggcacacaacatggaagtggaggggacagggtgtgagctggggtccacctgggctccgaggtccgtgctccttgcctacactggactacttctagagatggacatattgaatttctcaggacttgactcctggccttggtttcctggactccccagtgtgtgaagcagagatgggatcgaggctgcaccaccaccatccccctctcccatccagagaaccagccgggccacctctcaggtccctcctgtttcttttctctgcaacccaagctgatgtggagggcattgaggctcctctggggggatgctgtggtaccaggtgggtctcacatccctggtctcccgcctcctgggcaagctccccactcagggctccacgtttccccaagaggaaccctgaggnggctggaataatggccacattgacggagtcacttgtccaactctgagggggcgctctcatcacccccactctacagatggggaaacaggctcgcagaggttcaggcacctgcccaaggtcacacagctgctggattcaaacccattctgactccagaagctggactgcagtccacggcaccactccacccaccagttcctcagtcaggtacttactgaagccaaattaaatttacccccctgaaaatgtgggtttggcagggatcaagcaggtcaggaacctgctttttaacaagtcttctatcccatacatctgtccaaggcactatttggggttatgtgctggccttcgagttcaccctcactgggccctgtgtccctgtgtccctgtgtccccaggcctgacccaagcctggccttgaggtagaggtcatgggtgctgggtggggtctgaatgacccctttatcacttggagtaaatgccaaactcctcacaaacccctgtgtgacgcagcctctcccagctcccgtcccgctccccctgctcactctgcttcagccacactgtgctttcgttcagtcccagcgctggcccagcccactcccaccgcaggggcctctcccttcctggcccagcacccacgctgagcttcctcaggtccctgatgctcagtttcacgtgtcggcctggctgggctccagtgcccagcaggcccatcgcagtgagtcccggtggtgctgagaagacactttatagatgtggatgtcacccatgtcagctgactttaagtaaacgattattatctgcaatgtgtgtgggcctcatctaatcagttgaaggccttaagagcaaaaccagtttcttggagagtaaaaaactctgcctcaggattacagtgccaactccggcctgagtttccagcctaccagcctaccttatggatttgggacttgccagctcccacagtagcatgacccggttatttaaattaaatctatttatatataaaagtatacatatgccatatgtataacaagaaatatgaggtatataaaaggatatgtataagatatatatagggtagggcatggtgacccacacctgtaatcccagcactttgggaggccaaggtgggaggattacttgagaccaggagtttgagaccagcctaggcaacatagcaagacctcatctttacaaaacgttagaaaaattagccaggtgtggtggcgtgtgcctgtggtcccagctactcaagagacggaggtgggaggattgcccgagtccaggaattagaggttgcagtgaggtatgatcatgccattgcactccagcctgggtgacaagggaagactctctctt

SEQ ID NO: 317176 - DNA, 170 bp, Homo sapiens
ctggtaaattccacccagtggacatgaagtgaaagggacccacatacaggggatgccccaaggggtctgggggctttcccagccccgacaataggtctgagcgtcagcatctcccaggccaatggctgggaactgtgttcatttcctgagctctaccaatcttcttccca

SEQ ID NO: 317177 - DNA, 260 bp, Homo sapiens
cattgcacttgagcctgggcaacaagagcgaaactccgtctcaaaacaaacaaacaaacaaacaaaaaattattctctggaaattctgggtaacgtcagtggattacatcaatgttaatcttctggttgtggtattatatactacaatcaccagctgaggtaaccaggtgaaaggtacacaagatctctcaattttatttcttgtaactacatatgaatctaaagtctatctaattaaaagagaaaaagattttcagaaa

SEQ ID NO: 317178 - DNA, 284 bp, Homo sapiens
caattctcccacctcctactcaagcctcttgagtagctgggattacaggcgcatgccactatgcccatctctacaaaaaaaaattttttttaattagccgagcatgctggtatgtagctgtagtcctagccactcaggaggctgaggcagaaagatcacctgagcccaggagtttgatgttacacagagccatgattgtggtactgcacagtgtgggctatggaccaggaccctgtttcttaaagcaaaatattatcaattaaattcatcataatcatcttagt

SEQ ID NO: 317179 - DNA, 638 bp, Homo sapiens
  misc_feature (76)..(76): n is a, c, g, or t
tcacactcaaatgctaacccgtcacggcttctgaccacaccgtcttggaccttaaccccagtgatctctcttaatnctccaccgctacagtacaaggtgaatatcttaaccagacttgccgcagaattgaacaaatttatgctggaaaaagtgactgaggacacaagcagtgttctgcgttccccgatgcccggagtggtggtggccgtctctgtcaagcctggagacgcggtagcagaaggtcaagaaatttgtgtgattgaagccatgaaaatgcagaatagtatgacagctgggaaaactggcacggtgaaatctgtgcactgtcaagctggagacacagttggagaaggggatctgctcgtggagctggaatgaaggatttataacctttcagtcatcacccaatttaattagccatttgcatgatgctttcacacacaattgattcaagcattatacaggaacacccctgtgcagctacgtttacgtcgtcatttattccacagagtcaagaccaatattctgccaaaaaatcaccaatggaaattttcattgatataaatacttgtacatatgatttgtacttctgctgtgagattccctagtgtcaaaattaaatcaataaaaactgaact

SEQ ID NO: 317180 - DNA, 2850 bp, Homo sapiens
ccggctgtgtgagaggtcagcagaggggcggtctgcggggacaacaatggcggggttctgggtcgggacagcaccgctggtcgctgccggacggcgtgggcggtggccgccgcagcagctgatgctgagcgcggcgctgcggaccctgaagcatgttctgtactattcaagacagtgcttaatggtgtcccgtaatcttggttcagtgggatatgatcctaatgaaaaaacttttgataaaattcttgttgctaatagaggagaaattgcatgtcgggttattagaacttgcaagaagatgggcattaagacagttgccatccacagtgatgttgatgctagttctgttcatgtgaaaatggcggatgaggctgtctgtgttggcccagctcccaccagtaaaagctacctcaacatggatgccatcatggaagccattaagaaaaccagggcccaagctgtacatccaggttatggattcctttcagaaaacaaagaatttgccagatgtttggcagcagaagatgtcgttttcattggacctgacacacatgctattcaagccatgggcgacaagattgaaagcaaattattagctaagaaagcagaggttaatacaatccctggctttgatggagtagtcaaggatgcagaagaagctgtcagaattgcaagggaaattggctaccctgtcatgatcaaggcctcagcaggtggtggtgggaaaggcatgcgcattgcttgggatgatgaagagaccagggatggttttagattgtcatctcaagaagctgcttctagttttggcgatgatagactactaatagaaaaatttattgataatcctcgtcatatagaaatccaggttctaggtgataaacatgggaatgctttatggcttaatgaaagagagtgctcaattcagagaagaaatcagaaggtggtggaggaagcaccaagcatttttttggatgcggagactcgaagagcgatgggagaacaagctgtagctcttgccagagcagtaaaatattcctctgctgggaccgtggagttccttgtggactctaagaagaatttttatttcttggaaatgaatacaagactccaggttgagcatcctgtcacagaatgcattactggcctggacctagtccaggaaatgatccgtgttgctaagggctaccctctcaggcacaaacaagctgatattcgcatcaacggctgggcagttgaatgtcgggtttatgctgaggacccctacaagtcttttggtttaccatctattgggagattgtctcagtaccaagaaccgttacatctacctggtgtccgagtggacagtggcatccaaccaggaagtgatattagcatttattatgatcctatgatttcaaaactaatcacatatggctctgatagaactgaggcactgaagagaatggcagatgcactggataactatgttattcgaggtgttacacataatattgcattacttcgagaggtgataatcaactcacgctttgtaaaaggagacatcagcactaaatttctctccgatgtgtatcctgatggcttcaaaggacacatgctaaccaagagtgagaagaaccagttattggcaatagcatcatcattgtttgtggcattccagttaagagcacaacattttcaagaaaattcaagaatgcctgttattaaaccagacatagccaactgggagctctcagtaaaattgcatgataaagttcataccgtagtagcatcaaacaatgggtcagtgttctcggtggaagttgatgggtcgaaactaaatgtgaccagcacgtggaacctggcttcgcccttattgtctgtcagcgttgatggcactcagaggactgtccagtgtctttctcgagaagcaggtggaaacatgagcattcagtttcttggtacagtgtacaaggtgaatatcttaaccagacttgccgcagaattgaacaaatttatgctggaaaaagtgactgaggacacaagcagtgttctgcgttccccgatgcccggagtggtggtggccgtctctgtcaagcctggagacgcggtagcagaaggtcaagaaatttgtgtgattgaagccatgaaaatgcagaatagtatgacagctgggaaaactggcacggtgaaatctgtgcactgtcaagctggagacacagttggagaaggggatctgctcgtggagctggaatgaaggatttataacctttcagtcatcacccaatttaattagccatttgcatgatgctttcacacacaattgattcaagcattatacaggaacacccctgtgcagctacgtttacgtcgtcatttattccacagagtcaagaccaatattctgccaaaaaatcaccaatggaaattttcattgatataaatacttgtacatatgatttgtacttctgctgtgagattccctagtgtcaaaattaaatcaataaaaactgaactgagcatttgtctaaatattagtttgccctttctttgaatgaagacaatgtacacataggcgacaggctctgccagtagactaccagcatttctttgtgatccttttaagagattgatataaatgtcagtcagttctctgccttgctttattaaattagcacttgccattttttcatctgattgccttactacttctagaagtgaggccctcactcctggtgctgattttcaaaacttcctaaggaccagagactgcaaatgcagattttggcaatccctttcctgctgtgtctctatgtgggtgtactgttggtggctgactcccctggaggtcaccctgaagcttcctggttggcc

SEQ ID NO: 317181 - DNA, 602 bp, Homo sapiens
  misc_feature (33)..(33): n is a, c, g, or t
tttttattttgtatttttgttgtttttcatctnttttttgcatcccggtgacagtacaaggtgaatatcttaaccagacttgccgcagaattgaacaaatttatgctggaaaaagtgactgaggacacaagcagtgttctgcgttccccgatgcccggagtggtggtggccgtctctgtcaagcctggagacgcggtagcagaaggtcaagaaatttgtgtgattgaagccatgaaaatgcagaatagtatgacagctgggaaaactggcacggtgaaatctgtgcactgtcaagctggagacacagttggagaaggggatctgctcgtggagctggaatgaaggatttataacctttcagtcatcacccaatttaattagccatttgcatgatgctttcacacacaattgattcaagcattatacaggaacacccctgtgcagctacgtttacgtcgtcatttattccacagagtcaagaccaatattctgccaaaaaatcaccaatggaaattttcattgatataaatacttgtacatatgatttgtacttctgctgtgagattccctagtgtcaaaattaaatcaataaaaactgaact

SEQ ID NO: 317182 - DNA, 4331 bp, Homo sapiens
  misc_feature (2043)..(2043): n is a, c, g, or t
gaatatacttgtctgtgcgtattttccatcagtgtttataacatcttgatgttattgtctctcagtgcagaaggctttctcattatcttgcatcttttcctaaccatcttgttacatcagaaagactacatagtgcctttaagaaaagccaacgttttcagtcatgaatataacattttctgtcactgaaaaaatggaattttaaatactattttgcccaaaatgaacactgaaccccattgtcttaacttactgatacgtagtgcagccgctcttggagggctgtgggaagctgcaacagccatctgctgccatctactggcgcctgtccacatgtcacctcctccatcccctgggtctgcccagctcatgggattttccttgatagggataagtttgtaggtggtgaagggaatacaagtaaaattctcagttttctttataacgttttgagatgtttttcttaaagatacaggatgatacttatcaatgattaattttaataactggaatagcccttatttcaagaactttctgaaatagctcaatatatgacagaaacaaatatattttgatgtgtgcagcaattgagaaccatttgaatttaaggctcttactgtaatttgaatttaaaagctaaaaattgatttagaatgaatgctacttttgaggaaaatttcatttaaactcatttatggtttggttttgtttttcccttaagttacaaggtgaatatcttaaccagacttgccgcagaattgaacaaatttatgctggaaaaagtgactgaggacacaagcagtgttctgcgttccccgatgcccggagtggtggtggccgtctctgtcaagcctggagacgcggtaagggctgtgtgtgtctctctgcaggacatgctggtctccaacttccccttccaaagcgacggctaacggcacagcacgattcggctctttgcagttcttacttaaccgacgccccctaaacagcaaaatcgattgcgtgtgttgtcgacctgtttcacgtttgcattacgttggtgccaggaccctcagcgcttcccctcccaaatgatctgggagtggagcagaaagaaggccagatgcattccatcattttgcaaatgcagtgttttgggaagtactttccttaaaagtgctgcttactctctagtatgctgtgctcaaagcatccattgaagtcatgccagggaataatactccgatgaggaactttttgcatgattcctggaacaaatgtctaattgggaagaagagttgaggaaaggttaattctgcaatctgtacagtaccagagcacttccattacttggtaaataaaatgtagcatcacagtttgaagtttttcatcttgatcttgtgacattaaagcacaaatcaaagctatattatttcctcgagataacttacatggatgaattgataggatgcacacattttcttagaacatggatagaaatctctactgatgagcagcaaaagtgaaaagaaaacaatttaggaggcaaccagatttccaggtacacttaaatacttgcatttttattcatgtgcaggaaaatagcatccggacatgactgtctctcatggatgaggtggtgattccgttttgtatctcaggtcactgggacttacattttagtgcctcctgatttctcaatagtacagataaaatatctgcttaacattgaggaaaaaatcaggtagttggcattggcttctagaaaagtatttgcaataaatgtgaatattaagaaaacatgatcagttttagttgtttgaatgaccagccctgaaactaatatgcgaagttagaaaaccgacttaacagctgctttacctggtgatacagaaatagaactgtccactttttcagaaaggcataaaagaggctacgtggctgtgaattgttgtttgctgtgaaagcattgatactcctggaagaaagccctctttaagactgtctaatgcccacgtgttaaggatttgggagaggccataagaaaaattacgtgtgtgtgtntgtgtgtgtgtgtaatgtgtgtaaaattcaggggaggacatcttccttctccagagttagggtcgtaagaggatagtctcgtggccttgacattaagaatcgttcacttgcacgtgacattatcagagctgtcagtggaatcttctagtgactagatatgtaggttcgtaaacaatataagggttttgttttgtttttttcatttttcttaagttttttttctggaaggcatctatctagtctgtatactgccagcctgagctttccactcctaattgtgtggctttaattataaaatcgtgtgtgtgtgtgtgtgtgtgtgtgtgtgtgtgtgtgtgtgtgtttcaagtaagtgttttccttaaatccttttctaacacctgaatccaaaccggagtggagggagggcgggcagggatgagggagaccactcctgcctcaagcctggagggcaagagggtgagactgcagccctggcccctcacacggccctcaaggaggttgctcagaggcagtaaacggggcgctcccaaggccagatcagcgcagccttctggtttctttaacagctgctggctcctgatctgactttcccacataccgaaagggtttggcctttgtacgttccatttcctggttaataattgaatgtagaaaagcaaggcatttcgtaaatgggaacaatgtgatatcagtccttggttcattgatgtagctcagatattaaaaacacccaccaataattaaatgtgtgtactcattaagaatggtttgagaactgttaaaaatatgttacggcagagcaacggggcctatattttatgcattcctttaaattcagagtacctggggggcacgcgtagtgaacaggctcaggacctcgggatctgtcagctccctcctaagttctgtttgcgggggctgctcaggtggggcgtatacttgcttttatttgtcttttttggtacttgcagaacttcctttcatattctgtgccattgtgttttgatgaaacagccttttctcttgaattactgcttgtgaaaaatgtcccaaaccactaataccgaaacccaatgcagcctgagaagtttcatcgtcggctcttagcgcaacttctatagttaaattctgcttagtgtaattaaaacacaagaagcttccttggaccagaggcacgtcacttacttgaggccattgtgaggaaacactacctgtcacgttgaaattttgcggttttaagtgattttaacaccgcggggcgtgttgtgttttcctccgcactaacaatagccgggcgaggttccccttttatgggtgggaagataatggagtcagtctccttggtgtattttcaaggaaaataaggaccctaaaacaactaagggccttacaagtattctgtttttctttgaaatgttactttttatcgtttaaattccagtaatctatcatgtttctgtttagcttagctgaagtaaaacttgaccaatcgtagaatggtgggcctggcaataagttctaaaaaaagtgtcacataaatcgtaatgaacaaatctgttttgtgaagtaaacaatttgaacacagtttaaaaacctcaggaagaagagatgtggggtggccgttgagaagtagtgaatccgctcggggcgcttggtgtggcagggccttgtgcactgattcatttgaaacactcagcctgccctaaacacagaagctgtgttttatttgaagggcttctgtagggttcacacagcaaaagttcctaataactttttcagtgtctgttatatactatttaacattaaatgtggcaggtcacattttaaatgattgtgtaatagtttttccgaacacgtggagagaggatgttaatacacagtaaaatgcaggtaagcaaacaaatcaataagaaagtacagtggattattaaggtccagaatcagtaatataatttaggaaacaactgatagaataaattttagtgcctttttatatgccttctgaaaatgtttctgcagtaactcatttcagtttgaaaactcgttttcttagactcgtaacactattgtaaactgggagcacttctgtaatcaaagttagcatgactcagctgtttcaaacttctacctttatgatactcttgaacagaaatgttagaaatatatatattttcagaataacggtagaatacatttttccacatgtcaaattagacttatagctgctgaatttattgcataattttcactttgactttgaagtcaaataaagtcatgatgagcac

SEQ ID NO: 317183 - DNA, 1850 bp, Homo sapiens
tcagttgtcaacaaaatcagtaagtgttattaaataccccatggtgtgtggttctggcactgaaatggggctgtttcctaaggctctgtccatggccacctctgtctatttctgcattctgtcttgcattgcttctgttgcctatatcctggtcagcacagtttatggtgaatcattgcttattgaaatagagacggcaataatgaagccagctattataaattagagcaaatatacacatccaatacgttttaaacgcatgtgatctctggagtagtatcactaggtagcttccatttcagttcgcctttggtatattactgtactccaaagaatatcatttttccctctgtaaaattttcctcatgaaaatggtcaccataggtctgatttactttttggatcagtaacaggtcacagcataaatcccattcctgcatcaaggcggaacaagaccctcacactttggagggagctgagttcctgtttagaagaacatgcacagttagataaatctgttcacacggcttagatgatcagagccaacatctgatgactatgagcaaggcacttttctaaacatttttagtattttctgaacagttttgttgaggtatactttacagataacattcacctcttgagctgcagttcaatgagttctcgtaaactgagttgtgcagccatcaccacgttccagttttagcacatttccatcaccccaaaagttcctttctgcctgtttgcagccaatccctgctccctggccagccacaggcaagcgctgtcaatgtttggacagtgttggattacctaatggactcttcaagacagtcctttggggtgttactgtcattctctgttttacacggtgaagaagtgaggcactgagggcactcagggtggtttcaaatgaccgaggccaggtgctcagggcccagaaccctcttaccccctccaacttcagtgagcttcaaaatcacctgctgagcttgtttgaccacagacttgtgggctccacccttgaattcctgacgccctaggtctgggatggggcttgacaatttgcatttgtaaaaagttcctgaatgctgctgctgctgctggtcagggaaccctgctttaagacctcctggtttatgcaatttcaaacattgtaagaaatagtcactcatgtgattggtttgtgtgcttggtgtagactgtacgaggatttttcaaaagtaagtattgttcattctaaaggaaggaaatgtatgttatgagatagaattatataataaacagaaccattaaatgccatctgaaaagtggtgttttcaatggcaggaagtagcattgctgcgtattttgtgtgtgtgcgcaactcagctttgtgtcattgtgtaactttaatttgaaagaacatcacgtgactgctgttttcatttctgccttttaaaaagcagacagctattcagaacagcaagaagcagacccaaactttgtttgtatgcccctagtcataggcaaaaatggaaagggtaatttaccaaaaaagaagaaaatagataaaaaggaaaagaatggaaagaaagtactgactcactgcaaacagctgcaaaatgttgcccttgggatagaggttaactcggttgtgaaataatggccaaagcggtgcactcttaataacttttttgtagccctggagaaagcttctggattgactgtgagaagcttggcagaaggtgctgcggcctggtggctggctcagcaggaggcctgggattgaaagctctcggtttgtacaagctcttttggatttgtaacacttttattttaaatctccaataaatgtaaatattttggtc

SEQ ID NO: 317184 - DNA, 413 bp, Homo sapiens
agaaatggattaggagcctgccgcctcttggttctggttactaattcttactctcccctccccctgcatttttcaaaattcaaggtgaaatctgtgcactgtcaagctggagacacagttggagaaggggatctgctcgtggagctggaatgaaggatttataacctttcagtcatcacccaatttaattagccatttgcatgatgctttcacacacaattgattcaagcattatacaggaacacccctgtgcagctacgtttacgtcgtcatttattccacagagtcaagaccaatattctgccaaaaaatcaccaatggaaattttcattgatataaatacttgtacatatgatttgtacttctgctgtgagattccctagtgtcaaaattaaatcaataaaaactgaact

SEQ ID NO: 317185 - DNA, 520 bp, Homo sapiens
  misc_feature (490)..(490): n is a, c, g, or t
tatttcgaccctctcacttcctttcttattcgtatatacccatttatctagtcagctcaggtagcagaaggtcaagaaatttgtgtgattgaagccatgaaaatgcagaatagtatgacagctgggaaaactggcacggtgaaatctgtgcactgtcaagctggagacacagttggagaaggggatctgctcgtggagctggaatgaaggatttataacctttcagtcatcacccaatttaattagccatttgcatgatgctttcacacacaattgattcaagcattatacaggaacacccctgtgcagctacgtttacgtcgtcatttattccacagagtcaagaccaatattctgccaaaaaatcaccaatggaaattttcattgatataaatacttgtacatatgatttgtacttctgctgtgagattccctagtgtcaaaattaaatcaataaaaactgaactagatgcggcaagatttcgcacantgggaaacaaaaatataaggtaacaagcga

SEQ ID NO: 317186 - DNA, 531 bp, Homo sapiens
acagggggtgggaattaagttgcaatggactatcttattgaaccacatatacaggtatgtagaaggtcaaggaaatctgtgtgaatagaagccatgaggaggcagggagagtaggacagatgggcaaaaaggcacggtgaaatctgtgcactgtcaagctggagacacagttggagaaggggatctgctcgtggagctggaatgaaggatttataacctttcagtcatcacccaatttaattagccatttgcatgatgctttcacacacaattgattcaagcattatacaggaacacccctgtgcagctacgtttacgtcgtcatttattccacagagtcaagaccaatattctgccaaaaaatcaccaatggaaattttcattgatataaatacttgtacatatgatttgtacttctgctgtgagattccctagtgtcaaaattaaatcaataaaaactgaactgatgaaggcgagccgagtgatatgatttgggcgtggatcattgcgaagatgatgggcgtcaagcta

SEQ ID NO: 317187 - DNA, 902 bp, Homo sapiens
taacttagtagatcagataaaaagtaaggaaaaagggctattggcaagcctctgttaatttacaccgctacatacaaggtgaatatcttaaccagacttgccgcagaattgaacaaatttatgctggaaaaagtgactgaggacacaagcagtgttctgcgttccccgatgcccggagtggtggtggccgtctctgtcaagcctggagacgcgcatatagtcaagaaatttagatgattgaagcctagaaaaagcataatatttttttagtctgtgaaaattggcacggaaaaatcacgcgcactgacaaactgagaacacattatgaaaaaaggaatcagcaactacaactggaatgaatggattataaccatatatatatataccaaaataaatgatacgtaaaacatgataagatggaaacacaaatagaatgaagcatttagagaggaactgaaattagaacaaaatcatctcactaggtagtatggttgtacaagagagtctgattattattatgcacgtagattaccatttgaatatttttttggttatatgtatctcatgtttataaagtaatcctaaatgatgtagtttagtgtcatggcagccttgtgatacaaaagaatgttgatataaacagtatatctataattatggataaatttttattattttatatattactattggtatattaatgatgataaatatgtagcttaagttattgttctatgactaacatggtataagttagaataatattttagaagtaatatttgatatagattgtaaaatataaagagaattactagataagtcatatgattagactatcatctaaatatttacaccctgtcacgccgttatagtaataaatgacaggataaaatatattaagg

SEQ ID NO: 317188 - DNA, 586 bp, Homo sapiens
gggatttcaggaaagaacattctctaggcgcttctgaggcattggatgaatatggccacagtggtgtgaggggccaggagccccatgccaggacacccacccacaccacatagccattgccctaggaacctggacttgcccgtttcaaagactgggaggccaaagacagcatggttttcagctgcagctcactcctgcagggaagcctcgcgcttaacgccagtgggcttaacccagctcagcctggctgcccctcaggatgaaaggcaagttctgaacgcagtctgagcaaaggcccgtgggcgctcccagtctcctagcatggaatgcatgtagctctggaagtcattcctgtgtctggagggttttccggaagctgccttgtgccttgttgtgggtactcgctgtgtcttgcagaggatgggacagtggtcctcgtggcgccagggccgagctgttcccagttccccgggactatagacagaaatatgtatatttggtggtggttttttttttttggtaacagctatactgagatgtaattcacatacaatttagccctttaacgtgtacgattcggtggttt

SEQ ID NO: 317189 - DNA, 2493 bp, Homo sapiens
ccggctgtgtgagaggtcagcagaggggcggtctgcggggacaacaatggcggggttctgggtcgggacagcaccgctggtcgctgccggacggcgtgggcggtggccgccgcagcagctgatgctgagcgcggcgctgcggaccctgaagcatgttctgtactattcaagacagtgcttaatggtgtcccgtaatcttggttcagtgggatatgatcctaatgaaaaaacttttgataaaattcttgttgctaatagaggagaaattgcatgtcgggttattagaacttgcaagaagatgggcattaagacagttgccatccacagtgatgttgatgctagttctgttcatgtgaaaatggcggatgaggctgtctgtgttggcccagctcccaccagtaaaagctacctcaacatggatgccatcatggaagccattaagaaaaccagggcccaagctgtacatccaggttatggattcctttcagaaaacaaagaatttgccagatgtttggcagcagaagatgtcgttttcattggacctgacacacatgctattcaagccatgggcgacaagattgaaagcaaattattagctaagaaagcagaggttaatacaatccctggctttgatggagtagtcaaggatgcagaagaagctgtcagaattgcaagggaaattggctaccctgtcatgatcaaggcctcagcaggtggtggtgggaaaggcatgcgcattgcttgggatgatgaagagaccagggatggttttagattgtcatctcaagaagctgcttctagttttggcgatgatagactactaatagaaaaatttattgataatcctcgtcatatagaaatccaggttctaggtgataaacatgggaatgctttatggcttaatgaaagagagtgctcaattcagagaagaaatcagaaggtggtggaggaagcaccaagcatttttttggatgcggagactcgaagagcgatgggagaacaagctgtagctcttgccagagcagtaaaatattcctctgctgggaccgtggagttccttgtggactctaagaagaatttttatttcttggaaatgaatacaagactccaggttgagcatcctgtcacagaatgcattactggcctggacctagtccaggaaatgatccgtgttgctaagggctaccctctcaggcacaaacaagctgatattcgcatcaacggctgggcagttgaatgtcgggtttatgctgaggacccctacaagtcttttggtttaccatctattgggagattgtctcagtaccaagaaccgttacatctacctggtgtccgagtggacagtggcatccaaccaggaagtgatattagcatttattatgatcctatgatttcaaaactaatcacatatggctctgatagaactgaggcactgaagagaatggcagatgcactggataactatgttattcgaggtgttacacataatattgcattacttcgagaggtgataatcaactcacgctttgtaaaaggagacatcagcactaaatttctctccgatgtgtatcctgatggcttcaaaggacacatgctaaccaagagtgagaagaaccagttattggcaatagcatcatcattgtttgtggcattccagttaagagcacaacattttcaagaaaattcaagaatgcctgttattaaaccagacatagccaactgggagctctcagtaaaattgcatgataaagttcataccgtagtagcatcaaacaatgggtcagtgttctcggtggaagttgatgggtcgaaactaaatgtgaccagcacgtggaacctggcttcgcccttattgtctgtcagcgttgatggcactcagaggactgtccagtgtctttctcgagaagcaggtggaaacatgagcattcagtttcttggtacagtgtacaaggtgaatatcttaaccagacttgccgcagaattgaacaaatttatgctggaaaaagtgactgaggacacaagcagtgttctgcgttccccgatgcccggagtggtggtggccgtctctgtcaagcctggagacgcggtagcagaaggtcaagaaatttgtgtgattgaagccatgaaaatgcagaatagtatgacagctgggaaaactggcacggtgaaatctgtgcactgtcaagctggagacacagttggagaaggggatctgctcgtggagctggaatgaaggatttataacctttcagtcatcacccaatttaattagccatttgcatgatgctttcacacacaattgattcaagcattatacaggaacacccctgtgcagctacgtttacgtcgtcatttattccacagagtcaagaccaatattctgccaaaaaatcaccaatggaaattttcattgatataaatacttgtacatatgatttgtacttctgctgtgagattccctagtgtcaaaattaaatcaataaaaactgaact

SEQ ID NO: 317190 - DNA, 2415 bp, Homo sapiens
ccggctgtgtgagaggtcagcagaggggcggtctgcggggacaacaatggcggggttctgggtcgggacagcaccgctggtcgctgccggacggcgtgggcggtggccgccgcagcagctgatgctgagcgcggcgctgcggaccctgaagacttttgataaaattcttgttgctaatagaggagaaattgcatgtcgggttattagaacttgcaagaagatgggcattaagacagttgccatccacagtgatgttgatgctagttctgttcatgtgaaaatggcggatgaggctgtctgtgttggcccagctcccaccagtaaaagctacctcaacatggatgccatcatggaagccattaagaaaaccagggcccaagctgtacatccaggttatggattcctttcagaaaacaaagaatttgccagatgtttggcagcagaagatgtcgttttcattggacctgacacacatgctattcaagccatgggcgacaagattgaaagcaaattattagctaagaaagcagaggttaatacaatccctggctttgatggagtagtcaaggatgcagaagaagctgtcagaattgcaagggaaattggctaccctgtcatgatcaaggcctcagcaggtggtggtgggaaaggcatgcgcattgcttgggatgatgaagagaccagggatggttttagattgtcatctcaagaagctgcttctagttttggcgatgatagactactaatagaaaaatttattgataatcctcgtcatatagaaatccaggttctaggtgataaacatgggaatgctttatggcttaatgaaagagagtgctcaattcagagaagaaatcagaaggtggtggaggaagcaccaagcatttttttggatgcggagactcgaagagcgatgggagaacaagctgtagctcttgccagagcagtaaaatattcctctgctgggaccgtggagttccttgtggactctaagaagaatttttatttcttggaaatgaatacaagactccaggttgagcatcctgtcacagaatgcattactggcctggacctagtccaggaaatgatccgtgttgctaagggctaccctctcaggcacaaacaagctgatattcgcatcaacggctgggcagttgaatgtcgggtttatgctgaggacccctacaagtcttttggtttaccatctattgggagattgtctcagtaccaagaaccgttacatctacctggtgtccgagtggacagtggcatccaaccaggaagtgatattagcatttattatgatcctatgatttcaaaactaatcacatatggctctgatagaactgaggcactgaagagaatggcagatgcactggataactatgttattcgaggtgttacacataatattgcattacttcgagaggtgataatcaactcacgctttgtaaaaggagacatcagcactaaatttctctccgatgtgtatcctgatggcttcaaaggacacatgctaaccaagagtgagaagaaccagttattggcaatagcatcatcattgtttgtggcattccagttaagagcacaacattttcaagaaaattcaagaatgcctgttattaaaccagacatagccaactgggagctctcagtaaaattgcatgataaagttcataccgtagtagcatcaaacaatgggtcagtgttctcggtggaagttgatgggtcgaaactaaatgtgaccagcacgtggaacctggcttcgcccttattgtctgtcagcgttgatggcactcagaggactgtccagtgtctttctcgagaagcaggtggaaacatgagcattcagtttcttggtacagtgtacaaggtgaatatcttaaccagacttgccgcagaattgaacaaatttatgctggaaaaagtgactgaggacacaagcagtgttctgcgttccccgatgcccggagtggtggtggccgtctctgtcaagcctggagacgcggtagcagaaggtcaagaaatttgtgtgattgaagccatgaaaatgcagaatagtatgacagctgggaaaactggcacggtgaaatctgtgcactgtcaagctggagacacagttggagaaggggatctgctcgtggagctggaatgaaggatttataacctttcagtcatcacccaatttaattagccatttgcatgatgctttcacacacaattgattcaagcattatacaggaacacccctgtgcagctacgtttacgtcgtcatttattccacagagtcaagaccaatattctgccaaaaaatcaccaatggaaattttcattgatataaatacttgtacatatgatttgtacttctgctgtgagattccctagtgtcaaaattaaatcaataaaaactgaact

SEQ ID NO: 317191 - DNA, 2439 bp, Homo sapiens
ccggctgtgtgagaggtcagcagaggggcggtctgcggggacaacaatggcggggttctgggtcgggacagcaccgctggtcgctgccggacggcgtgggcggtggccgccgcagcagctgatgctgagcgcggcgctgcggaccctgaagcatgttctgtactattcaagacagtgcttaatggtgtcccgtaatcttggttcagtgggatatgatcctaatgaaaaaacttttgataaaattcttgttgctaatagaggagaaattgcatgtcgggttattagaacttgcaagaagatgggcattaagacagttgccatccacagtgatgttgatgctagttctgttcatgtgaaaatggcggatgaggctgtctgtgttggcccagctcccaccagtaaaagctacctcaacatggatgccatcatggaagccattaagaaaaccagggcccaagctgtacatccaggttatggattcctttcagctgacacacatgctattcaagccatgggcgacaagattgaaagcaaattattagctaagaaagcagaggttaatacaatccctggctttgatggagtagtcaaggatgcagaagaagctgtcagaattgcaagggaaattggctaccctgtcatgatcaaggcctcagcaggtggtggtgggaaaggcatgcgcattgcttgggatgatgaagagaccagggatggttttagattgtcatctcaagaagctgcttctagttttggcgatgatagactactaatagaaaaatttattgataatcctcgtcatatagaaatccaggttctaggtgataaacatgggaatgctttatggcttaatgaaagagagtgctcaattcagagaagaaatcagaaggtggtggaggaagcaccaagcatttttttggatgcggagactcgaagagcgatgggagaacaagctgtagctcttgccagagcagtaaaatattcctctgctgggaccgtggagttccttgtggactctaagaagaatttttatttcttggaaatgaatacaagactccaggttgagcatcctgtcacagaatgcattactggcctggacctagtccaggaaatgatccgtgttgctaagggctaccctctcaggcacaaacaagctgatattcgcatcaacggctgggcagttgaatgtcgggtttatgctgaggacccctacaagtcttttggtttaccatctattgggagattgtctcagtaccaagaaccgttacatctacctggtgtccgagtggacagtggcatccaaccaggaagtgatattagcatttattatgatcctatgatttcaaaactaatcacatatggctctgatagaactgaggcactgaagagaatggcagatgcactggataactatgttattcgaggtgttacacataatattgcattacttcgagaggtgataatcaactcacgctttgtaaaaggagacatcagcactaaatttctctccgatgtgtatcctgatggcttcaaaggacacatgctaaccaagagtgagaagaaccagttattggcaatagcatcatcattgtttgtggcattccagttaagagcacaacattttcaagaaaattcaagaatgcctgttattaaaccagacatagccaactgggagctctcagtaaaattgcatgataaagttcataccgtagtagcatcaaacaatgggtcagtgttctcggtggaagttgatgggtcgaaactaaatgtgaccagcacgtggaacctggcttcgcccttattgtctgtcagcgttgatggcactcagaggactgtccagtgtctttctcgagaagcaggtggaaacatgagcattcagtttcttggtacagtgtacaaggtgaatatcttaaccagacttgccgcagaattgaacaaatttatgctggaaaaagtgactgaggacacaagcagtgttctgcgttccccgatgcccggagtggtggtggccgtctctgtcaagcctggagacgcggtagcagaaggtcaagaaatttgtgtgattgaagccatgaaaatgcagaatagtatgacagctgggaaaactggcacggtgaaatctgtgcactgtcaagctggagacacagttggagaaggggatctgctcgtggagctggaatgaaggatttataacctttcagtcatcacccaatttaattagccatttgcatgatgctttcacacacaattgattcaagcattatacaggaacacccctgtgcagctacgtttacgtcgtcatttattccacagagtcaagaccaatattctgccaaaaaatcaccaatggaaattttcattgatataaatacttgtacatatgatttgtacttctgctgtgagattccctagtgtcaaaattaaatcaataaaaactgaact

SEQ ID NO: 317192 - DNA, 2090 bp, Homo sapiens
ggtagtgcttcctgccagctcatttcaactgctttgagtttcttaatataataatgatgaggtagaatttacattccacttatggtattaattttacatttctctgaatgaaaagggttagaaggtagtaaaattgaacattaaatgaatcggaggagacagtagtgcaatatatgactgccctaaagacattgtgcaatgcctcatgggattaatgttgagtctcatttcctgcttttacaggatgcagaagaagctgtcagaattgcaagggaaattggctaccctgtcatgatcaaggcctcagcaggtggtggtgggaaaggcatgcgcattgcttgggatgatgaagagaccagggatggttttagattgtcatctcaagaagctgcttctagttttggcgatgatagactactaatagaaaaatttattgataatcctcgtcatatagaaatccaggttctaggtgataaacatgggaatgctttatggcttaatgaaagagagtgctcaattcagagaagaaatcagaaggtggtggaggaagcaccaagcatttttttggatgcggagactcgaagagcgatgggagaacaagctgtagctcttgccagagcagtaaaatattcctctgctgggaccgtggagttccttgtggactctaagaagaatttttatttcttggaaatgaatacaagactccaggttgagcatcctgtcacagaatgcattactggcctggacctagtccaggaaatgatccgtgttgctaagggctaccctctcaggcacaaacaagctgatattcgcatcaacggctgggcagttgaatgtcgggtttatgctgaggacccctacaagtcttttggtttaccatctattgggagattgtctcagtaccaagaaccgttacatctacctggtgtccgagtggacagtggcatccaaccaggaagtgatattagcatttattatgatcctatgatttcaaaactaatcacatatggctctgatagaactgaggcactgaagagaatggcagatgcactggataactatgttattcgaggtgttacacataatattgcattacttcgagaggtgataatcaactcacgctttgtaaaaggagacatcagcactaaatttctctccgatgtgtatcctgatggcttcaaaggacacatgctaaccaagagtgagaagaaccagttattggcaatagcatcatcattgtttgtggcattccagttaagagcacaacattttcaagaaaattcaagaatgcctgttattaaaccagacatagccaactgggagctctcagtaaaattgcatgataaagttcataccgtagtagcatcaaacaatgggtcagtgttctcggtggaagttgatgggtcgaaactaaatgtgaccagcacgtggaacctggcttcgcccttattgtctgtcagcgttgatggcactcagaggactgtccagtgtctttctcgagaagcaggtggaaacatgagcattcagtttcttggtacagtgtacaaggtgaatatcttaaccagacttgccgcagaattgaacaaatttatgctggaaaaagtgactgaggacacaagcagtgttctgcgttccccgatgcccggagtggtggtggccgtctctgtcaagcctggagacgcggtagcagaaggtcaagaaatttgtgtgattgaagccatgaaaatgcagaatagtatgacagctgggaaaactggcacggtgaaatctgtgcactgtcaagctggagacacagttggagaaggggatctgctcgtggagctggaatgaaggatttataacctttcagtcatcacccaatttaattagccatttgcatgatgctttcacacacaattgattcaagcattatacaggaacacccctgtgcagctacgtttacgtcgtcatttattccacagagtcaagaccaatattctgccaaaaaatcaccaatggaaattttcattgatataaatacttgtacatatgatttgtacttctgctgtgagattccctagtgtcaaaattaaatcaataaaaactgaact

SEQ ID NO: 317193 - DNA, 1306 bp, Homo sapiens
gggagccgtgtcttcatgcctgtgcctctttcccagagggagactcctgtgggccctggttagccctaccatgggtgcaggagggctgttttctgttcgctgtgccgtggcggtagaccgtccttgtgtccttgaactttgaggtccgagtggacagtggcatccaaccaggaagtgatattagcatttattatgatcctatgatttcaaaactaatcacatatggctctgatagaactgaggcactgaagagaatggcagatgcactggataactatgttattcgaggtgttacacataatattgcattacttcgagaggtgataatcaactcacgctttgtaaaaggagacatcagcactaaatttctctccgatgtgtatcctgatggcttcaaaggacacatgctaaccaagagtgagaagaaccagttattggcaatagcatcatcattgtttgtggcattccagttaagagcacaacattttcaagaaaattcaagaatgcctgttattaaaccagacatagccaactgggagctctcagtaaaattgcatgataaagttcataccgtagtagcatcaaacaatgggtcagtgttctcggtggaagttgatgggtcgaaactaaatgtgaccagcacgtggaacctggcttcgcccttattgtctgtcagcgttgatggcactcagaggactgtccagtgtctttctcgagaagcaggtggaaacatgagcattcagtttcttggtacagtgtacaaggtgaatatcttaaccagacttgccgcagaattgaacaaatttatgctggaaaaagtgactgaggacacaagcagtgttctgcgttccccgatgcccggagtggtggtggccgtctctgtcaagcctggagacgcggtagcagaaggtcaagaaatttgtgtgattgaagccatgaaaatgcagaatagtatgacagctgggaaaactggcacggtgaaatctgtgcactgtcaagctggagacacagttggagaaggggatctgctcgtggagctggaatgaaggatttataacctttcagtcatcacccaatttaattagccatttgcatgatgctttcacacacaattgattcaagcattatacaggaacacccctgtgcagctacgtttacgtcgtcatttattccacagagtcaagaccaatattctgccaaaaaatcaccaatggaaattttcattgatataaatacttgtacatatgatttgtacttctgctgtgagattccctagtgtcaaaattaaatcaataaaaactgaact

SEQ ID NO: 317194 - DNA, 1168 bp, Homo sapiens
agaacatcagtttatgtcctgaaatatgttttcagaaaatagaaagccaagtatatttcgtccgagtggacagtggcatccaaccaggaagtgatattagcatttattatgatcctatgatttcaaaactaatcacatatggctctgatagaactgaggcactgaagagaatggcagatgcactggataactatgttattcgaggtgttacacataatattgcattacttcgagaggtgataatcaactcacgctttgtaagacacatgctaaccaagagtgagaagaaccagttattggcaatagcatcatcattgtttgtggcattccagttaagagcacaacattttcaagaaaattcaagaatgcctgttattaaaccagacatagccaactgggagctctcagtaaaattgcatgataaagttcataccgtagtagcatcaaacaatgggtcagtgttctcggtggaagttgatgggtcgaaactaaatgtgaccagcacgtggaacctggcttcgcccttattgtctgtcagcgttgatggcactcagaggactgtccagtgtctttctcgagaagcaggtggaaacatgagcattcagtttcttggtacagtgtacaaggtgaatatcttaaccagacttgccgcagaattgaacaaatttatgctggaaaaagtgactgaggacacaagcagtgttctgcgttccccgatgcccggagtggtggtggccgtctctgtcaagcctggagacgcggtagcagaaggtcaagaaatttgtgtgattgaagccatgaaaatgcagaatagtatgacagctgggaaaactggcacggtgaaatctgtgcactgtcaagctggagacacagttggagaaggggatctgctcgtggagctggaatgaaggatttataacctttcagtcatcacccaatttaattagccatttgcatgatgctttcacacacaattgattcaagcattatacaggaacacccctgtgcagctacgtttacgtcgtcatttattccacagagtcaagaccaatattctgccaaaaaatcaccaatggaaattttcattgatataaatacttgtacatatgatttgtacttctgctgtgagattccctagtgtcaaaattaaatcaataaaaactgaact

SEQ ID NO: 317195 - DNA, 648 bp, Homo sapiens
gtgggttatacctgtcttgcagccatccgagatcacgcttctgtcttgtctttctcgagaagcaggtggaaacatgagcattcagtttcttggtacagtgtacaaggtgaatatcttaaccagacttgccgcagaattgaacaaatttatgctggaaaaagtgactgaggacacaagcagtgttctgcgttccccgatgcccggagtggtggtggccgtctctgtcaagcctggagacgcggtagcagaaggtcaagaaatttgtgtgattgaagccatgaaaatgcagaatagtatgacagctgggaaaactggcacggtgaaatctgtgcactgtcaagctggagacacagttggagaaggggatctgctcgtggagctggaatgaaggatttataacctttcagtcatcacccaatttaattagccatttgcatgatgctttcacacacaattgattcaagcattatacaggaacacccctgtgcagctacgtttacgtcgtcatttattccacagagtcaagaccaatattctgccaaaaaatcaccaatggaaattttcattgatataaatacttgtacatatgatttgtacttctgctgtgagattccctagtgtcaaaattaaatcaataaaaactgaact

SEQ ID NO: 317196 - DNA, 2541 bp, Homo sapiens
ccggctgtgtgagaggtcagcagaggggcggtctgcggggacaacaatggcggggttctgggtcgggacagcaccgctggtcgctgccggacggcgtgggcggtggccgccgcagcagctgatgctgagcgcggcgctgcggaccctgaagcatgttctgtactattcaagacagtgcttaatggtgtcccgtaatcttggttcagtgggatatgatcctaatgaaaaaacttttgataaaattcttgttgctaatagaggagaaattgcatgtcgggttattagaacttgcaagaagatgggcattaagacagttgccatccacagtgatgttgatgctagttctgttcatgtgaaaatggcggatgaggctgtctgtgttggcccagctcccaccagtaaaagctacctcaacatggatgccatcatggaagccattaagaaaaccagggcccaagctgtacatccaggttatggattcctttcagaaaacaaagaatttgccagatgtttggcagcagaagatgtcgttttcattggacctgacacacatgctattcaagccatgggcgacaagattgaaagcaaattattagctaagaaagcagaggttaatacaatccctggctttgatggagtagtcaaggatgcagaagaagctgtcagaattgcaagggaaattggctaccctgtcatgatcaaggcctcagcaggtggtggtgggaaaggcatgcgcattgcttgggatgatgaagagaccagggatggttttagattgtcatctcaagaagctgcttctagttttggcgatgatagactactaatagaaaaatttattgataatcctcgtcatatagaaatccaggttctaggtgataaacatgggaatgctttatggcttaatgaaagagagtgctcaattcagagaagaaatcagaaggtggtggaggaagcaccaagcatttttttggatgcggagactcgaagagcgatgggagaacaagctgtagctcttgccagagcagtaaaatattcctctgctgggaccgtggagttccttgtggactctaagaagaatttttatttcttggaaatgaatacaagactccaggttgagcatcctgtcacagaatgcattactggcctggacctagtccaggaaatgatccgtgttgctaagggctaccctctcaggcacaaacaagctgatattcgcatcaacggctgggcagttgaatgtcgggtttatgctgaggacccctacaagtcttttggtttaccatctattgggagattgtctcagtaccaagaaccgttacatctacctggtgtccgagtggacagtggcatccaaccaggaagtgatattagcatttattatgatcctatgatttcaaaactaatcacatatggctctgatagaactgaggcactgaagagaatggcagatgcactggataactatgttattcgaggtgttacacataatattgcattacttcgagaggtgataatcaactcacgctttgtaaaaggagacatcagcactaaatttctctccgatgtgtatcctgatggcttcaaaggacacatgctaaccaagagtgagaagaaccagttattggcaatagcatcatcattgtttgtggcattccagttaagagcacaacattttcaagaaaattcaagaatgcctgttattaaaccagacatagccaactgggagctctcagtaaaattgcatgataaagttcataccgtagtagcatcaaacaatgggtcagtgttctcggtggaagttgatgggtcgaaactaaatgtgaccagcacgtggaacctggcttcgcccttattgtctgtcagcgttgatggcactcagaggactgtccagtgtctttctcgagaagcaggtggaaacatgagcattcagtttcttggtacagtgtacaaggtgaatatcttaaccagacttgccgcagaattgaacaaatttatgctggaaaaagtgactgaggacacaagcagtgttctgcgttccccgatgcccggagtggtggtggccgtctctgtcaagcctggagacgcggcaacctcgagtctgtctgtagagatctgcctattctggacatttcaggtagcagaaggtcaagaaatttgtgtgattgaagccatgaaaatgcagaatagtatgacagctgggaaaactggcacggtgaaatctgtgcactgtcaagctggagacacagttggagaaggggatctgctcgtggagctggaatgaaggatttataacctttcagtcatcacccaatttaattagccatttgcatgatgctttcacacacaattgattcaagcattatacaggaacacccctgtgcagctacgtttacgtcgtcatttattccacagagtcaagaccaatattctgccaaaaaatcaccaatggaaattttcattgatataaatacttgtacatatgatttgtacttctgctgtgagattccctagtgtcaaaattaaatcaataaaaactgaact

SEQ ID NO: 317197 - DNA, 2352 bp, Homo sapiens
ccggctgtgtgagaggtcagcagaggggcggtctgcggggacaacaatggcggggttctgggtcgggacagcaccgctggtcgctgccggacggcgtgggcggtggccgccgcagcagctgatgctgagcgcggcgctgcggaccctgaagcatgttctgtactattcaagacagtgcttaatggtgtcccgtaatcttggttcagtgggatatgatcctaatgaaaaaacttttgataaaattcttgttgctaatagaggagaaattgcatgtcgggttattagaacttgcaagaagatgggcattaagacagttgccatccacagtgatgttgatgctagttctgttcatgtgaaaatggcggatgaggctgtctgtgttggcccagctcccaccagtaaaagctacctcaacatggatgccatcatggaagccattaagaaaaccagggcccaagctgtacatccaggttatggattcctttcagaaaacaaagaatttgccagatgtttggcagcagaagatgtcgttttcattggacctgacacacatgctattcaagccatgggcgacaagattgaaagcaaattattagctaagaaagcagaggttaatacaatccctggctttgatggagtagtcaaggatgcagaagaagctgtcagaattgcaagggaaattggctaccctgtcatgatcaaggcctcagcaggtggtggtgggaaaggcatgcgcattgcttgggatgatgaagagaccagggatggttttagattgtcatctcaagaagctgcttctagttttggcgatgatagactactaatagaaaaatttattgataatcctcgtcatatagaaatccaggttctaggtgataaacatgggaatgctttatggcttaatgaaagagagtgctcaattcagagaagaaatcagaaggtggtggaggaagcaccaagcatttttttggatgcggagactcgaagagcgatgggagaacaagctgtagctcttgccagagcagtaaaatattcctctgctgggaccgtggagttccttgtggactctaagaagaatttttatttcttggaaatgaatacaagactccaggttgagcatcctgtcacagaatgcattactggcctggacctagtccaggaaatgatccgtgttgctaagggctaccctctcaggcacaaacaagctgatattcgcatcaacggctgggcagttgaatgtcgggtttatgctgaggacccctacaagtcttttggtttaccatctattgggagattgtctcagtaccaagaaccgttacatctacctggtgtccgagtggacagtggcatccaaccaggaagtgatattagcatttattatgatcctatgatttcaaaactaatcacatatggctctgatagaactgaggcactgaagagaatggcagatgcactggataactatgttattcgaggtgttacacataatattgcattacttcgagaggtgataatcaactcacgctttgtaaaaggagacatcagcactaaatttctctccgatgtgtatcctgatggcttcaaaggacacatgctaaccaagagtgagaagaaccagttattggcaatagcatcatcattgtttgtggcattccagttaagagcacaacattttcaagaaaattcaagaatgcctgttattaaaccagacatagccaactgggagctctcagtaaaattgcatgataaagttcataccgtagtagcatcaaacaatgggtcagtgttctcggtggaagttgatgggtcgaaactaaatgtgaccagcacgtggaacctggcttcgcccttattgtctgtcagcgttgatggcactcagaggactgtccagtgtctttctcgagaagcaggtggaaacatgagcattcagtttcttggtacagtggtagcagaaggtcaagaaatttgtgtgattgaagccatgaaaatgcagaatagtatgacagctgggaaaactggcacggtgaaatctgtgcactgtcaagctggagacacagttggagaaggggatctgctcgtggagctggaatgaaggatttataacctttcagtcatcacccaatttaattagccatttgcatgatgctttcacacacaattgattcaagcattatacaggaacacccctgtgcagctacgtttacgtcgtcatttattccacagagtcaagaccaatattctgccaaaaaatcaccaatggaaattttcattgatataaatacttgtacatatgatttgtacttctgctgtgagattccctagtgtcaaaattaaatcaataaaaactgaact

SEQ ID NO: 317198 - DNA, 2551 bp, Homo sapiens
ccggctgtgtgagaggtcagcagaggggcggtctgcggggacaacaatggcggggttctgggtcgggacagcaccgctggtcgctgccggacggcgtgggcggtggccgccgcagcagctgatgctgagcgcggcgctgcggaccctgaagcatgttctgtactattcaagacagtgcttaatggtgtcccgtaatcttggttcagtgggatatgatcctaatgaaaaaacttttgataaaattcttgttgctaatagaggagaaattgcatgtcgggttattagaacttgcaagaagatgggcattaagacagttgccatccacagtgatgttgatgctagttctgttcatgtgaaaatggcggatgaggctgtctgtgttggcccagctcccaccagtaaaagctacctcaacatggatgccatcatggaagccattaagaaaaccagggcccaagctgtacatccaggttatggattcctttcagaaaacaaagaatttgccagatgtttggcagcagaagatgtcgttttcattggacctgacacacatgctattcaagccatgggcgacaagattgaaagcaaattattagctaagaaagcagaggttaatacaatccctggctttgatggagtagtcaaggatgcagaagaagctgtcagaattgcaagggaaattggctaccctgtcatgatcaaggcctcagcaggtggtggtgggaaaggcatgcgcattgcttgggatgatgaagagaccagggatggttttagattgtcatctcaagaagctgcttctagttttggcgatgatagactactaatagaaaaatttattgataatcctcgtcatatagaaatccaggttctaggtgataaacatgggaatgctttatggcttaatgaaagagagtgctcaattcagagaagaaatcagaaggtggtggaggaagcaccaagcatttttttggatgcggagactcgaagagcgatgggagaacaagctgtagctcttgccagagcagtaaaatattcctctgctgggaccgtggagttccttgtggactctaagaagaatttttatttcttggaaatgaatacaagactccaggttgagcatcctgtcacagaatgcattactggcctggacctagtccaggaaatgatccgtgttgctaagggctaccctctcaggcacaaacaagctgatattcgcatcaacggctgggcagttgaatgtcgggtttatgctgaggacccctacaagtcttttggtttaccatctattgggagattgtctcagtaccaagaaccgttacatctacctggtgtccgagtggacagtggcatccaaccaggaagtgatattagcatttattatgatcctatgatttcaaaactaatcacatatggctctgatagaactgaggcactgaagagaatggcagatgcactggataactatgttattcgaggtgttacacataatattgcattacttcgagaggtgataatcaactcacgctttgtaaaaggagacatcagcactaaatttctctccgatgtgtatcctgatggcttcaaaggacacatgctaaccaagagtgagaagaaccagttattggcaatagcatcatcattgtttgtggcattccagttaagagcacaacattttcaagaaaattcaagaatgcctgttattaaaccagacatagccaactgggagctctcagtaaaattgcatgataaagttcataccgtagtagcatcaaacaatgggtcagtgttctcggtggaagttgatgggtcgaaactaaatgtgaccagcacgtggaacctggcttcgcccttattgtctgtcagcgttgatggcactcagaggactgtccagtgtctttctcgagaagcaggtggaaacatgagcattcagtttcttggtacagtgtacaaggtgaatatcttaaccagacttgccgcagaattgaacaaatttatgctggaaaaagtgactgaggacacaagcagtgttctgcgttccccgatgcccggagtggtggtggccgtctctgtcaagcctggagacgcggtagcagaaggtcaagaaatttgtgtgattgaagccatgaaaatgcagaatagtatgacagctgggaaaactggcacggtgaaatctgtgcactgtcaagctggagacacagttggagaaggggatctgctcgtggagctggaatgaaggatttataacctttcagtcatcacccaatttaattagccatttgcatgatgctttcacacacaattgattcaagcattatacaggaacacccctgtgcagctacgtttacgtcgtcatttattccacagagtcaagaccaatattctgccaaaaaatcaccaatggaaattttcattgatataaatacttgtacatatgatttgtacttctgctgtgagattccctagtgtcaaaattaaatcaataaaaactgaactcgatgcggccggacccgcggacaagaccaattactatattgtgcgtaaaacgtgcata

SEQ ID NO: 317199 - DNA, 2557 bp, Homo sapiens
ccggctgtgtgagaggtcagcagaggggcggtctgcggggacaacaatggcggggttctgggtcgggacagcaccgctggtcgctgccggacggcgtgggcggtggccgccgcagcagctgatgctgagcgcggcgctgcggaccctgaagcatgttctgtactattcaagacagtgcttaatggtgtcccgtaatcttggttcagtgggatatgatcctaatgaaaaaacttttgataaaattcttgttgctaatagaggagaaattgcatgtcgggttattagaacttgcaagaagatgggcattaagacagttgccatccacagtgatgttgatgctagttctgttcatgtgaaaatggcggatgaggctgtctgtgttggcccagctcccaccagtaaaagctacctcaacatggatgccatcatggaagccattaagaaaaccagggcccaagctgtacatccaggttatggattcctttcagaaaacaaagaatttgccagatgtttggcagcagaagatgtcgttttcattggacctgacacacatgctattcaagccatgggcgacaagattgaaagcaaattattagctaagaaagcagaggttaatacaatccctggctttgatggagtagtcaaggatgcagaagaagctgtcagaattgcaagggaaattggctaccctgtcatgatcaaggcctcagcaggtggtggtgggaaaggcatgcgcattgcttgggatgatgaagagaccagggatggttttagattgtcatctcaagaagctgcttctagttttggcgatgatagactactaatagaaaaatttattgataatcctcgtcatatagaaatccaggttctaggtgataaacatgggaatgctttatggcttaatgaaagagagtgctcaattcagagaagaaatcagaaggtggtggaggaagcaccaagcatttttttggatgcggagactcgaagagcgatgggagaacaagctgtagctcttgccagagcagtaaaatattcctctgctgggaccgtggagttccttgtggactctaagaagaatttttatttcttggaaatgaatacaagactccaggttgagcatcctgtcacagaatgcattactggcctggacctagtccaggaaatgatccgtgttgctaagggctaccctctcaggcacaaacaagctgatattcgcatcaacggctgggcagttgaatgtcgggtttatgctgaggacccctacaagtcttttggtttaccatctattgggagattgtctcagtaccaagaaccgttacatctacctggtgtccgagtggacagtggcatccaaccaggaagtgatattagcatttattatgatcctatgatttcaaaactaatcacatatggctctgatagaactgaggcactgaagagaatggcagatgcactggataactatgttattcgaggtgttacacataatattgcattacttcgagaggtgataatcaactcacgctttgtaaaaggagacatcagcactaaatttctctccgatgtgtatcctgatggcttcaaaggacacatgctaaccaagagtgagaagaaccagttattggcaatagcatcatcattgtttgtggcattccagttaagagcacaacattttcaagaaaattcaagaatgcctgttattaaaccagacatagccaactgggagctctcagtaaaattgcatgataaagttcataccgtagtagcatcaaacaatgggtcagtgttctcggtggaagttgatgggtcgaaactaaatgtgaccagcacgtggaacctggcttcgcccttattgtctgtcagcgttgatggcactcagaggactgtccagtgtctttctcgagaagcaggtggaaacatgagcattcagtttcttggtacagtgtacaaggtgaatatcttaaccagacttgccgcagaattgaacaaatttatgctggaaaaagtgactgaggacacaagcagtgttctgcgttccccgatgcccggagtggtggtggccgtctctgtcaagcctggagacgcggtagcagaaggtcaagaaatttgtgtgattgaagccatgaaaatgcagaatagtatgacagctgggaaaactggcacggtgaaatctgtgcactgtcaagctggagacacagttggagaaggggatctgctcgtggagctggaatgaaggatttataacctttcagtcatcacccaatttaattagccatttgcatgatgctttcacacacaattgattcaagcattatacaggaacacccctgtgcagctacgtttacgtcgtcatttattccacagagtcaagaccaatattctgccaaaaaatcaccaatggaaattttcattgatataaatacttgtacatatgatttgtacttctgctgtgagattccctagtgtcaaaattaaatcaataaaaactgaactaaaagatagatgggccgaagccctgcctcccccggagtgggcttgctctattgtagctcgaaga

SEQ ID NO: 317200 - DNA, 2552 bp, Homo sapiens
ccggctgtgtgagaggtcagcagaggggcggtctgcggggacaacaatggcggggttctgggtcgggacagcaccgctggtcgctgccggacggcgtgggcggtggccgccgcagcagctgatgctgagcgcggcgctgcggaccctgaagcatgttctgtactattcaagacagtgcttaatggtgtcccgtaatcttggttcagtgggatatgatcctaatgaaaaaacttttgataaaattcttgttgctaatagaggagaaattgcatgtcgggttattagaacttgcaagaagatgggcattaagacagttgccatccacagtgatgttgatgctagttctgttcatgtgaaaatggcggatgaggctgtctgtgttggcccagctcccaccagtaaaagctacctcaacatggatgccatcatggaagccattaagaaaaccagggcccaagctgtacatccaggttatggattcctttcagaaaacaaagaatttgccagatgtttggcagcagaagatgtcgttttcattggacctgacacacatgctattcaagccatgggcgacaagattgaaagcaaattattagctaagaaagcagaggttaatacaatccctggctttgatggagtagtcaaggatgcagaagaagctgtcagaattgcaagggaaattggctaccctgtcatgatcaaggcctcagcaggtggtggtgggaaaggcatgcgcattgcttgggatgatgaagagaccagggatggttttagattgtcatctcaagaagctgcttctagttttggcgatgatagactactaatagaaaaatttattgataatcctcgtcatatagaaatccaggttctaggtgataaacatgggaatgctttatggcttaatgaaagagagtgctcaattcagagaagaaatcagaaggtggtggaggaagcaccaagcatttttttggatgcggagactcgaagagcgatgggagaacaagctgtagctcttgccagagcagtaaaatattcctctgctgggaccgtggagttccttgtggactctaagaagaatttttatttcttggaaatgaatacaagactccaggttgagcatcctgtcacagaatgcattactggcctggacctagtccaggaaatgatccgtgttgctaagggctaccctctcaggcacaaacaagctgatattcgcatcaacggctgggcagttgaatgtcgggtttatgctgaggacccctacaagtcttttggtttaccatctattgggagattgtctcagtaccaagaaccgttacatctacctggtgtccgagtggacagtggcatccaaccaggaagtgatattagcatttattatgatcctatgatttcaaaactaatcacatatggctctgatagaactgaggcactgaagagaatggcagatgcactggataactatgttattcgaggtgttacacataatattgcattacttcgagaggtgataatcaactcacgctttgtaaaaggagacatcagcactaaatttctctccgatgtgtatcctgatggcttcaaaggacacatgctaaccaagagtgagaagaaccagttattggcaatagcatcatcattgtttgtggcattccagttaagagcacaacattttcaagaaaattcaagaatgcctgttattaaaccagacatagccaactgggagctctcagtaaaattgcatgataaagttcataccgtagtagcatcaaacaatgggtcagtgttctcggtggaagttgatgggtcgaaactaaatgtgaccagcacgtggaacctggcttcgcccttattgtctgtcagcgttgatggcactcagaggactgtccagtgtctttctcgagaagcaggtggaaacatgagcattcagtttcttggtacagtgtacaaggtgaatatcttaaccagacttgccgcagaattgaacaaatttatgctggaaaaagtgactgaggacacaagcagtgttctgcgttccccgatgcccggagtggtggtggccgtctctgtcaagcctggagacgcggtagcagaaggtcaagaaatttgtgtgattgaagccatgaaaatgcagaatagtatgacagctgggaaaactggcacggtgaaatctgtgcactgtcaagctggagacacagttggagaaggggatctgctcgtggagctggaatgaaggatttataacctttcagtcatcacccaatttaattagccatttgcatgatgctttcacacacaattgattcaagcattatacaggaacacccctgtgcagctacgtttacgtcgtcatttattccacagagtcaagaccaatattctgccaaaaaatcaccaatggaaattttcattgatataaatacttgtacatatgatttgtacttctgctgtgagattccctagtgtcaaaattaaatcaataaaaactgaactgagcgatgcggccgagaactggcacgccggggtgggtggcatgtactgggagaccgcaa

SEQ ID NO: 317201 - DNA, 2549 bp, Homo sapiens
ccggctgtgtgagaggtcagcagaggggcggtctgcggggacaacaatggcggggttctgggtcgggacagcaccgctggtcgctgccggacggcgtgggcggtggccgccgcagcagctgatgctgagcgcggcgctgcggaccctgaagcatgttctgtactattcaagacagtgcttaatggtgtcccgtaatcttggttcagtgggatatgatcctaatgaaaaaacttttgataaaattcttgttgctaatagaggagaaattgcatgtcgggttattagaacttgcaagaagatgggcattaagacagttgccatccacagtgatgttgatgctagttctgttcatgtgaaaatggcggatgaggctgtctgtgttggcccagctcccaccagtaaaagctacctcaacatggatgccatcatggaagccattaagaaaaccagggcccaagctgtacatccaggttatggattcctttcagaaaacaaagaatttgccagatgtttggcagcagaagatgtcgttttcattggacctgacacacatgctattcaagccatgggcgacaagattgaaagcaaattattagctaagaaagcagaggttaatacaatccctggctttgatggagtagtcaaggatgcagaagaagctgtcagaattgcaagggaaattggctaccctgtcatgatcaaggcctcagcaggtggtggtgggaaaggcatgcgcattgcttgggatgatgaagagaccagggatggttttagattgtcatctcaagaagctgcttctagttttggcgatgatagactactaatagaaaaatttattgataatcctcgtcatatagaaatccaggttctaggtgataaacatgggaatgctttatggcttaatgaaagagagtgctcaattcagagaagaaatcagaaggtggtggaggaagcaccaagcatttttttggatgcggagactcgaagagcgatgggagaacaagctgtagctcttgccagagcagtaaaatattcctctgctgggaccgtggagttccttgtggactctaagaagaatttttatttcttggaaatgaatacaagactccaggttgagcatcctgtcacagaatgcattactggcctggacctagtccaggaaatgatccgtgttgctaagggctaccctctcaggcacaaacaagctgatattcgcatcaacggctgggcagttgaatgtcgggtttatgctgaggacccctacaagtcttttggtttaccatctattgggagattgtctcagtaccaagaaccgttacatctacctggtgtccgagtggacagtggcatccaaccaggaagtgatattagcatttattatgatcctatgatttcaaaactaatcacatatggctctgatagaactgaggcactgaagagaatggcagatgcactggataactatgttattcgaggtgttacacataatattgcattacttcgagaggtgataatcaactcacgctttgtaaaaggagacatcagcactaaatttctctccgatgtgtatcctgatggcttcaaaggacacatgctaaccaagagtgagaagaaccagttattggcaatagcatcatcattgtttgtggcattccagttaagagcacaacattttcaagaaaattcaagaatgcctgttattaaaccagacatagccaactgggagctctcagtaaaattgcatgataaagttcataccgtagtagcatcaaacaatgggtcagtgttctcggtggaagttgatgggtcgaaactaaatgtgaccagcacgtggaacctggcttcgcccttattgtctgtcagcgttgatggcactcagaggactgtccagtgtctttctcgagaagcaggtggaaacatgagcattcagtttcttggtacagtgtacaaggtgaatatcttaaccagacttgccgcagaattgaacaaatttatgctggaaaaagtgactgaggacacaagcagtgttctgcgttccccgatgcccggagtggtggtggccgtctctgtcaagcctggagacgcggtagcagaaggtcaagaaatttgtgtgattgaagccatgaaaatgcagaatagtatgacagctgggaaaactggcacggtgaaatctgtgcactgtcaagctggagacacagttggagaaggggatctgctcgtggagctggaatgaaggatttataacctttcagtcatcacccaatttaattagccatttgcatgatgctttcacacacaattgattcaagcattatacaggaacacccctgtgcagctacgtttacgtcgtcatttattccacagagtcaagaccaatattctgccaaaaaatcaccaatggaaattttcattgatataaatacttgtacatatgatttgtacttctgctgtgagattccctagtgtcaaaattaaatcaataaaaactgaacttgcgagcagaccttcactaatctagatcgcaattcgaaatcgcgaaacatttagaa

SEQ ID NO: 317202 - DNA, 2567 bp, Homo sapiens
ccggctgtgtgagaggtcagcagaggggcggtctgcggggacaacaatggcggggttctgggtcgggacagcaccgctggtcgctgccggacggcgtgggcggtggccgccgcagcagctgatgctgagcgcggcgctgcggaccctgaagcatgttctgtactattcaagacagtgcttaatggtgtcccgtaatcttggttcagtgggatatgatcctaatgaaaaaacttttgataaaattcttgttgctaatagaggagaaattgcatgtcgggttattagaacttgcaagaagatgggcattaagacagttgccatccacagtgatgttgatgctagttctgttcatgtgaaaatggcggatgaggctgtctgtgttggcccagctcccaccagtaaaagctacctcaacatggatgccatcatggaagccattaagaaaaccagggcccaagctgtacatccaggttatggattcctttcagaaaacaaagaatttgccagatgtttggcagcagaagatgtcgttttcattggacctgacacacatgctattcaagccatgggcgacaagattgaaagcaaattattagctaagaaagcagaggttaatacaatccctggctttgatggagtagtcaaggatgcagaagaagctgtcagaattgcaagggaaattggctaccctgtcatgatcaaggcctcagcaggtggtggtgggaaaggcatgcgcattgcttgggatgatgaagagaccagggatggttttagattgtcatctcaagaagctgcttctagttttggcgatgatagactactaatagaaaaatttattgataatcctcgtcatatagaaatccaggttctaggtgataaacatgggaatgctttatggcttaatgaaagagagtgctcaattcagagaagaaatcagaaggtggtggaggaagcaccaagcatttttttggatgcggagactcgaagagcgatgggagaacaagctgtagctcttgccagagcagtaaaatattcctctgctgggaccgtggagttccttgtggactctaagaagaatttttatttcttggaaatgaatacaagactccaggttgagcatcctgtcacagaatgcattactggcctggacctagtccaggaaatgatccgtgttgctaagggctaccctctcaggcacaaacaagctgatattcgcatcaacggctgggcagttgaatgtcgggtttatgctgaggacccctacaagtcttttggtttaccatctattgggagattgtctcagtaccaagaaccgttacatctacctggtgtccgagtggacagtggcatccaaccaggaagtgatattagcatttattatgatcctatgatttcaaaactaatcacatatggctctgatagaactgaggcactgaagagaatggcagatgcactggataactatgttattcgaggtgttacacataatattgcattacttcgagaggtgataatcaactcacgctttgtaaaaggagacatcagcactaaatttctctccgatgtgtatcctgatggcttcaaaggacacatgctaaccaagagtgagaagaaccagttattggcaatagcatcatcattgtttgtggcattccagttaagagcacaacattttcaagaaaattcaagaatgcctgttattaaaccagacatagccaactgggagctctcagtaaaattgcatgataaagttcataccgtagtagcatcaaacaatgggtcagtgttctcggtggaagttgatgggtcgaaactaaatgtgaccagcacgtggaacctggcttcgcccttattgtctgtcagcgttgatggcactcagaggactgtccagtgtctttctcgagaagcaggtggaaacatgagcattcagtttcttggtacagtgtacaaggtgaatatcttaaccagacttgccgcagaattgaacaaatttatgctggaaaaagtgactgaggacacaagcagtgttctgcgttccccgatgcccggagtggtggtggccgtctctgtcaagcctggagacgcggtagcagaaggtcaagaaatttgtgtgattgaagccatgaaaatgcagaatagtatgacagctgggaaaactggcacggtgaaatctgtgcactgtcaagctggagacacagttggagaaggggatctgctcgtggagctggaatgaaggatttataacctttcagtcatcacccaatttaattagccatttgcatgatgctttcacacacaattgattcaagcattatacaggaacacccctgtgcagctacgtttacgtcgtcatttattccacagagtcaagaccaatattctgccaaaaaatcaccaatggaaattttcattgatataaatacttgtacatatgatttgtacttctgctgtgagattccctagtgtcaaaattaaatcaataaaaactgaactgccctgcaggcgggccagaagagactaatattattaaaaataaatccgatatgaccgtgcgtagacagatagcg

SEQ ID NO: 317203 - DNA, 2545 bp, Homo sapiens
ccggctgtgtgagaggtcagcagaggggcggtctgcggggacaacaatggcggggttctgggtcgggacagcaccgctggtcgctgccggacggcgtgggcggtggccgccgcagcagctgatgctgagcgcggcgctgcggaccctgaagcatgttctgtactattcaagacagtgcttaatggtgtcccgtaatcttggttcagtgggatatgatcctaatgaaaaaacttttgataaaattcttgttgctaatagaggagaaattgcatgtcgggttattagaacttgcaagaagatgggcattaagacagttgccatccacagtgatgttgatgctagttctgttcatgtgaaaatggcggatgaggctgtctgtgttggcccagctcccaccagtaaaagctacctcaacatggatgccatcatggaagccattaagaaaaccagggcccaagctgtacatccaggttatggattcctttcagaaaacaaagaatttgccagatgtttggcagcagaagatgtcgttttcattggacctgacacacatgctattcaagccatgggcgacaagattgaaagcaaattattagctaagaaagcagaggttaatacaatccctggctttgatggagtagtcaaggatgcagaagaagctgtcagaattgcaagggaaattggctaccctgtcatgatcaaggcctcagcaggtggtggtgggaaaggcatgcgcattgcttgggatgatgaagagaccagggatggttttagattgtcatctcaagaagctgcttctagttttggcgatgatagactactaatagaaaaatttattgataatcctcgtcatatagaaatccaggttctaggtgataaacatgggaatgctttatggcttaatgaaagagagtgctcaattcagagaagaaatcagaaggtggtggaggaagcaccaagcatttttttggatgcggagactcgaagagcgatgggagaacaagctgtagctcttgccagagcagtaaaatattcctctgctgggaccgtggagttccttgtggactctaagaagaatttttatttcttggaaatgaatacaagactccaggttgagcatcctgtcacagaatgcattactggcctggacctagtccaggaaatgatccgtgttgctaagggctaccctctcaggcacaaacaagctgatattcgcatcaacggctgggcagttgaatgtcgggtttatgctgaggacccctacaagtcttttggtttaccatctattgggagattgtctcagtaccaagaaccgttacatctacctggtgtccgagtggacagtggcatccaaccaggaagtgatattagcatttattatgatcctatgatttcaaaactaatcacatatggctctgatagaactgaggcactgaagagaatggcagatgcactggataactatgttattcgaggtgttacacataatattgcattacttcgagaggtgataatcaactcacgctttgtaaaaggagacatcagcactaaatttctctccgatgtgtatcctgatggcttcaaaggacacatgctaaccaagagtgagaagaaccagttattggcaatagcatcatcattgtttgtggcattccagttaagagcacaacattttcaagaaaattcaagaatgcctgttattaaaccagacatagccaactgggagctctcagtaaaattgcatgataaagttcataccgtagtagcatcaaacaatgggtcagtgttctcggtggaagttgatgggtcgaaactaaatgtgaccagcacgtggaacctggcttcgcccttattgtctgtcagcgttgatggcactcagaggactgtccagtgtctttctcgagaagcaggtggaaacatgagcattcagtttcttggtacagtgtacaaggtgaatatcttaaccagacttgccgcagaattgaacaaatttatgctggaaaaagtgactgaggacacaagcagtgttctgcgttccccgatgcccggagtggtggtggccgtctctgtcaagcctggagacgcggtagcagaaggtcaagaaatttgtgtgattgaagccatgaaaatgcagaatagtatgacagctgggaaaactggcacggtgaaatctgtgcactgtcaagctggagacacagttggagaaggggatctgctcgtggagctggaatgaaggatttataacctttcagtcatcacccaatttaattagccatttgcatgatgctttcacacacaattgattcaagcattatacaggaacacccctgtgcagctacgtttacgtcgtcatttattccacagagtcaagaccaatattctgccaaaaaatcaccaatggaaattttcattgatataaatacttgtacatatgatttgtacttctgctgtgagattccctagtgtcaaaattaaatcaataaaaactgaacttgcggccgaaatatctcaatataaaaacagcttatcgaaatccggacgacgg

SEQ ID NO: 317204 - DNA, 2544 bp, Homo sapiens
  misc_feature (2502)..(2502): n is a, c, g, or t
ccggctgtgtgagaggtcagcagaggggcggtctgcggggacaacaatggcggggttctgggtcgggacagcaccgctggtcgctgccggacggcgtgggcggtggccgccgcagcagctgatgctgagcgcggcgctgcggaccctgaagcatgttctgtactattcaagacagtgcttaatggtgtcccgtaatcttggttcagtgggatatgatcctaatgaaaaaacttttgataaaattcttgttgctaatagaggagaaattgcatgtcgggttattagaacttgcaagaagatgggcattaagacagttgccatccacagtgatgttgatgctagttctgttcatgtgaaaatggcggatgaggctgtctgtgttggcccagctcccaccagtaaaagctacctcaacatggatgccatcatggaagccattaagaaaaccagggcccaagctgtacatccaggttatggattcctttcagaaaacaaagaatttgccagatgtttggcagcagaagatgtcgttttcattggacctgacacacatgctattcaagccatgggcgacaagattgaaagcaaattattagctaagaaagcagaggttaatacaatccctggctttgatggagtagtcaaggatgcagaagaagctgtcagaattgcaagggaaattggctaccctgtcatgatcaaggcctcagcaggtggtggtgggaaaggcatgcgcattgcttgggatgatgaagagaccagggatggttttagattgtcatctcaagaagctgcttctagttttggcgatgatagactactaatagaaaaatttattgataatcctcgtcatatagaaatccaggttctaggtgataaacatgggaatgctttatggcttaatgaaagagagtgctcaattcagagaagaaatcagaaggtggtggaggaagcaccaagcatttttttggatgcggagactcgaagagcgatgggagaacaagctgtagctcttgccagagcagtaaaatattcctctgctgggaccgtggagttccttgtggactctaagaagaatttttatttcttggaaatgaatacaagactccaggttgagcatcctgtcacagaatgcattactggcctggacctagtccaggaaatgatccgtgttgctaagggctaccctctcaggcacaaacaagctgatattcgcatcaacggctgggcagttgaatgtcgggtttatgctgaggacccctacaagtcttttggtttaccatctattgggagattgtctcagtaccaagaaccgttacatctacctggtgtccgagtggacagtggcatccaaccaggaagtgatattagcatttattatgatcctatgatttcaaaactaatcacatatggctctgatagaactgaggcactgaagagaatggcagatgcactggataactatgttattcgaggtgttacacataatattgcattacttcgagaggtgataatcaactcacgctttgtaaaaggagacatcagcactaaatttctctccgatgtgtatcctgatggcttcaaaggacacatgctaaccaagagtgagaagaaccagttattggcaatagcatcatcattgtttgtggcattccagttaagagcacaacattttcaagaaaattcaagaatgcctgttattaaaccagacatagccaactgggagctctcagtaaaattgcatgataaagttcataccgtagtagcatcaaacaatgggtcagtgttctcggtggaagttgatgggtcgaaactaaatgtgaccagcacgtggaacctggcttcgcccttattgtctgtcagcgttgatggcactcagaggactgtccagtgtctttctcgagaagcaggtggaaacatgagcattcagtttcttggtacagtgtacaaggtgaatatcttaaccagacttgccgcagaattgaacaaatttatgctggaaaaagtgactgaggacacaagcagtgttctgcgttccccgatgcccggagtggtggtggccgtctctgtcaagcctggagacgcggtagcagaaggtcaagaaatttgtgtgattgaagccatgaaaatgcagaatagtatgacagctgggaaaactggcacggtgaaatctgtgcactgtcaagctggagacacagttggagaaggggatctgctcgtggagctggaatgaaggatttataacctttcagtcatcacccaatttaattagccatttgcatgatgctttcacacacaattgattcaagcattatacaggaacacccctgtgcagctacgtttacgtcgtcatttattccacagagtcaagaccaatattctgccaaaaaatcaccaatggaaattttcattgatataaatacttgtacatatgatttgtacttctgctgtgagattccctagtgtcaaaattaaatcaataaaaactgaactgtgatgcgncagtccccctgcgtcttttaagtgtgttgaacttaggcaagc

SEQ ID NO: 317205 - DNA, 2552 bp, Homo sapiens
ccggctgtgtgagaggtcagcagaggggcggtctgcggggacaacaatggcggggttctgggtcgggacagcaccgctggtcgctgccggacggcgtgggcggtggccgccgcagcagctgatgctgagcgcggcgctgcggaccctgaagcatgttctgtactattcaagacagtgcttaatggtgtcccgtaatcttggttcagtgggatatgatcctaatgaaaaaacttttgataaaattcttgttgctaatagaggagaaattgcatgtcgggttattagaacttgcaagaagatgggcattaagacagttgccatccacagtgatgttgatgctagttctgttcatgtgaaaatggcggatgaggctgtctgtgttggcccagctcccaccagtaaaagctacctcaacatggatgccatcatggaagccattaagaaaaccagggcccaagctgtacatccaggttatggattcctttcagaaaacaaagaatttgccagatgtttggcagcagaagatgtcgttttcattggacctgacacacatgctattcaagccatgggcgacaagattgaaagcaaattattagctaagaaagcagaggttaatacaatccctggctttgatggagtagtcaaggatgcagaagaagctgtcagaattgcaagggaaattggctaccctgtcatgatcaaggcctcagcaggtggtggtgggaaaggcatgcgcattgcttgggatgatgaagagaccagggatggttttagattgtcatctcaagaagctgcttctagttttggcgatgatagactactaatagaaaaatttattgataatcctcgtcatatagaaatccaggttctaggtgataaacatgggaatgctttatggcttaatgaaagagagtgctcaattcagagaagaaatcagaaggtggtggaggaagcaccaagcatttttttggatgcggagactcgaagagcgatgggagaacaagctgtagctcttgccagagcagtaaaatattcctctgctgggaccgtggagttccttgtggactctaagaagaatttttatttcttggaaatgaatacaagactccaggttgagcatcctgtcacagaatgcattactggcctggacctagtccaggaaatgatccgtgttgctaagggctaccctctcaggcacaaacaagctgatattcgcatcaacggctgggcagttgaatgtcgggtttatgctgaggacccctacaagtcttttggtttaccatctattgggagattgtctcagtaccaagaaccgttacatctacctggtgtccgagtggacagtggcatccaaccaggaagtgatattagcatttattatgatcctatgatttcaaaactaatcacatatggctctgatagaactgaggcactgaagagaatggcagatgcactggataactatgttattcgaggtgttacacataatattgcattacttcgagaggtgataatcaactcacgctttgtaaaaggagacatcagcactaaatttctctccgatgtgtatcctgatggcttcaaaggacacatgctaaccaagagtgagaagaaccagttattggcaatagcatcatcattgtttgtggcattccagttaagagcacaacattttcaagaaaattcaagaatgcctgttattaaaccagacatagccaactgggagctctcagtaaaattgcatgataaagttcataccgtagtagcatcaaacaatgggtcagtgttctcggtggaagttgatgggtcgaaactaaatgtgaccagcacgtggaacctggcttcgcccttattgtctgtcagcgttgatggcactcagaggactgtccagtgtctttctcgagaagcaggtggaaacatgagcattcagtttcttggtacagtgtacaaggtgaatatcttaaccagacttgccgcagaattgaacaaatttatgctggaaaaagtgactgaggacacaagcagtgttctgcgttccccgatgcccggagtggtggtggccgtctctgtcaagcctggagacgcggtagcagaaggtcaagaaatttgtgtgattgaagccatgaaaatgcagaatagtatgacagctgggaaaactggcacggtgaaatctgtgcactgtcaagctggagacacagttggagaaggggatctgctcgtggagctggaatgaaggatttataacctttcagtcatcacccaatttaattagccatttgcatgatgctttcacacacaattgattcaagcattatacaggaacacccctgtgcagctacgtttacgtcgtcatttattccacagagtcaagaccaatattctgccaaaaaatcaccaatggaaattttcattgatataaatacttgtacatatgatttgtacttctgctgtgagattccctagtgtcaaaattaaatcaataaaaactgaacttatgatggcggccggaacaaaataattaaaatattaattgttcaagtcggaatgatggg

SEQ ID NO: 317206 - DNA, 2557 bp, Homo sapiens
ccggctgtgtgagaggtcagcagaggggcggtctgcggggacaacaatggcggggttctgggtcgggacagcaccgctggtcgctgccggacggcgtgggcggtggccgccgcagcagctgatgctgagcgcggcgctgcggaccctgaagcatgttctgtactattcaagacagtgcttaatggtgtcccgtaatcttggttcagtgggatatgatcctaatgaaaaaacttttgataaaattcttgttgctaatagaggagaaattgcatgtcgggttattagaacttgcaagaagatgggcattaagacagttgccatccacagtgatgttgatgctagttctgttcatgtgaaaatggcggatgaggctgtctgtgttggcccagctcccaccagtaaaagctacctcaacatggatgccatcatggaagccattaagaaaaccagggcccaagctgtacatccaggttatggattcctttcagaaaacaaagaatttgccagatgtttggcagcagaagatgtcgttttcattggacctgacacacatgctattcaagccatgggcgacaagattgaaagcaaattattagctaagaaagcagaggttaatacaatccctggctttgatggagtagtcaaggatgcagaagaagctgtcagaattgcaagggaaattggctaccctgtcatgatcaaggcctcagcaggtggtggtgggaaaggcatgcgcattgcttgggatgatgaagagaccagggatggttttagattgtcatctcaagaagctgcttctagttttggcgatgatagactactaatagaaaaatttattgataatcctcgtcatatagaaatccaggttctaggtgataaacatgggaatgctttatggcttaatgaaagagagtgctcaattcagagaagaaatcagaaggtggtggaggaagcaccaagcatttttttggatgcggagactcgaagagcgatgggagaacaagctgtagctcttgccagagcagtaaaatattcctctgctgggaccgtggagttccttgtggactctaagaagaatttttatttcttggaaatgaatacaagactccaggttgagcatcctgtcacagaatgcattactggcctggacctagtccaggaaatgatccgtgttgctaagggctaccctctcaggcacaaacaagctgatattcgcatcaacggctgggcagttgaatgtcgggtttatgctgaggacccctacaagtcttttggtttaccatctattgggagattgtctcagtaccaagaaccgttacatctacctggtgtccgagtggacagtggcatccaaccaggaagtgatattagcatttattatgatcctatgatttcaaaactaatcacatatggctctgatagaactgaggcactgaagagaatggcagatgcactggataactatgttattcgaggtgttacacataatattgcattacttcgagaggtgataatcaactcacgctttgtaaaaggagacatcagcactaaatttctctccgatgtgtatcctgatggcttcaaaggacacatgctaaccaagagtgagaagaaccagttattggcaatagcatcatcattgtttgtggcattccagttaagagcacaacattttcaagaaaattcaagaatgcctgttattaaaccagacatagccaactgggagctctcagtaaaattgcatgataaagttcataccgtagtagcatcaaacaatgggtcagtgttctcggtggaagttgatgggtcgaaactaaatgtgaccagcacgtggaacctggcttcgcccttattgtctgtcagcgttgatggcactcagaggactgtccagtgtctttctcgagaagcaggtggaaacatgagcattcagtttcttggtacagtgtacaaggtgaatatcttaaccagacttgccgcagaattgaacaaatttatgctggaaaaagtgactgaggacacaagcagtgttctgcgttccccgatgcccggagtggtggtggccgtctctgtcaagcctggagacgcggtagcagaaggtcaagaaatttgtgtgattgaagccatgaaaatgcagaatagtatgacagctgggaaaactggcacggtgaaatctgtgcactgtcaagctggagacacagttggagaaggggatctgctcgtggagctggaatgaaggatttataacctttcagtcatcacccaatttaattagccatttgcatgatgctttcacacacaattgattcaagcattatacaggaacacccctgtgcagctacgtttacgtcgtcatttattccacagagtcaagaccaatattctgccaaaaaatcaccaatggaaattttcattgatataaatacttgtacatatgatttgtacttctgctgtgagattccctagtgtcaaaattaaatcaataaaaactgaacttgctgatgcggccggaacacccacccacatctctacacatcttagacctgatccgccttatata

SEQ ID NO: 317207 - DNA, 467 bp, Homo sapiens
tatttcgaccctctcacttcctttcttattcgtatatacccatttatctagtcagctcaggtagcagaaggtcaagaaatttgtgtgattgaagccatgaaaatgcagaatagtatgacagctgggaaaactggcacggtgaaatctgtgcactgtcaagctggagacacagttggagaaggggatctgctcgtggagctggaatgaaggatttataacctttcagtcatcacccaatttaattagccatttgcatgatgctttcacacacaattgattcaagcattatacaggaacacccctgtgcagctacgtttacgtcgtcatttattccacagagtcaagaccaatattctgccaaaaaatcaccaatggaaattttcattgatataaatacttgtacatatgatttgtacttctgctgtgagattccctagtgtcaaaattaaatcaataaaaactgaact

SEQ ID NO: 317208 - DNA, 2375 bp, Homo sapiens
ccggctgtgtgagaggtcagcagaggggcggtctgcggggacaacaatggcggggttctgggtcgggacagcaccgctggtcgctgccggacggcgtgggcggtggccgccgcagcagctgatgctgagcgcggcgctgcggaccctgaagcatgttctgtactattcaagacagtgcttaatggtgtcccgtaatcttggttcagtgggatatgatcctaatgaaaaaacttttgataaaattcttgttgctaatagaggagaaattgcatgtcgggttattagaacttgcaagaagatgggcattaagacagttgccatccacagtgatgttgatgctagttctgttcatgtgaaaatggcggatgaggctgtctgtgttggcccagctcccaccagtaaaagctacctcaacatggatgccatcatggaagccattaagaaaaccagggcccaagctgtacatccaggttatggattcctttcagaaaacaaagaatttgccagatgtttggcagcagaagatgtcgttttcattggacctgacacacatgctattcaagccatgggcgacaagattgaaagcaaattattagctaagaaagcagaggttaatacaatccctggctttgatggagtagtcaaggatgcagaagaagctgtcagaattgcaagggaaattggctaccctgtcatgatcaaggcctcagcaggtggtggtgggaaaggcatgcgcattgcttgggatgatgaagagaccagggatggttttagattgtcatctcaagaagctgcttctagttttggcgatgatagactactaatagaaaaatttattgataatcctcgtcatatagaaatccaggttctaggtgataaacatgggaatgctttatggcttaatgaaagagagtgctcaattcagagaagaaatcagaaggtggtggaggaagcaccaagcatttttttggatgcggagactcgaagagcgatgggagaacaagctgtagctcttgccagagcagtaaaatattcctctgctgggaccgtggagttccttgtggactctaagaagaatttttatttcttggaaatgaatacaagactccaggttgagcatcctgtcacagaatgcattactggcctggacctagtccaggaaatgatccgtgttgctaagggctaccctctcaggcacaaacaagctgatattcgcatcaacggctgggcagttgaatgtcgggtttatgctgaggacccctacaagtcttttggtttaccatctattgggagattgtctcagtaccaagaaccgttacatctacctggtgtccgagtggacagtggcatccaaccaggaagtgatattagcatttattatgatcctatgatttcaaaactaatcacatatggctctgatagaactgaggcactgaagagaatggcagatgcactggataactatgttattcgaggtgttacacataatattgcattacttcgagaggtgataatcaactcacgctttgtaaaaggagacatcagcactaaatttctctccgatgtgtatcctgatggcttcaaaggacacatgctaaccaagagtgagaagaaccagttattggcaatagcatcatcattgtttgtggcattccagttaagagcacaacattttcaagaaaattcaagaatgcctgttattaaaccagacatagccaactgggagctctcagtaaaattgcatgataaagttcataccgtagtagcatcaaacaatgggtcagtgttctcggtggaagttgatgggtcgaaactaaatgtgaccagcacgtggaacctggcttcgcccttattgtctgtcagcgttgatggcactcagaggactgtccagtgtctttctcgagaagcaggtggaaacatgagcattcagtttcttggtacagtgtacaaggtgaatatcttaaccagacttgccgcagaattgaacaaatttatgctggaaaaagtgactgaggacacaagcagtgttctgcgttccccgatgcccggagtggtggtggccgtctctcacaaaactgcacactccctcaccccaccgtcccacaacaacctgcctaccgaaccaccccaacctccacgccccaccacacaatctctcctccccacaacacccttttttatacaccgaaactacaatacatcaatcatatttcactcacctcctcctacaccacacaacacaccacccacaccaccccccacgcccttacactccacacccacccaacaccccaaaattacatccccaccggcccaccaccccccccacccccgcacacaccacactccttataatcacccaacgacctcacaca

SEQ ID NO: 317209 - DNA, 2501 bp, Homo sapiens
ccggctgtgtgagaggtcagcagaggggcggtctgcggggacaacaatggcggggttctgggtcgggacagcaccgctggtcgctgccggacggcgtgggcggtggccgccgcagcagctgatgctgagcgcggcgctgcggaccctgaagcatgttctgtactattcaagacagtgcttaatggtgtcccgtaatcttggttcagtgggatatgatcctaatgaaaaaacttttgataaaattcttgttgctaatagaggagaaattgcatgtcgggttattagaacttgcaagaagatgggcattaagacagttgccatccacagtgatgttgatgctagttctgttcatgtgaaaatggcggatgaggctgtctgtgttggcccagctcccaccagtaaaagctacctcaacatggatgccatcatggaagccattaagaaaaccagggcccaagctgtacatccaggttatggattcctttcagaaaacaaagaatttgccagatgtttggcagcagaagatgtcgttttcattggacctgacacacatgctattcaagccatgggcgacaagattgaaagcaaattattagctaagaaagcagaggttaatacaatccctggctttgatggagtagtcaaggatgcagaagaagctgtcagaattgcaagggaaattggctaccctgtcatgatcaaggcctcagcaggtggtggtgggaaaggcatgcgcattgcttgggatgatgaagagaccagggatggttttagattgtcatctcaagaagctgcttctagttttggcgatgatagactactaatagaaaaatttattgataatcctcgtcatatagaaatccaggttctaggtgataaacatgggaatgctttatggcttaatgaaagagagtgctcaattcagagaagaaatcagaaggtggtggaggaagcaccaagcatttttttggatgcggagactcgaagagcgatgggagaacaagctgtagctcttgccagagcagtaaaatattcctctgctgggaccgtggagttccttgtggactctaagaagaatttttatttcttggaaatgaatacaagactccaggttgagcatcctgtcacagaatgcattactggcctggacctagtccaggaaatgatccgtgttgctaagggctaccctctcaggcacaaacaagctgatattcgcatcaacggctgggcagttgaatgtcgggtttatgctgaggacccctacaagtcttttggtttaccatctattgggagattgtctcagtaccaagaaccgttacatctacctggtgtccgagtggacagtggcatccaaccaggaagtgatattagcatttattatgatcctatgatttcaaaactaatcacatatggctctgatagaactgaggcactgaagagaatggcagatgcactggataactatgttattcgaggtgttacacataatattgcattacttcgagaggtgataatcaactcacgctttgtaaaaggagacatcagcactaaatttctctccgatgtgtatcctgatggcttcaaaggacacatgctaaccaagagtgagaagaaccagttattggcaatagcatcatcattgtttgtggcattccagttaagagcacaacattttcaagaaaattcaagaatgcctgttattaaaccagacatagccaactgggagctctcagtaaaattgcatgataaagttcataccgtagtagcatcaaacaatgggtcagtgttctcggtggaagttgatgggtcgaaactaaatgtgaccagcacgtggaacctggcttcgcccttattgtctgtcagcgttgatggcactcagaggactgtccagtgtctttctcgagaagcaggtggaaacatgagcattcagtttcttggtacagtgccctggagaaagcttctggattgactgtgagaagcttggcagaaggtgctgcggcctggtggctggctcagcaggaggcctgggattgaaagctctcggtttgtacaagctcttttggatttgtaacacttttattttaaatctccaataaatgtaaatattttggtccctttttttctctattttttaaaataaaaatattttagtgaatatgagttaaatgagaatcaagtggcttctgggcctccctgaaagatcaagtggaagcactggatgactctaatgatgccgaattgtaatccataaagcacctgggcagagttcaatcagaggtcccatttcagaagttttttggaatgtagggaaagaattacttagaaaaggttcatctacttggagaggagatggttcaatatgacttttagaagaagccgcagtccctgccccacaggggctgcttagattgcttagatggattgtcatctctctctctttttttttttgggacggagtctcgctttgtcgtccaggctggagtgcagtggcatgatctcgg

SEQ ID NO: 317210 - DNA, 2113 bp, Homo sapiens
ccggctgtgtgagaggtcagcagaggggcggtctgcggggacaacaatggcggggttctgggtcgggacagcaccgctggtcgctgccggacggcgtgggcggtggccgccgcagcagctgatgctgagcgcggcgctgcggaccctgaagcatgttctgtactattcaagacagtgcttaatggtgtcccgtaatcttggttcagtgggatatgatcctaatgaaaaaacttttgataaaattcttgttgctaatagaggagaaattgcatgtcgggttattagaacttgcaagaagatgggcattaagacagttgccatccacagtgatgttgatgctagttctgttcatgtgaaaatggcggatgaggctgtctgtgttggcccagctcccaccagtaaaagctacctcaacatggatgccatcatggaagccattaagaaaaccagggcccaagctgtacatccaggttatggattcctttcagaaaacaaagaatttgccagatgtttggcagcagaagatgtcgttttcattggacctgacacacatgctattcaagccatgggcgacaagattgaaagcaaattattagctaagaaagcagaggttaatacaatccctggctttgatggagtagtcaaggatgcagaagaagctgtcagaattgcaagggaaattggctaccctgtcatgatcaaggcctcagcaggtggtggtgggaaaggcatgcgcattgcttgggatgatgaagagaccagggatggttttagattgtcatctcaagaagctgcttctagttttggcgatgatagactactaatagaaaaatttattgataatcctcgtcatatagaaatccaggttctaggtgataaacatgggaatgctttatggcttaatgaaagagagtgctcaattcagagaagaaatcagaaggtggtggaggaagcaccaagcatttttttggatgcggagactcgaagagcgatgggagaacaagctgtagctcttgccagagcagtaaaatattcctctgctgggaccgtggagttccttgtggactctaagaagaatttttatttcttggaaatgaatacaagactccaggttgagcatcctgtcacagaatgcattactggcctggacctagtccaggaaatgatccgtgttgctaagggctaccctctcaggcacaaacaagctgatattcgcatcaacggctgggcagttgaatgtcgggtttatgctgaggacccctacaagtcttttggtttaccatctattgggagattgtctcagtaccaagaaccgttacatctacctggtgtccgagtggacagtggcatccaaccaggaagtgatattagcatttattatgatcctatgatttcaaaactaatcacatatggctctgatagaactgaggcactgaagagaatggcagatgcactggataactatgttattcgaggtgttacacataatattgcattacttcgagaggtgataatcaactcacgctttgtaaaaggagacatcagcactaaatttctctccgatgtgtatcctgatggcttcaaaggacacatgctaaccaagagtgagaagaaccagttattggcaatagcatcatcattgtttgtggcattccagttaagagcacaacattttcaagaaaattcaagaatgcctgttattaaaccagacatagccaactgggagctctcagtaaaattgcatgataaagttcataccgtagtagcatcaaacaatgggtcagtgttctcggtggaagttgatgggtcgaaactaaatgtgaccagcacgtggaacctggcttcgcccttattgtctgtcagcgttgatggcactcagaggactgtccagtgtctttctcgagaagcaggtggaaacatgagcattcagtttcttggtacagtgccctggagaaagcttctggattgactgtgagaagcttggcagaaggtgctgcggcctggtggctggctcagcaggaggcctgggattgaaagctctcggtttgtacaagctcttttggatttgtaacacttttattttaaatctccaataaatgtaaatattttggtc

SEQ ID NO: 317211 - DNA, 1972 bp, Homo sapiens
ccggctgtgtgagaggtcagcagaggggcggtctgcggggacaacaatggcggggttctgggtcgggacagcaccgctggtcgctgccggacggcgtgggcggtggccgccgcagcagctgatgctgagcgcggcgctgcggaccctgaagcatgttctgtactattcaagacagtgcttaatggtgtcccgtaatcttggttcagtgggatatgatcctaatgaaaaaacttttgataaaattcttgttgctaatagaggagaaattgcatgtcgggttattagaacttgcaagaagatgggcattaagacagttgccatccacagtgatgttgatgctagttctgttcatgtgaaaatggcggatgaggctgtctgtgttggcccagctcccaccagtaaaagctacctcaacatggatgccatcatggaagccattaagaaaaccagggcccaagctgtacatccaggttatggattcctttcagaaaacaaagaatttgccagatgtttggcagcagaagatgtcgttttcattggacctgacacacatgctattcaagccatgggcgacaagattgaaagcaaattattagctaagaaagcagaggttaatacaatccctggctttgatggagtagtcaaggatgcagaagaagctgtcagaattgcaagggaaattggctaccctgtcatgatcaaggcctcagcaggtggtggtgggaaaggcatgcgcattgcttgggatgatgaagagaccagggatggttttagattgtcatctcaagaagctgcttctagttttggcgatgatagactactaatagaaaaatttattgataatcctcgtcatatagaaatccaggttctaggtgataaacatgggaatgctttatggcttaatgaaagagagtgctcaattcagagaagaaatcagaaggtggtggaggaagcaccaagcatttttttggatgcggagactcgaagagcgatgggagaacaagctgtagctcttgccagagcagtaaaatattcctctgctgggaccgtggagttccttgtggactctaagaagaatttttatttcttggaaatgaatacaagactccaggttgagcatcctgtcacagaatgcattactggcctggacctagtccaggaaatgatccgtgttgctaagggctaccctctcaggcacaaacaagctgatattcgcatcaacggctgggcagttgaatgtcgggtttatgctgaggacccctacaagtcttttggtttaccatctattgggagattgtctcagtaccaagaaccgttacatctacctggtgtccgagtggacagtggcatccaaccaggaagtgatattagcatttattatgatcctatgatttcaaaactatcaatggataactatgttattcgaggtgttacacataatattgcattacttcgagaggtgataatcaactcacgctttgtaaaaggagacatcagcactaaatttctctccgatgtgtatcctgatggcttcaaaggacacatgctaaccaagagtgagaagaaccagttattggcaatagcatcatcattgtttgtggcattccagttaagagcacaacattttcaagaaaattcaagaatgcctgttattaaaccagacatagccaactgggagctctcagtaaaattgcatgataaagttcataccgtagtagcatcaaacaatgggtcagtgttctcggtggaagttgatgggtcgaaactaaatgtgaccagcacgtggaacctggcttcgcccttattgtctgtcagcgttgatggcactcagaggactgtccagtgtctttctcgagaagcaggtggaaacatgagcattcagtttcttggtacagtgtacaaggtgaatatcctaaccagacttgccgcagaaatgctttattctggagggtgccgtctcttgtcgcctggg

SEQ ID NO: 317212 - DNA, 1970 bp, Homo sapiens
  misc_feature (1850)..(1851): n is a, c, g, or t
  misc_feature (1855)..(1856): n is a, c, g, or t
  misc_feature (1859)..(1859): n is a, c, g, or t
  misc_feature (1876)..(1876): n is a, c, g, or t
  misc_feature (1878)..(1878): n is a, c, g, or t
  misc_feature (1883)..(1883): n is a, c, g, or t
  misc_feature (1887)..(1887): n is a, c, g, or t
  misc_feature (1894)..(1894): n is a, c, g, or t
  misc_feature (1896)..(1896): n is a, c, g, or t
  misc_feature (1905)..(1905): n is a, c, g, or t
  misc_feature (1919)..(1919): n is a, c, g, or t
  misc_feature (1925)..(1926): n is a, c, g, or t
  misc_feature (1937)..(1938): n is a, c, g, or t
  misc_feature (1941)..(1942): n is a, c, g, or t
ccggctgtgtgagaggtcagcagaggggcggtctgcggggacaacaatggcggggttctgggtcgggacagcaccgctggtcgctgccggacggcgtgggcggtggccgccgcagcagctgatgctgagcgcggcgctgcggaccctgaagcatgttctgtactattcaagacagtgcttaatggtgtcccgtaatcttggttcagtgggatatgatcctaatgaaaaaacttttgataaaattcttgttgctaatagaggagaaattgcatgtcgggttattagaacttgcaagaagatgggcattaagacagttgccatccacagtgatgttgatgctagttctgttcatgtgaaaatggcggatgaggctgtctgtgttggcccagctcccaccagtaaaagctacctcaacatggatgccatcatggaagccattaagaaaaccagggcccaagctgtacatccaggttatggattcctttcagaaaacaaagaatttgccagatgtttggcagcagaagatgtcgttttcattggacctgacacacatgctattcaagccatgggcgacaagattgaaagcaaattattagctaagaaagcagaggttaatacaatccctggctttgatggagtagtcaaggatgcagaagaagctgtcagaattgcaagggaaattggctaccctgtcatgatcaaggcctcagcaggtggtggtgggaaaggcatgcgcattgcttgggatgatgaagagaccagggatggttttagattgtcatctcaagaagctgcttctagttttggcgatgatagactactaatagaaaaatttattgataatcctcgtcatatagaaatccaggttctaggtgataaacatgggaatgctttatggcttaatgaaagagagtgctcaattcagagaagaaatcagaaggtggtggaggaagcaccaagcatttttttggatgcggagactcgaagagcgatgggagaacaagctgtagctcttgccagagcagtaaaatattcctctgctgggaccgtggagttccttgtggactctaagaagaatttttatttcttggaaatgaatacaagactccaggttgagcatcctgtcacagaatgcattactggcctggacctagtccaggaaatgatccgtgttgctaagggctaccctctcaggcacaaacaagctgatattcgcatcaacggctgggcagttgaatgtcgggtttatgctgaggacccctacaagtcttttggtttaccatctattgggagattgtctcagtaccaagaaccgttacatctacctggtgtccgagtggacagtggcatccaaccaggaagtgatattagcatttattatgatcctatgatttcaaaactatcaatggataactatgttattcgaggtgttacacataatattgcattacttcgagaggtgataatcaactcacgctttgtaaaaggagacatcagcactaaatttctctccgatgtgtatcctgatggcttcaaaggacacatgctaaccaagagtgagaagaaccagttattggcaatagcatcatcattgtttgtggcattccagttaagagcacaacattttcaagaaaattcaagaatgcctgttattaaaccagacatagccaactgggagctctcagtaaaattgcatgataaagttcataccgtagtagcatcaaacaatgggtcagtgttctcggtggaagttgatgggtcgaaactaaatgtgaccagcacgtggaacctggcttcgcccttattgtctgtcagcgttgatggcactcagaggactgtccagtgtcttnntcgnnagnaggtggtgagcattagntncttgnacantgtcaangngaatatttnaacagacttggcgnagattnnaccaattattnntgnngtgggccgctttttttctggagacccgg

SEQ ID NO: 317213 - DNA, 1709 bp, Homo sapiens
  misc_feature (1612)..(1612): n is a, c, g, or t
  misc_feature (1626)..(1626): n is a, c, g, or t
  misc_feature (1628)..(1628): n is a, c, g, or t
  misc_feature (1630)..(1630): n is a, c, g, or t
  misc_feature (1695)..(1695): n is a, c, g, or t
ccggctgtgtgagaggtcagcagaggggcggtctgcggggacaacaatggcggggttctgggtcgggacagcaccgctggtcgctgccggacggcgtgggcggtggccgccgcagcagctgatgctgagcgcggcgctgcggaccctgaagcatgttctgtactattcaagacagtgcttaatggtgtcccgtaatcttggttcagtgggatatgatcctaatgaaaaaacttttgataaaattcttgttgctaatagaggagaaattgcatgtcgggttattagaacttgcaagaagatgggcattaagacagttgccatccacagtgatgttgatgctagttctgttcatgtgaaaatggcggatgaggctgtctgtgttggcccagctcccaccagtaaaagctacctcaacatggatgccatcatggaagccattaagaaaaccagggcccaagctgtacatccaggttatggattcctttcagaaaacaaagaatttgccagatgtttggcagcagaagatgtcgttttcattggacctgacacacatgctattcaagccatgggcgacaagattgaaagcaaattattagctaagaaagcagaggttaatacaatccctggctttgatggagtagtcaaggatgcagaagaagctgtcagaattgcaagggaaattggctaccctgtcatgatcaaggcctcagcaggtggtggtgggaaaggcatgcgcattgcttgggatgatgaagagaccagggatggttttagattgtcatctcaagaagctgcttctagttttggcgatgatagactactaatagaaaaatttattgataatcctcgtcatatagaaatccaggttctaggtgataaacatgggaatgctttatggcttaatgaaagagagtgctcaattcagagaagaaatcagaaggtggtggaggaagcaccaagcatttttttggatgcggagactcgaagagcgatgggagaacaagctgtagctcttgccagagcagtaaaatattcctctgctgggaccgtggagttccttgtggactctaagaagaatttttatttcttggaaatgaatacaagactccaggttgagcatcctgtcacagaatgcattactggcctggacctagtccaggaaatgatccgtgttgctaagggctaccctctcaggcacaaacaagctgatattcgcatcaacggctgggcagttgaatgtcgggtttatgctgaggacccctacaagtcttttggtttaccatctattgggagattgtctcagtaccaagaaccgttacatctacctggtgtccgagtggacagtggcatccaaccaggaagtgatattagcatttattatgatcctatgatttcaaaactaatcacatatggctctgatagaactgaggcactgaagagaatggcagatgcactggataactatgttattcgaggtgttacacataatattgcattacttcgagaggtgataatcaactcacgctttgtaaaaggagacatcagcactaaatttctctccgatgtgtatcctgatggcttcaaagcacatgctaaccaagagtaaagaccngttattggcatagntntnttgttgtggcttcagtaagagcacacatttcagaaatcagatgctgtataacagaatgcactggncctagtaaatgctg

SEQ ID NO: 317214 - DNA, 1777 bp, Homo sapiens
  misc_feature (1714)..(1714): n is a, c, g, or t
ccggctgtgtgagaggtcagcagaggggcggtctgcggggacaacaatggcggggttctgggtcgggacagcaccgctggtcgctgccggacggcgtgggcggtggccgccgcagcagctgatgctgagcgcggcgctgcggaccctgaagcatgttctgtactattcaagacagtgcttaatggtgtcccgtaatcttggttcagtgggatatgatcctaatgaaaaaacttttgataaaattcttgttgctaatagaggagaaattgcatgtcgggttattagaacttgcaagaagatgggcattaagacagttgccatccacagtgatgttgatgctagttctgttcatgtgaaaatggcggatgaggctgtctgtgttggcccagctcccaccagtaaaagctacctcaacatggatgccatcatggaagccattaagaaaaccagggcccaagctgtacatccaggttatggattcctttcagaaaacaaagaatttgccagatgtttggcagcagaagatgtcgttttcattggacctgacacacatgctattcaagccatgggcgacaagattgaaagcaaattattagctaagaaagcagaggttaatacaatccctggctttgatggagtagtcaaggatgcagaagaagctgtcagaattgcaagggaaattggctaccctgtcatgatcaaggcctcagcaggtggtggtgggaaaggcatgcgcattgcttgggatgatgaagagaccagggatggttttagattgtcatctcaagaagctgcttctagttttggcgatgatagactactaatagaaaaatttattgataatcctcgtcatatagaaatccaggttctaggtgataaacatgggaatgctttatggcttaatgaaagagagtgctcaattcagagaagaaatcagaaggtggtggaggaagcaccaagcatttttttggatgcggagactcgaagagcgatgggagaacaagctgtagctcttgccagagcagtaaaatattcctctgctgggaccgtggagttccttgtggactctaagaagaatttttatttcttggaaatgaatacaagactccaggttgagcatcctgtcacagaatgcattactggcctggacctagtccaggaaatgatccgtgttgctaagggctaccctctcaggcacaaacaagctgatattcgcatcaacggctgggcagttgaatgtcgggtttatgctgaggacccctacaagtcttttggtttaccatctattgggagattgtctcagtaccaagaaccgttacatctacctggtgtccgagtggacagtggcatccaaccaggaagtgatattagcatttattatgatcctatgatttcaaaactaatcacatatggctctgatagaactgaggcactgaagagaatggcagatgcactggataactatgttattcgaggtgttacacataatattgcattacttcgagaggtgataatcaactcacgctttgtaaaaggagacatcagcactaaatttctctccgatgtgtatcctgatggcttcaaaggacacatgctaaccaagagtgagaagaaccagttattggcaatagcatcatcattgtttgtggcattccagttaagagcacaacattttcaagaaaattcaagaatgctgttattaaccagacatagntcaactggagctctcagtattgtggaaggtgatgggtcgaaacttgtgccagccgtggcctgg

SEQ ID NO: 317215 - DNA, 653 bp, Homo sapiens
  misc_feature (653)..(653): n is a, c, g, or t
ccggctgtgtgagaggtcagcagaggggcggtctgcggggacaacaatggcggggttctgggtcgggacagcaccgctggtcgctgccggacggcgtgggcggtggccgccgcagcagctgatgctgagcgcggcgctgcggaccctgaagcatgttctgtactattcaagacagtgcttaatggtgtcccgtaatcttggttcagtgggatatgatcctaatgaaaaaacttttgataaaattcttgttgctaatagaggagaaattgcatgtcgggttattagaacttgcaagaagatgggcattaagacagttgccatccacagtgatgttgatgctagttctgttcatgtgaaaatggcggatgaggctgtctgtgttggcccagctcccaccagtaaaagctacctcaacatggatgccatcatggaagccattaagaaaaccagggcccaagctgtacatccaggttatggattcctttcagctgacacacatgctattcaagccatgggcgacaagattgaaagcaaattattagctaagaaagcagaggttaatacaatccctggctttgatggagtagtcaaggatgcagaagaagctgtcagaattgcaagggttggctaccctgtcatgatcggcctcagcn

SEQ ID NO: 317216 - DNA, 3661 bp, Homo sapiens
  misc_feature (1373)..(1373): n is a, c, g, or t
cctcagtcactttttccagcataaatttgttcgattctgcggcaagtctggttaagatattcaccttgtacactgtaccaagaaactgaatgctcatgtttccacctgcttctcgagaaagacactggacagtgttctgcgttccccgatgcccggagtggtggtggccgtctctgtcaagcctggagacgcggtaagggctgtgtgtgtctctctgcaggacatgctggtctccaacttccccttccaaagcgacggctaacggcacagcacgattcggctctttgcagttcttacttaaccgacgccccctaaacagcaaaatcgattgcgtgtgttgtcgacctgtttcacgtttgcattacgttggtgccaggaccctcagcgcttcccctcccaaatgatctgggagtggagcagaaagaaggccagatgcattccatcattttgcaaatgcagtgttttgggaagtactttccttaaaagtgctgcttactctctagtatgctgtgctcaaagcatccattgaagtcatgccagggaataatactccgatgaggaactttttgcatgattcctggaacaaatgtctaattgggaagaagagttgaggaaaggttaattctgcaatctgtacagtaccagagcacttccattacttggtaaataaaatgtagcatcacagtttgaagtttttcatcttgatcttgtgacattaaagcacaaatcaaagctatattatttcctcgagataacttacatggatgaattgataggatgcacacattttcttagaacatggatagaaatctctactgatgagcagcaaaagtgaaaagaaaacaatttaggaggcaaccagatttccaggtacacttaaatacttgcatttttattcatgtgcaggaaaatagcatccggacatgactgtctctcatggatgaggtggtgattccgttttgtatctcaggtcactgggacttacattttagtgcctcctgatttctcaatagtacagataaaatatctgcttaacattgaggaaaaaatcaggtagttggcattggcttctagaaaagtatttgcaataaatgtgaatattaagaaaacatgatcagttttagttgtttgaatgaccagccctgaaactaatatgcgaagttagaaaaccgacttaacagctgctttacctggtgatacagaaatagaactgtccactttttcagaaaggcataaaagaggctacgtggctgtgaattgttgtttgctgtgaaagcattgatactcctggaagaaagccctctttaagactgtctaatgcccacgtgttaaggatttgggagaggccataagaaaaattacgtgtgtgtgtntgtgtgtgtgtgtaatgtgtgtaaaattcaggggaggacatcttccttctccagagttagggtcgtaagaggatagtctcgtggccttgacattaagaatcgttcacttgcacgtgacattatcagagctgtcagtggaatcttctagtgactagatatgtaggttcgtaaacaatataagggttttgttttgtttttttcatttttcttaagttttttttctggaaggcatctatctagtctgtatactgccagcctgagctttccactcctaattgtgtggctttaattataaaatcgtgtgtgtgtgtgtgtgtgtgtgtgtgtgtgtgtgtgtgtgtgtttcaagtaagtgttttccttaaatccttttctaacacctgaatccaaaccggagtggagggagggcgggcagggatgagggagaccactcctgcctcaagcctggagggcaagagggtgagactgcagccctggcccctcacacggccctcaaggaggttgctcagaggcagtaaacggggcgctcccaaggccagatcagcgcagccttctggtttctttaacagctgctggctcctgatctgactttcccacataccgaaagggtttggcctttgtacgttccatttcctggttaataattgaatgtagaaaagcaaggcatttcgtaaatgggaacaatgtgatatcagtccttggttcattgatgtagctcagatattaaaaacacccaccaataattaaatgtgtgtactcattaagaatggtttgagaactgttaaaaatatgttacggcagagcaacggggcctatattttatgcattcctttaaattcagagtacctggggggcacgcgtagtgaacaggctcaggacctcgggatctgtcagctccctcctaagttctgtttgcgggggctgctcaggtggggcgtatacttgcttttatttgtcttttttggtacttgcagaacttcctttcatattctgtgccattgtgttttgatgaaacagccttttctcttgaattactgcttgtgaaaaatgtcccaaaccactaataccgaaacccaatgcagcctgagaagtttcatcgtcggctcttagcgcaacttctatagttaaattctgcttagtgtaattaaaacacaagaagcttccttggaccagaggcacgtcacttacttgaggccattgtgaggaaacactacctgtcacgttgaaattttgcggttttaagtgattttaacaccgcggggcgtgttgtgttttcctccgcactaacaatagccgggcgaggttccccttttatgggtgggaagataatggagtcagtctccttggtgtattttcaaggaaaataaggaccctaaaacaactaagggccttacaagtattctgtttttctttgaaatgttactttttatcgtttaaattccagtaatctatcatgtttctgtttagcttagctgaagtaaaacttgaccaatcgtagaatggtgggcctggcaataagttctaaaaaaagtgtcacataaatcgtaatgaacaaatctgttttgtgaagtaaacaatttgaacacagtttaaaaacctcaggaagaagagatgtggggtggccgttgagaagtagtgaatccgctcggggcgcttggtgtggcagggccttgtgcactgattcatttgaaacactcagcctgccctaaacacagaagctgtgttttatttgaagggcttctgtagggttcacacagcaaaagttcctaataactttttcagtgtctgttatatactatttaacattaaatgtggcaggtcacattttaaatgattgtgtaatagtttttccgaacacgtggagagaggatgttaatacacagtaaaatgcaggtaagcaaacaaatcaataagaaagtacagtggattattaaggtccagaatcagtaatataatttaggaaacaactgatagaataaattttagtgcctttttatatgccttctgaaaatgtttctgcagtaactcatttcagtttgaaaactcgttttcttagactcgtaacactattgtaaactgggagcacttctgtaatcaaagttagcatgactcagctgtttcaaacttctacctttatgatactcttgaacagaaatgttagaaatatatatattttcagaataacggtagaatacatttttccacatgtcaaattagacttatagctgctgaatttattgcataattttcactttgactttgaagtcaaataaagtcatgatgagcac

SEQ ID NO: 317217 - DNA, 553 bp, Homo sapiens
agagttcctgagtttatttgttgcattgttgctttttagtgcatactcaaaaagaaatacgactctataaatgataggcagaacaatcagatttgcaattttgtgtgtatttgcagatgatggtaattctttttgctgggcgcatctgttaatgcagaaatttgtctcctcaggttcatgtgaaaatggcggatgaggctgtctgtgttggcccagctcccaccagtaaaagctacctcaacatggatgccatcatggaagccattaagaaaaccagggcccaagctgtgagtctgaatgaatctatctactgcagctgtttcatatgtagtgagcagaaagctagagtttgtatttaaaaaaaaaaataggaaagaatgattgaaaatgctgttgcagttagttcatgtcacatgagttaaatgtggtcgaattcgctactggaaatcaaaggctttgtagcatctggcagtgttggttgctgatcctgcaggtggctgctggattcagctttcacaccagggagcagtttcagttcatttccaaatttgct

SEQ ID NO: 317218 - DNA, 673 bp, Homo sapiens
tttctccagattatcagaattcaatttttcactgattcattgttctatcaatggataactatgttattcgaggtgttacacataatattgcattacttcgagaggtgataatcaactcacgctttgtaaaaggagacatcagcactaaatttctctccgatgtgtatcctgatggcttcaaaggtttgtatgcattaaaatattttagtgttttaaagttgttatttttatactttattgtaatacataatttcactctattttgaaattaaggccttttggcttatattatacttcatttttagaacatgcaagactgtttacattcatgattttgagtatttatggatgactcatgagtgtgataatctgcagtcttgtggagtgcagaattcaaccatgtgaattgttctatgagtccagtgttttggagcaaaacatgtagatagatcattagcctacctgacttcctggtttctgaaaatcaaatcagatttgtattttctactgaggtgagtatataaggaactcttctaaagtgatttttaagagatatattaatgaaaatagcactgaaaatttcagaaaaccagattctggtcctattaatgaaaatctaggaagatgatgattttattctgaaaaatgaagttttcaataaagtaatgagtgg

SEQ ID NO: 317219 - DNA, 438 bp, Homo sapiens
aagaaaatgtttatgtaatgcacacaaaagataacttgatttttgtccgaaatgtagacaaacatttttttgtatatgtagcatttttttggatgcggagactcgaagagcgatgggagaacaagctgtagctcttgccagagcagtaaaatattcctctgctgggaccgtggagttccttgtggactctaagaagaatttttatttcttggaaatgaatacaagactccaggtaacaacaactgttatttattcctctccatgcctctgtactttacccttccttctccacccttttttgttttataaatgttaaaaaattaactccataaagtgttaaataaagatttagtttttatgcttgtgctaagacatctgttaggaatgacggatagtatccctctaaagttcaatgtctagacctctgctttgtcactg

SEQ ID NO: 317220 - DNA, 286 bp, Homo sapiens
ggtaacagctatactgagatgtaattcacatacaatttagccctttaacgtgtacgattcggtggtttcagtcaattcagagttgtgtagttgtcaccacaatcaattttggaacatttttatcactctcaaaagaaaccctgtacccttcagcagtgactccccttccctcttcaaccccaggcaacctcgagtctgtctgtagagatctgcctattctggacatttcaggtaagtggaaaacattccaatttccgaacacctctgttagtggcagagccagact

SEQ ID NO: 317221 - DNA, 351 bp, Homo sapiens
tcataattgatagcattacatttaagtctttagtttgaattgattttcatatatggcaaggcacaggggtctagtataatttttctgaatttaaatatttaaatggccctgcatcatttattgaagaaattagcttttccctaaagtgtgttcttggcaattttgttgacaatcagttggctttaggtgcataaactaacttctgggcttcttgggcacattagtctatgtgtttgtttttatgccagtacagtgctgttttggttactatagctttgtagcaagttttgaagtttgataaagtgatgcctttagctttgcttattttgctcaaagttatttgtctattca

SEQ ID NO: 317222 - DNA, 9802 bp, Homo sapiens
gctgtccccaagccgattggtacttcttgtcaggaagaaacgccaagaggtgggagtgcctggggagggaggcaggcggtccctaccgcaggcgcggggagctgcctttccgcccctccgcctgctttccaagcctggactcttaggagtggctgaagctgcggagcgcttttggagcctgtgaatgaaccctcctcctctccctcctccttcttctcgctgagtctcctcctcggctctgacggtacagtgatataatgatgatgggtgtcacaacccgcatttgaacttgcaggcgagctgccccgagcctttctggggaagaactccaggcgtgcggacgcaacagccgagaacattaggtgttgtggacaggagctgggaccaagatcttcggccagccccgcatcctcccgcatcttccagcaccgtcccgcaccctccgcatccttccccgggccaccacgcttcctatgtgacccgcctgggcaacgccgaacccagtcgcgcagcgctgcagtgaattttccccccaaactgcaataagccgccttccaaggccaagatgttcataaatataaagagcatcttatggatgtgttcaaccttaatagtaacccatgcgctacataaagtcaaagtgggaaaaagcccaccggtgaggggctccctctctggaaaagtcagcctaccttgtcatttttcaacgatgcctactttgccacccagttacaacaccagtgaatttctccgcatcaaatggtctaagattgaagtggacaaaaatggaaaagatttgaaagagactactgtccttgtggcccaaaatggaaatatcaagattggtcaggactacaaagggagagtgtctgtgcccacacatcccgaggctgtgggcgatgcctccctcactgtggtcaagctgctggcaagtgatgcgggtctttaccgctgtgacgtcatgtacgggattgaagacacacaagacacggtgtcactgactgtggatggggttgtgtttcactacagggcggcaaccagcaggtacacactgaattttgaggctgctcagaaggcttgtttggacgttggggcagtcatagcaactccagagcagctctttgctgcctatgaagatggatttgagcagtgtgacgcaggctggctggctgatcagactgtcagatatcccatccgggctcccagagtaggctgttatggagataagatgggaaaggcaggagtcaggacttatggattccgttctccccaggaaacttacgatgtgtattgttatgtggatcatctggatggtgatgtgttccacctcactgtccccagtaaattcaccttcgaggaggctgcaaaagagtgtgaaaaccaggatgccaggctggcaacagtgggggaactccaggcggcatggaggaacggctttgaccagtgcgattacgggtggctgtcggatgccagcgtgcgccaccctgtgactgtggccagggcccagtgtggaggtggtctacttggggtgagaaccctgtatcgttttgagaaccagacaggcttccctccccctgatagcagatttgatgcctactgctttaaacgtcgaatgagtgatttgagtgtaattggtcatccaatagattcagaatctaaagaagatgaaccttgtagtgaagaaacagatccagtgcatgatctaatggctgaaattttacctgaattccctgacataattgaaatagacctataccacagtgaagaaaatgaagaagaagaagaagagtgtgcaaatgctactgatgtgacaaccaccccatctgtgcagtacataaatgggaagcatctcgttaccactgtgcccaaggacccagaagctgcagaagctaggcgtggccagtttgaaagtgttgcaccttctcaaaatttctcggacagctctgaaagtgatactcatccatttgtaatagccaaaacggaattgtctactgctgtgcaacctaatgaatctacagaaacaactgagtctcttgaagttacatggaagcctgagacttaccctgaaacatcagaacatttttcaggtggtgagcctgatgttttccccacagtcccattccatgaggaatttgaaagtggaacagccaaaaaaggggcagaatcagtcacagagagagatactgaagttggtcatcaggcacatgaacatactgaacctgtatctctgtttcctgaagagtcttcaggagagattgccattgaccaagaatctcagaaaatagcctttgcaagggctacagaagtaacatttggtgaagaggtagaaaaaagtacttctgtcacatacactcccactatagttccaagttctgcatcagcatatgtttcagaggaagaagcagttaccctaataggaaatccttggccagatgacctgttgtctaccaaagaaagctgggtagaagcaactcctagacaagttgtagagctctcagggagttcttcgattccaattacagaaggctctggagaagcagaagaagatgaagatacaatgttcaccatggtaactgatttatcacagagaaatactactgatacactcattactttagacactagcaggataatcacagaaagcttttttgaggttcctgcaaccaccatttatccagtttctgaacaaccttctgcaaaagtggtgcctaccaagtttgtaagtgaaacagacacttctgagtggatttccagtaccactgttgaggaaaagaaaaggaaggaggaggagggaactacaggtacggcttctacatttgaggtatattcatctacacagagatcggatcaattaattttaccctttgaattagaaagtccaaatgtagctacatctagtgattcaggtaccaggaaaagttttatgtccttgacaacaccaacacagtctgaaagggaaatgacagattctactcctgtctttacagaaacaaatacattagaaaatttgggggcacagaccactgagcacagcagtatccatcaacctggggttcaggaagggctgaccactctcccacgtagtcctgcctctgtctttatggagcagggctctggagaagctgctgccgacccagaaaccaccactgtttcttcattttcattaaacgtagagtatgcaattcaagccgaaaaggaagtagctggcactttgtctccgcatgtggaaactacattctccactgagccaacaggactggttttgagtacagtaatggacagagtagttgctgaaaatataacccaaacatccagggaaatagtgatttcagagcgattaggagaaccaaattatggggcagaaataaggggcttttccacaggttttcctttggaggaagatttcagtggtgactttagagaatactcaacagtgtctcatcccatagcaaaagaagaaacggtaatgatggaaggctctggagatgcagcatttagggacacccagacttcaccatctacagtacctacttcagttcacatcagtcacatatctgactcagaaggacccagtagcaccatggtcagcacttcagccttcccctgggaagagtttacatcctcagctgagggctcaggtgagcaactggtcacagtcagcagctctgttgttccagtgcttcccagtgctgtgcaaaagttttctggtacagcttcctccattatcgacgaaggattgggagaagtgggtactgtcaatgaaattgatagaagatccaccattttaccaacagcagaagtggaaggtacgaaagctccagtagagaaggaggaagtaaaggtcagtggcacagtttcaacaaactttccccaaactatagagccagccaaattatggtctaggcaagaagtcaaccctgtaagacaagaaattgaaagtgaaacaacatcagaggaacaaattcaagaagaaaagtcatttgaatcccctcaaaactctcctgcaacagaacaaacaatctttgattcacagacatttactgaaactgaactcaaaaccacagattattctgtactaacaacaaagaaaacttacagtgatgataaagaaatgaaggaggaagacacttctttagttaacatgtctactccagatccagatgcaaatggcttggaatcttacacaactctccctgaagctactgaaaagtcacattttttcttagctactgcattagtaactgaatctataccagctgaacatgtagtcacagattcaccaatcaaaaaggaagaaagtacaaaacattttccgaaaggcatgaggccaacaattcaagagtcagatactgagctcttattctctggactgggatcaggagaagaagttttacctactctaccaacagagtcagtgaattttactgaagtggaacaaatcaataacacattatatccccacacttctcaagtggaaagtacctcaagtgacaaaattgaagactttaacagaatggaaaatgtggcaaaagaagttggaccactcgtatctcaaacagacatctttgaaggtagtgggtcagtaaccagcacaacattaatagaaattttaagtgacactggagcagaaggacccacggtggcacctctccctttctccacggacatcggacatcctcaaaatcagactgtcaggtgggcagaagaaatccagactagtagaccacaaaccataactgaacaagactctaacaagaattcttcaacagcagaaattaacgaaacaacaacctcatctactgattttctggctagagcttatggttttgaaatggccaaagaatttgttacatcagcaccaaaaccatctgacttgtattatgaaccttctggagaaggatctggagaagtggatattgttgattcatttcacacttctgcaactactcaggcaaccagacaagaaagcagcaccacatttgtttctgatgggtccctggaaaaacatcctgaggtgccaagcgctaaagctgttactgctgatggattcccaacagtttcagtgatgctgcctcttcattcagagcagaacaaaagctcccctgatccaactagcacactgtcaaatacagtgtcatatgagaggtccacagacggtagtttccaagaccgtttcagggaattcgaggattccaccttaaaacctaacagaaaaaaacccactgaaaatattatcatagacctggacaaagaggacaaggatttaatattgacaattacagagagtaccatccttgaaattctacctgagctgacatcggataaaaatactatcatagatattgatcatactaaacctgtgtatgaagacattcttggaatgcaaacagatatagatacagaggtaccatcagaaccacatgacagtaatgatgaaagtaatgatgacagcactcaagttcaagagatctatgaggcagctgtcaacctttctttaactgaggaaacatttgagggctctgctgatgttctggctagctacactcaggcaacacatgatgaatcaatgacttatgaagatagaagccaactagatcacatgggctttcacttcacaactgggatccctgctcctagcacagaaacagaattagacgttttacttcccacggcaacatccctgccaattcctcgtaagtctgccacagttattccagagattgaaggaataaaagctgaagcaaaagccctggatgacatgtttgaatcaagcactttgtctgatggtcaagctattgcagaccaaagtgaaataataccaacattgggccaatttgaaaggactcaggaggagtatgaagacaaaaaacatgctggtccttcttttcagccagaattctcttcaggagctgaggaggcattagtagaccatactccctatctaagtattgctactacccaccttatggatcagagtgtaacagaggtgcctgatgtgatggaaggatccaatcccccatattacactgatacaacattagcagtttcaacatttgcgaagttgtcttctcagacaccatcatctcccctcactatctactcaggcagtgaagcctctggacacacagagatcccccagcccagtgctctgccaggaatagacgtcggctcatctgtaatgtccccacaggattcttttaaggaaattcatgtaaatattgaagcgactttcaaaccatcaagtgaggaataccttcacataactgagcctccctctttatctcctgacacaaaattagaaccttcagaagatgatggtaaacctgagttattagaagaaatggaagcttctcccacagaacttattgctgtggaaggaactgagattctccaagatttccaaaacaaaaccgatggtcaagtttctggagaagcaatcaagatgtttcccaccattaaaacacctgaggctggaactgttattacaactgccgatgaaattgaattagaaggtgctacacagtggccacactctacttctgcttctgccacctatggggtcgaggcaggtgtggtgccttggctaagtccacagacttctgagaggcccacgctttcttcttctccagaaataaaccctgaaactcaagcagctttaatcagagggcaggattccacgatagcagcatcagaacagcaagtggcagcgagaattcttgattccaatgatcaggcaacagtaaaccctgtggaatttaatactgaggttgcaacaccaccattttcccttctggagacttctaatgaaacagatttcctgattggcattaatgaagagtcagtggaaggcacggcaatctatttaccaggacctgatcgctgcaaaatgaacccgtgccttaacggaggcacctgttatcctactgaaacttcctacgtatgcacctgtgtgccaggatacagcggagaccagtgtgaacttgattttgatgaatgtcactctaatccctgtcgtaatggagccacttgtgttgatggttttaacacattcaggtgcctctgccttccaagttatgttggtgcactttgtgagcaagataccgagacatgtgactatggctggcacaaattccaagggcagtgctacaaatactttgcccatcgacgcacatgggatgcagctgaacgggaatgccgtctgcagggtgcccatctcacaagcatcctgtctcacgaagaacaaatgtttgttaatcgtgtgggccatgattatcagtggataggcctcaatgacaagatgtttgagcatgacttccgttggactgatggcagcacactgcaatacgagaattggagacccaaccagccagacagcttcttttctgctggagaagactgtgttgtaatcatttggcatgagaatggccagtggaatgatgttccctgcaattaccatctcacctatacgtgcaagaaaggaacagttgcttgcggccagccccctgttgtagaaaatgccaagacctttggaaagatgaaacctcgttatgaaatcaactccctgattagataccactgcaaagatggtttcattcaacgtcaccttccaactatccggtgcttaggaaatggaagatgggctatacctaaaattacctgcatgaacccatctgcataccaaaggacttattctatgaaatactttaaaaattcctcatcagcaaaggacaattcaataaatacatccaaacatgatcatcgttggagccggaggtggcaggagtcgaggcgctgatccctaaaatggcgaacatgtgttttcatcatttcagccaaagtcctaacttcctgtgcctttcctatcacctcgagaagtaattatcagttggtttggatttttggaccaccgttcagtcattttgggttgccgtgctcccaaaacattttaaatgaaagtattggcattcaaaaagacagcagacaaaatgaaagaaaatgagagcagaaagtaagcatttccagcctatctaatttctttagttttctatttgcctccagtgcagtccatttcctaatgtataccagcctactgtactatttaaaatgctcaatttcagcaccgatggccatgtaaataagatgatttaatgttgattttaatcctgtatataaaataaaaagtcacaatgagtttgggcatatttaatgatgattatggagccttagaggtctttaatcattggttcggctgcttttatgtagtttaggctggaaatggtttcacttgctctttgactgtcagcaagactgaagatggcttttcctggacagctagaaaacacaaaatcttgtaggtcattgcacctatctcagccataggtgcagtttgcttctacatgatgctaaaggctgcgaatgggatcctgatggaactaaggactccaatgtcgaactcttctttgctgcattcctttttcttcacttacaagaaaggcctgaatggaggacttttctgtaaccaggaacattttttaggggtcaaagtgctaataattaactcaaccaggtctactttttaatggctttcataacactaactcataaggttaccgatcaatgcatttcatacggatatagacctagggctctggagggtgggggattgttaaaacacatgcaaaaaaaaaaaaaaaaaaagaaattttgtatatataaccattttaatcttttataaagttttgaatgttcatgtatgaatgctgcagctgtgaagcatacataaataaatgaagtaagccatactgatttaatttattggatgttattttccctaagacctgaaaatgaacatagtatgctagttatttttcagtgttagccttttactttcctcacacaatttggaatcatataatataggtactttgtccctgattaaataatgtgacggatagaatgcatcaagtgtttattatgaaaagagtggaaaagtatatagcttttagcaaaaggtgtttgcccattctaagaaatgagcgaatatatagaaatagtgtgggcatttcttcctgttaggtggagtgtatgtgttgacatttctccccatctcttcccactctgttttctccccattatttgaataaagtgactgctgaagatgactttgaatccttatccacttaatttaatgtttaaagaaaaacctgtaatggaaagtaagactccttccctaatttcagtttagagcaacttgaagaagagtagacaaaaaataaaatgcacatagaaaaagagaaaaagggcacaaagggattggcccaatattgattcttttttataaaacctcctttggcttagaaggaatgactctagctacaataatacacagtatgtttaagcaggttcccttggttgttgcattaaatgtaatccacctttaggtattttagagcacagaacaacactgtgttgatctagtaggtttctatttttcctttctctttacaatgcacataatactttcctgtatttatatcataacgtgtatagtgtaaaatgtgaatgactttttttgtgaatgaaaatctaaaatctttgtaactttttatatctgcttttgtttcaccaaagaaacctaaaatccttcttttactacacaaaacacaaacaaacaggcgccgacaaaattccccaggcccattacggaccattctacaagcgcccaaaaaagaataaaaaacggccctaaacgtgtggaagcatggctgaagacctgggtaaggacacaaaccagaaatgctgc

SEQ ID NO: 317223 - DNA, 12763 bp, Homo sapiens
gctgtccccaagccgattggtacttcttgtcaggaagaaacgccaagaggtgggagtgcctggggagggaggcaggcggtccctaccgcaggcgcggggagctgcctttccgcccctccgcctgctttccaagcctggactcttaggagtggctgaagctgcggagcgcttttggagcctgtgaatgaaccctcctcctctccctcctccttcttctcgctgagtctcctcctcggctctgacggtacagtgatataatgatgatgggtgtcacaacccgcatttgaacttgcaggcgagctgccccgagcctttctggggaagaactccaggcgtgcggacgcaacagccgagaacattaggtgttgtggacaggagctgggaccaagatcttcggccagccccgcatcctcccgcatcttccagcaccgtcccgcaccctccgcatccttccccgggccaccacgcttcctatgtgacccgcctgggcaacgccgaacccagtcgcgcagcgctgcagtgaattttccccccaaactgcaataagccgccttccaaggccaagatgttcataaatataaagagcatcttatggatgtgttcaaccttaatagtaacccatgcgctacataaagtcaaagtgggaaaaagcccaccggtgaggggctccctctctggaaaagtcagcctaccttgtcatttttcaacgatgcctactttgccacccagttacaacaccagtgaatttctccgcatcaaatggtctaagattgaagtggacaaaaatggaaaagatttgaaagagactactgtccttgtggcccaaaatggaaatatcaagattggtcaggactacaaagggagagtgtctgtgcccacacatcccgaggctgtgggcgatgcctccctcactgtggtcaagctgctggcaagtgatgcgggtctttaccgctgtgacgtcatgtacgggattgaagacacacaagacacggtgtcactgactgtggatggggttgtgtttcactacagggcggcaaccagcaggtacacactgaattttgaggctgctcagaaggcttgtttggacgttggggcagtcatagcaactccagagcagctctttgctgcctatgaagatggatttgagcagtgtgacgcaggctggctggctgatcagactgtcagatatcccatccgggctcccagagtaggctgttatggagataagatgggaaaggcaggagtcaggacttatggattccgttctccccaggaaacttacgatgtgtattgttatgtggatcatctggatggtgatgtgttccacctcactgtccccagtaaattcaccttcgaggaggctgcaaaagagtgtgaaaaccaggatgccaggctggcaacagtgggggaactccaggcggcatggaggaacggctttgaccagtgcgattacgggtggctgtcggatgccagcgtgcgccaccctgtgactgtggccagggcccagtgtggaggtggtctacttggggtgagaaccctgtatcgttttgagaaccagacaggcttccctccccctgatagcagatttgatgcctactgctttaaacctaaagaggctacaaccatcgatttgagtatcctcgcagaaactgcatcacccagtttatccaaagaaccacaaatggtttctgatagaactacaccaatcatccctttagttgatgaattacctgtcattccaacagagttccctcccgtgggaaatattgtcagttttgaacagaaagccacagtccaacctcaggctatcacagatagtttagccaccaaattacccacacctactggcagtaccaagaagccctgggatatggatgactactcaccttctgcttcaggacctcttggaaagctagacatatcagaaattaaggaagaagtgctccagagtacaactggcgtctctcattatgctacggattcatgggatggtgtcgtggaagataaacaaacacaagaatcggttacacagattgaacaaatagaagtgggtcctttggtaacatctatggaaatcttaaagcacattccttccaaggaattccctgtaactgaaacaccattggtaactgcaagaatgatcctggaatccaaaactgaaaagaaaatggtaagcactgtttctgaattggtaaccacaggtcactatggattcaccttgggagaagaggatgatgaagacagaacacttacagttggatctgatgagagcaccttgatctttgaccaaattcctgaagtcattacggtgtcaaagacttcagaagacaccatccacactcatttagaagacttggagtcagtctcagcatccacaactgtttcccctttaattatgcctgataataatggatcatccatggatgactgggaagagagacaaactagtggtaggataacggaagagtttcttggcaaatatctgtctactacaccttttccatcacagcatcgtacagaaatagaattgtttccttattctggtgataaaatattagtagagggaatttccacagttatttatccttctctacaaacagaaatgacacatagaagagaaagaacagaaacactaataccagagatgagaacagatacttatacagatgaaatacaagaagagatcactaaaagtccatttatgggaaaaacagaagaagaagtcttctctgggatgaaactctctacatctctctcagagccaattcatgttacagagtcttctgtggaaatgaccaagtcttttgatttcccaacattgataacaaagttaagtgcagagccaacagaagtaagagatatggaggaagactttacagcaactccaggtactacaaaatatgatgaaaatattacaacagtgcttttggcccatggtactttaagtgttgaagcagccactgtatcaaaatggtcatgggatgaagataatacaacatccaagcctttagagtctacagaaccttcagcctcttcaaaattgccccctgccttactcacaactgtggggatgaatggaaaggataaagacatcccaagtttcactgaagatggagcagatgaatttactcttattccagatagtactcaaaagcagttagaggaggttactgatgaagacatagcagcccatggaaaattcacaattagatttcagccaactacatcaactggtattgcagaaaagtcaactttgagagattctacaactgaagaaaaagttccacctatcacaagcactgaaggccaagtttatgcaaccatggaaggaagtgctttgggtgaagtagaagatgtggacctctctaagccagtatctactgttccccaatttgcacacacttcagaggtggaaggattagcatttgttagttatagtagcacccaagagcctactacttatgtagactcttcccataccattcctctttctgtaattcccaagacagactggggagtgttagtaccttctgttccatcagaagatgaagttctaggtgaaccctctcaagacatacttgtcattgatcagactcgccttgaagcgactatttctccagaaactatgagaacaacaaaaatcacagagggaacaactcaggaagaattcccttggaaagaacagactgcagagaaaccagttcctgctctcagttctacagcttggactcccaaggaggcagtaacaccactggatgaacaagagggcgatggatcagcatatacagtctctgaagatgaattgttgacaggttctgagagggtcccagttttagaaacaactccagttggaaaaattgatcacagtgtgtcttatccaccaggtgctgtaactgagcacaaagtgaaaacagatgaagtggtaacactaacaccacgcattgggccaaaagtatctttaagtccagggcctgaacaaaaatatgaaacagaaggtagtagtacaacaggatttacatcatctttgagtccttttagtacccacattacccagcttatggaagaaaccactactgagaaaacatccctagaggatattgatttaggctcaggattatttgaaaagcccaaagccacagaactcatagaattttcaacaatcaaagtcacagttccaagtgatattaccactgccttcagttcagtagacagacttcacacaacttcagcattcaagccatcttccgcgatcactaagaaaccacctctcatcgacagggaacctggtgaagaaacaaccagtgacatggtaatcattggagaatcaacatctcatgttcctcccactacccttgaagatattgtagccaaggaaacagaaaccgatattgatagagagtatttcacgacttcaagtcctcctgctacacagccaacaagaccacccactgtggaagacaaagaggcctttggacctcaggcgctttctacgccacagcccccagcaagcacaaaatttcaccctgacattaatgtttatattattgaggtcagagaaaataagacaggtcgaatgagtgatttgagtgtaattggtcatccaatagattcagaatctaaagaagatgaaccttgtagtgaagaaacagatccagtgcatgatctaatggctgaaattttacctgaattccctgacataattgaaatagacctataccacagtgaagaaaatgaagaagaagaagaagagtgtgcaaatgctactgatgtgacaaccaccccatctgtgcagtacataaatgggaagcatctcgttaccactgtgcccaaggacccagaagctgcagaagctaggcgtggccagtttgaaagtgttgcaccttctcaaaatttctcggacagctctgaaagtgatactcatccatttgtaatagccaaaacggaattgtctactgctgtgcaacctaatgaatctacagaaacaactgagtctcttgaagttacatggaagcctgagacttaccctgaaacatcagaacatttttcaggtggtgagcctgatgttttccccacagtcccattccatgaggaatttgaaagtggaacagccaaaaaaggggcagaatcagtcacagagagagatactgaagttggtcatcaggcacatgaacatactgaacctgtatctctgtttcctgaagagtcttcaggagagattgccattgaccaagaatctcagaaaatagcctttgcaagggctacagaagtaacatttggtgaagaggtagaaaaaagtacttctgtcacatacactcccactatagttccaagttctgcatcagcatatgtttcagaggaagaagcagttaccctaataggaaatccttggccagatgacctgttgtctaccaaagaaagctgggtagaagcaactcctagacaagttgtagagctctcagggagttcttcgattccaattacagaaggctctggagaagcagaagaagatgaagatacaatgttcaccatggtaactgatttatcacagagaaatactactgatacactcattactttagacactagcaggataatcacagaaagcttttttgaggttcctgcaaccaccatttatccagtttctgaacaaccttctgcaaaagtggtgcctaccaagtttgtaagtgaaacagacacttctgagtggatttccagtaccactgttgaggaaaagaaaaggaaggaggaggagggaactacaggtacggcttctacatttgaggtatattcatctacacagagatcggatcaattaattttaccctttgaattagaaagtccaaatgtagctacatctagtgattcaggtaccaggaaaagttttatgtccttgacaacaccaacacagtctgaaagggaaatgacagattctactcctgtctttacagaaacaaatacattagaaaatttgggggcacagaccactgagcacagcagtatccatcaacctggggttcaggaagggctgaccactctcccacgtagtcctgcctctgtctttatggagcagggctctggagaagctgctgccgacccagaaaccaccactgtttcttcattttcattaaacgtagagtatgcaattcaagccgaaaaggaagtagctggcactttgtctccgcatgtggaaactacattctccactgagccaacaggactggttttgagtacagtaatggacagagtagttgctgaaaatataacccaaacatccagggaaatagtgatttcagagcgattaggagaaccaaattatggggcagaaataaggggcttttccacaggttttcctttggaggaagatttcagtggtgactttagagaatactcaacagtgtctcatcccatagcaaaagaagaaacggtaatgatggaaggctctggagatgcagcatttagggacacccagacttcaccatctacagtacctacttcagttcacatcagtcacatatctgactcagaaggacccagtagcaccatggtcagcacttcagccttcccctgggaagagtttacatcctcagctgagggctcaggtgagcaactggtcacagtcagcagctctgttgttccagtgcttcccagtgctgtgcaaaagttttctggtacagcttcctccattatcgacgaaggattgggagaagtgggtactgtcaatgaaattgatagaagatccaccattttaccaacagcagaagtggaaggtacgaaagctccagtagagaaggaggaagtaaaggtcagtggcacagtttcaacaaactttccccaaactatagagccagccaaattatggtctaggcaagaagtcaaccctgtaagacaagaaattgaaagtgaaacaacatcagaggaacaaattcaagaagaaaagtcatttgaatcccctcaaaactctcctgcaacagaacaaacaatctttgattcacagacatttactgaaactgaactcaaaaccacagattattctgtactaacaacaaagaaaacttacagtgatgataaagaaatgaaggaggaagacacttctttagttaacatgtctactccagatccagatgcaaatggcttggaatcttacacaactctccctgaagctactgaaaagtcacattttttcttagctactgcattagtaactgaatctataccagctgaacatgtagtcacagattcaccaatcaaaaaggaagaaagtacaaaacattttccgaaaggcatgaggccaacaattcaagagtcagatactgagctcttattctctggactgggatcaggagaagaagttttacctactctaccaacagagtcagtgaattttactgaagtggaacaaatcaataacacattatatccccacacttctcaagtggaaagtacctcaagtgacaaaattgaagactttaacagaatggaaaatgtggcaaaagaagttggaccactcgtatctcaaacagacatctttgaaggtagtgggtcagtaaccagcacaacattaatagaaattttaagtgacactggagcagaaggacccacggtggcacctctccctttctccacggacatcggacatcctcaaaatcagactgtcaggtgggcagaagaaatccagactagtagaccacaaaccataactgaacaagactctaacaagaattcttcaacagcagaaattaacgaaacaacaacctcatctactgattttctggctagagcttatggttttgaaatggccaaagaatttgttacatcagcaccaaaaccatctgacttgtattatgaaccttctggagaaggatctggagaagtggatattgttgattcatttcacacttctgcaactactcaggcaaccagacaagaaagcagcaccacatttgtttctgatgggtccctggaaaaacatcctgaggtgccaagcgctaaagctgttactgctgatggattcccaacagtttcagtgatgctgcctcttcattcagagcagaacaaaagctcccctgatccaactagcacactgtcaaatacagtgtcatatgagaggtccacagacggtagtttccaagaccgtttcagggaattcgaggattccaccttaaaacctaacagaaaaaaacccactgaaaatattatcatagacctggacaaagaggacaaggatttaatattgacaattacagagagtaccatccttgaaattctacctgagctgacatcggataaaaatactatcatagatattgatcatactaaacctgtgtatgaagacattcttggaatgcaaacagatatagatacagaggtaccatcagaaccacatgacagtaatgatgaaagtaatgatgacagcactcaagttcaagagatctatgaggcagctgtcaacctttctttaactgaggaaacatttgagggctctgctgatgttctggctagctacactcaggcaacacatgatgaatcaatgacttatgaagatagaagccaactagatcacatgggctttcacttcacaactgggatccctgctcctagcacagaaacagaattagacgttttacttcccacggcaacatccctgccaattcctcgtaagtctgccacagttattccagagattgaaggaataaaagctgaagcaaaagccctggatgacatgtttgaatcaagcactttgtctgatggtcaagctattgcagaccaaagtgaaataataccaacattgggccaatttgaaaggactcaggaggagtatgaagacaaaaaacatgctggtccttcttttcagccagaattctcttcaggagctgaggaggcattagtagaccatactccctatctaagtattgctactacccaccttatggatcagagtgtaacagaggtgcctgatgtgatggaaggatccaatcccccatattacactgatacaacattagcagtttcaacatttgcgaagttgtcttctcagacaccatcatctcccctcactatctactcaggcagtgaagcctctggacacacagagatcccccagcccagtgctctgccaggaatagacgtcggctcatctgtaatgtccccacaggattcttttaaggaaattcatgtaaatattgaagcgactttcaaaccatcaagtgaggaataccttcacataactgagcctccctctttatctcctgacacaaaattagaaccttcagaagatgatggtaaacctgagttattagaagaaatggaagcttctcccacagaacttattgctgtggaaggaactgagattctccaagatttccaaaacaaaaccgatggtcaagtttctggagaagcaatcaagatgtttcccaccattaaaacacctgaggctggaactgttattacaactgccgatgaaattgaattagaaggtgctacacagtggccacactctacttctgcttctgccacctatggggtcgaggcaggtgtggtgccttggctaagtccacagacttctgagaggcccacgctttcttcttctccagaaataaaccctgaaactcaagcagctttaatcagagggcaggattccacgatagcagcatcagaacagcaagtggcagcgagaattcttgattccaatgatcaggcaacagtaaaccctgtggaatttaatactgaggttgcaacaccaccattttcccttctggagacttctaatgaaacagatttcctgattggcattaatgaagagtcagtggaaggcacggcaatctatttaccaggacctgatcgctgcaaaatgaacccgtgccttaacggaggcacctgttatcctactgaaacttcctacgtatgcacctgtgtgccaggatacagcggagaccagtgtgaacttgattttgatgaatgtcactctaatccctgtcgtaatggagccacttgtgttgatggttttaacacattcaggtgcctctgccttccaagttatgttggtgcactttgtgagcaagataccgagacatgtgactatggctggcacaaattccaagggcagtgctacaaatactttgcccatcgacgcacatgggatgcagctgaacgggaatgccgtctgcagggtgcccatctcacaagcatcctgtctcacgaagaacaaatgtttgttaatcgtgtgggccatgattatcagtggataggcctcaatgacaagatgtttgagcatgacttccgttggactgatggcagcacactgcaatacgagaattggagacccaaccagccagacagcttcttttctgctggagaagactgtgttgtaatcatttggcatgagaatggccagtggaatgatgttccctgcaattaccatctcacctatacgtgcaagaaaggaacagttgcttgcggccagccccctgttgtagaaaatgccaagacctttggaaagatgaaacctcgttatgaaatcaactccctgattagataccactgcaaagatggtttcattcaacgtcaccttccaactatccggtgcttaggaaatggaagatgggctatacctaaaattacctgcatgaacccatctgcataccaaaggacttattctatgaaatactttaaaaattcctcatcagcaaaggacaattcaataaatacatccaaacatgatcatcgttggagccggaggtggcaggagtcgaggcgctgatccctaaaatggcgaacatgtgttttcatcatttcagccaaagtcctaacttcctgtgcctttcctatcacctcgagaagtaattatcagttggtttggatttttggaccaccgttcagtcattttgggttgccgtgctcccaaaacattttaaatgaaagtattggcattcaaaaagacagcagacaaaatgaaagaaaatgagagcagaaagtaagcatttccagcctatctaatttctttagttttctatttgcctccagtgcagtccatttcctaatgtataccagcctactgtactatttaaaatgctcaatttcagcaccgatggccatgtaaataagatgatttaatgttgattttaatcctgtatataaaataaaaagtcacaatgagtttgggcatatttaatgatgattatggagccttagaggtctttaatcattggttcggctgcttttatgtagtttaggctggaaatggtttcacttgctctttgactgtcagcaagactgaagatggcttttcctggacagctagaaaacacaaaatcttgtaggtcattgcacctatctcagccataggtgcagtttgcttctacatgatgctaaaggctgcgaatgggatcctgatggaactaaggactccaatgtcgaactcttctttgctgcattcctttttcttcacttacaagaaaggcctgaatggaggacttttctgtaaccaggaacattttttaggggtcaaagtgctaataattaactcaaccaggtctactttttaatggctttcataacactaactcataaggttaccgatcaatgcatttcatacggatatagacctagggctctggagggtgggggattgttaaaacacatgcaaaaaaaaaaaaaaaaaaagaaattttgtatatataaccattttaatcttttataaagttttgaatgttcatgtatgaatgctgcagctgtgaagcatacataaataaatgaagtaagccatactgatttaatttattggatgttattttccctaagacctgaaaatgaacatagtatgctagttatttttcagtgttagccttttactttcctcacacaatttggaatcatataatataggtactttgtccctgattaaataatgtgacggatagaatgcatcaagtgtttattatgaaaagagtggaaaagtatatagcttttagcaaaaggtgtttgcccattctaagaaatgagcgaatatatagaaatagtgtgggcatttcttcctgttaggtggagtgtatgtgttgacatttctccccatctcttcccactctgttttctccccattatttgaataaagtgactgctgaagatgactttgaatccttatccacttaatttaatgtttaaagaaaaacctgtaatggaaagtaagactccttccctaatttcagtttagagcaacttgaagaagagtagacaaaaaataaaatgcacatagaaaaagagaaaaagggcacaaagggattggcccaatattgattcttttttataaaacctcctttggcttagaaggaatgactctagctacaataatacacagtatgtttaagcaggttcccttggttgttgcattaaatgtaatccacctttaggtattttagagcacagaacaacactgtgttgatctagtaggtttctatttttcctttctctttacaatgcacataatactttcctgtatttatatcataacgtgtatagtgtaaaatgtgaatgactttttttgtgaatgaaaatctaaaatctttgtaactttttatatctgcttttgtttcaccaaagaaacctaaaatccttcttttactacacaaaacacaaacaaacaggcgccgacaaaattccccaggcccattacggaccattctacaagcgcccaaaaaagaataaaaaacggccctaaacgtgtggaagcatggctgaagacctgggtaaggacacaaaccagaaatgctgc

SEQ ID NO: 317224 - DNA, 8801 bp, Homo sapiens
gctgtccccaagccgattggtacttcttgtcaggaagaaacgccaagaggtgggagtgcctggggagggaggcaggcggtccctaccgcaggcgcggggagctgcctttccgcccctccgcctgctttccaagcctggactcttaggagtggctgaagctgcggagcgcttttggagcctgtgaatgaaccctcctcctctccctcctccttcttctcgctgagtctcctcctcggctctgacggtacagtgatataatgatgatgggtgtcacaacccgcatttgaacttgcaggcgagctgccccgagcctttctggggaagaactccaggcgtgcggacgcaacagccgagaacattaggtgttgtggacaggagctgggaccaagatcttcggccagccccgcatcctcccgcatcttccagcaccgtcccgcaccctccgcatccttccccgggccaccacgcttcctatgtgacccgcctgggcaacgccgaacccagtcgcgcagcgctgcagtgaattttccccccaaactgcaataagccgccttccaaggccaagatgttcataaatataaagagcatcttatggatgtgttcaaccttaatagtaacccatgcgctacataaagtcaaagtgggaaaaagcccaccggtgaggggctccctctctggaaaagtcagcctaccttgtcatttttcaacgatgcctactttgccacccagttacaacaccagtgaatttctccgcatcaaatggtctaagattgaagtggacaaaaatggaaaagatttgaaagagactactgtccttgtggcccaaaatggaaatatcaagattggtcaggactacaaagggagagtgtctgtgcccacacatcccgaggctgtgggcgatgcctccctcactgtggtcaagctgctggcaagtgatgcgggtctttaccgctgtgacgtcatgtacgggattgaagacacacaagacacggtgtcactgactgtggatggggttgtgtttcactacagggcggcaaccagcaggtacacactgaattttgaggctgctcagaaggcttgtttggacgttggggcagtcatagcaactccagagcagctctttgctgcctatgaagatggatttgagcagtgtgacgcaggctggctggctgatcagactgtcagatatcccatccgggctcccagagtaggctgttatggagataagatgggaaaggcaggagtcaggacttatggattccgttctccccaggaaacttacgatgtgtattgttatgtggatcatctggatggtgatgtgttccacctcactgtccccagtaaattcaccttcgaggaggctgcaaaagagtgtgaaaaccaggatgccaggctggcaacagtgggggaactccaggcggcatggaggaacggctttgaccagtgcgattacgggtggctgtcggatgccagcgtgcgccaccctgtgactgtggccagggcccagtgtggaggtggtctacttggggtgagaaccctgtatcgttttgagaaccagacaggcttccctccccctgatagcagatttgatgcctactgctttaaacgtcgaatgagtgatttgagtgtaattggtcatccaatagattcagaatctaaagaagatgaaccttgtagtgaagaaacagatccagtgcatgatctaatggctgaaattttacctgaattccctgacataattgaaatagacctataccacagtgaagaaaatgaagaagaagaagaagagtgtgcaaatgctactgatgtgacaaccaccccatctgtgcagtacataaatgggaagcatctcgttaccactgtgcccaaggacccagaagctgcagaagctaggcgtggccagtttgaaagtgttgcaccttctcaaaatttctcggacagctctgaaagtgatactcatccatttgtaatagccaaaacggaattgtctactgctgtgcaacctaatgaatctacagaaacaactgagtctcttgaagttacatggaagcctgagacttaccctgaaacatcagaacatttttcaggtggtgagcctgatgttttccccacagtcccattccatgaggaatttgaaagtggaacagccaaaaaaggggcagaatcagtcacagagagagatactgaagttggtcatcaggcacatgaacatactgaacctgtatctctgtttcctgaagagtcttcaggagagattgccattgaccaagaatctcagaaaatagcctttgcaagggctacagaagtaacatttggtgaagaggtagaaaaaagtacttctgtcacatacactcccactatagttccaagttctgcatcagcatatgtttcagaggaagaagcagttaccctaataggaaatccttggccagatgacctgttgtctaccaaagaaagctgggtagaagcaactcctagacaagttgtagagctctcagggagttcttcgattccaattacagaaggctctggagaagcagaagaagatgaagatacaatgttcaccatggtaactgatttatcacagagaaatactactgatacactcattactttagacactagcaggataatcacagaaagcttttttgaggttcctgcaaccaccatttatccagtttctgaacaaccttctgcaaaagtggtgcctaccaagtttgtaagtgaaacagacacttctgagtggatttccagtaccactgttgaggaaaagaaaaggaaggaggaggagggaactacaggtacggcttctacatttgaggtatattcatctacacagagatcggatcaattaattttaccctttgaattagaaagtccaaatgtagctacatctagtgattcaggtaccaggaaaagttttatgtccttgacaacaccaacacagtctgaaagggaaatgacagattctactcctgtctttacagaaacaaatacattagaaaatttgggggcacagaccactgagcacagcagtatccatcaacctggggttcaggaagggctgaccactctcccacgtagtcctgcctctgtctttatggagcagggctctggagaagctgctgccgacccagaaaccaccactgtttcttcattttcattaaacgtagagtatgcaattcaagccgaaaaggaagtagctggcactttgtctccgcatgtggaaactacattctccactgagccaacaggactggttttgagtacagtaatggacagagtagttgctgaaaatataacccaaacatccagggaaatagtgatttcagagcgattaggagaaccaaattatggggcagaaataaggggcttttccacaggttttcctttggaggaagatttcagtggtgactttagagaatactcaacagtgtctcatcccatagcaaaagaagaaacggtaatgatggaaggctctggagatgcagcatttagggacacccagacttcaccatctacagtacctacttcagttcacatcagtcacatatctgactcagaaggacccagtagcaccatggtcagcacttcagccttcccctgggaagagtttacatcctcagctgagggctcaggtgagcaactggtcacagtcagcagctctgttgttccagtgcttcccagtgctgtgcaaaagttttctggtacagcttcctccattatcgacgaaggattgggagaagtgggtactgtcaatgaaattgatagaagatccaccattttaccaacagcagaagtggaaggtacgaaagctccagtagagaaggaggaagtaaaggtcagtggcacagtttcaacaaactttccccaaactatagagccagccaaattatggtctaggcaagaagtcaaccctgtaagacaagaaattgaaagtgaaacaacatcagaggaacaaattcaagaagaaaagtcatttgaatcccctcaaaactctcctgcaacagaacaaacaatctttgattcacagacatttactgaaactgaactcaaaaccacagattattctgtactaacaacaaagaaaacttacagtgatgataaagaaatgaaggaggaagacacttctttagttaacatgtctactccagatccagatgcaaatggcttggaatcttacacaactctccctgaagctactgaaaagtcacattttttcttagctactgcattagtaactgaatctataccagctgaacatgtagtcacagattcaccaatcaaaaaggaagaaagtacaaaacattttccgaaaggcatgaggccaacaattcaagagtcagatactgagctcttattctctggactgggatcaggagaagaagttttacctactctaccaacagagtcagtgaattttactgaagtggaacaaatcaataacacattatatccccacacttctcaagtggaaagtacctcaagtgacaaaattgaagactttaacagaatggaaaatgtggcaaaagaagttggaccactcgtatctcaaacagacatctttgaaggtagtgggtcagtaaccagcacaacattaatagaaattttaagtgacactggagcagaaggacccacggtggcacctctccctttctccacggacatcggacatcctcaaaatcagactgtcaggtgggcagaagaaatccagactagtagaccacaaaccataactgaacaagactctaacaagaattcttcaacagcagaaattaacgaaacaacaacctcatctactgattttctggctagagcttatggttttgaaatggccaaagaatttgttacatcagcaccaaaaccatctgacttgtattatgaaccttctggagaaggatctggagaagtggatattgttgattcatttcacacttctgcaactactcaggcaaccagacaagaaagcagcaccacatttgtttctgatgggtccctggaaaaacatcctgaggtgccaagcgctaaagctgttactgctgatggattcccaacagtttcagtgatgctgcctcttcattcagagcagaacaaaagctcccctgatccaactagcacactgtcaaatacagtgtcatatgagaggtccacagacggtagtttccaagaccgtttcagggaattcgaggattccaccttaaaacctaacagaaaaaaacccactgaaaatattatcatagacctggacaaagaggacaaggatttaatattgacaattacagagagtaccatccttgaaattctacctgagctgacatcggataaaaatactatcatagatattgatcatactaaacctgtgtatgaagacattcttggaatgcaaacagatatagatacagaggtaccatcagaaccacatgacagtaatgatgaaagtaatgatgacagcactcaagttcaagagatctatgaggcagctgtcaacctttctttaactgaggaaacatttgagggctctgctgatgttctggctagctacactcaggcaacacatgatgaatcaatgacttatgaagatagaagccaactagatcacatgggctttcacttcacaactgggatccctgctcctagcacagaaacagaattagacgttttacttcccacggcaacatccctgccaattcctcgtaagtctgccacagttattccagagattgaaggaataaaagctgaagcaaaagccctggatgacatgtttgaatcaagcactttgtctgatggtcaagctattgcagaccaaagtgaaataataccaacattgggccaatttgaaaggactcaggaggagtatgaagacaaaaaacatgctggtccttcttttcagccagaattctcttcaggagctgaggaggcattagtagaccatactccctatctaagtattgctactacccaccttatggatcagagtgtaacagaggtgcctgatgtgatggaaggatccaatcccccatattacactgatacaacattagcagtttcaacatttgcgaagttgtcttctcagacaccatcatctcccctcactatctactcaggcagtgaagcctctggacacacagagatcccccagcccagtgctctgccaggaatagacgtcggctcatctgtaatgtccccacaggattcttttaaggaaattcatgtaaatattgaagcgactttcaaaccatcaagtgaggaataccttcacataactgagcctccctctttatctcctgacacaaaattagaaccttcagaagatgatggtaaacctgagttattagaagaaatggaagcttctcccacagaacttattgctgtggaaggaactgagattctccaagatttccaaaacaaaaccgatggtcaagtttctggagaagcaatcaagatgtttcccaccattaaaacacctgaggctggaactgttattacaactgccgatgaaattgaattagaaggtgctacacagtggccacactctacttctgcttctgccacctatggggtcgaggcaggtgtggtgccttggctaagtccacagacttctgagaggcccacgctttcttcttctccagaaataaaccctgaaactcaagcagctttaatcagagggcaggattccacgatagcagcatcagaacagcaagtggcagcgagaattcttgattccaatgatcaggcaacagtaaaccctgtggaatttaatactgaggttgcaacaccaccattttcccttctggagacttctaatgaaacagatttcctgattggcattaatgaagagtcagtggaaggcacggcaatctatttaccaggacctgatcgctgcaaaatgaacccgtgccttaacggaggcacctgttatcctactgaaacttcctacgtatgcacctgtgtgccaggatacagcggagaccagtgtgaacttgattttgatgaatgtcactctaatccctgtcgtaatggagccacttgtgttgatggttttaacacattcaggtgcctctgccttccaagttatgttggtgcactttgtgagcaagataccgagacatgtgactatggctggcacaaattccaagggcagtgctacaaatactttgcccatcgacgcacatgggatgcagctgaacgggaatgccgtctgcagggtgcccatctcacaagcatcctgtctcacgaagaacaaatgtttgttaatcgtgtgggccatgattatcagtggataggcctcaatgacaagatgtttgagcatgacttccgttggactgatggcagcacactgcaatacgagaattggagacccaaccagccagacagcttcttttctgctggagaagactgtgttgtaatcatttggcatgagaatggccagtggaatgatgttccctgcaattaccatctcacctatacgtgcaagaaaggaacagttgcttgcggccagccccctgttgtagaaaatgccaagacctttggaaagatgaaacctcgttatgaaatcaactccctgattagataccactgcaaagatggtttcattcaacgtcaccttccaactatccggtgcttaggaaatggaagatgggctatacctaaaattacctgcatgaacccatctgcataccaaaggacttattctatgaaatactttaaaaattcctcatcagcaaaggacaattcaataaatacatccaaacatgatcatcgttggagccggaggtggcaggagtcgaggcgctgatccctaaaatggcgaacatgtgttttcatcatttcagccaaagtcctaacttcctgtgcctttcctatcacctcgagaagtaattatcagttggtttggatttttggaccaccgttcagtcattttgggttgccgtgctcccaaaacattttaaatgaaagtattggcattcaaaaagacagcagacaaaatgaaagaaaatgagagcagaaagtaagcatttccagcctatctaatttctttagttttctatttgcctccagtgcagtccatttcctaatgtataccagcctactgtactatttaaaatgctcaatttcagcaccgatggccatgtaaataagatgatttaatgttgattttaatcctgtatataaaataaaaagtcacaatgagtttgggcatatttaatgatgattatggagccttagaggtctttaatcattggttcggctgcttttatgtagtttaggctggaaatggtttcacttgctctttgactgtcagcaagactgaagatggcttttcctggacagctagaaaacacaaaatcttgtaggtcattgcacctatctcagccataggtgcagtttgcttctacatgatgctaaaggctgcgaatgggatcctgatggaactaaggactccaatgtcgaactcttctttgctgcattcctttttcttcacttacaagaaaggcctgaatggaggacttttctgtaaccaggaacattttttaggggtcaaagtgctaataattaactcaaccaggtctactttttaatggctttcataacactaactcataaggttaccgatcaatgcatttcatacggatatagacctagggctctggagggtgggggattgttaaaacacatgcaaaaaaaaaaaaaaaaaaagaaattttgtatatataaccattttaatcttttataaagttttgaatgttcatgtatgaatgctgcagctgtgaagcatacataaataaatgaagtaagccata

SEQ ID NO: 317225 - DNA, 9090 bp, Homo sapiens
gctgtccccaagccgattggtacttcttgtcaggaagaaacgccaagaggtgggagtgcctggggagggaggcaggcggtccctaccgcaggcgcggggagctgcctttccgcccctccgcctgctttccaagcctggactcttaggagtggctgaagctgcggagcgcttttggagcctgtgaatgaaccctcctcctctccctcctccttcttctcgctgagtctcctcctcggctctgacggtacagtgatataatgatgatgggtgtcacaacccgcatttgaacttgcaggcgagctgccccgagcctttctggggaagaactccaggcgtgcggacgcaacagccgagaacattaggtgttgtggacaggagctgggaccaagatcttcggccagccccgcatcctcccgcatcttccagcaccgtcccgcaccctccgcatccttccccgggccaccacgcttcctatgtgacccgcctgggcaacgccgaacccagtcgcgcagcgctgcagtgaattttccccccaaactgcaataagccgccttccaaggccaagatgttcataaatataaagagcatcttatggatgtgttcaaccttaatagtaacccatgcgctacataaagtcaaagtgggaaaaagcccaccggtgaggggctccctctctggaaaagtcagcctaccttgtcatttttcaacgatgcctactttgccacccagttacaacaccagtgaatttctccgcatcaaatggtctaagattgaagtggacaaaaatggaaaagatttgaaagagactactgtccttgtggcccaaaatggaaatatcaagattggtcaggactacaaagggagagtgtctgtgcccacacatcccgaggctgtgggcgatgcctccctcactgtggtcaagctgctggcaagtgatgcgggtctttaccgctgtgacgtcatgtacgggattgaagacacacaagacacggtgtcactgactgtggatggggttgtgtttcactacagggcggcaaccagcaggtacacactgaattttgaggctgctcagaaggcttgtttggacgttggggcagtcatagcaactccagagcagctctttgctgcctatgaagatggatttgagcagtgtgacgcaggctggctggctgatcagactgtcagatatcccatccgggctcccagagtaggctgttatggagataagatgggaaaggcaggagtcaggacttatggattccgttctccccaggaaacttacgatgtgtattgttatgtggatcatctggatggtgatgtgttccacctcactgtccccagtaaattcaccttcgaggaggctgcaaaagagtgtgaaaaccaggatgccaggctggcaacagtgggggaactccaggcggcatggaggaacggctttgaccagtgcgattacgggtggctgtcggatgccagcgtgcgccaccctgtgactgtggccagggcccagtgtggaggtggtctacttggggtgagaaccctgtatcgttttgagaaccagacaggcttccctccccctgatagcagatttgatgcctactgctttaaacgtcgaatgagtgatttgagtgtaattggtcatccaatagattcagaatctaaagaagatgaaccttgtagtgaagaaacagatccagtgcatgatctaatggctgaaattttacctgaattccctgacataattgaaatagacctataccacagtgaagaaaatgaagaagaagaagaagagtgtgcaaatgctactgatgtgacaaccaccccatctgtgcagtacataaatgggaagcatctcgttaccactgtgcccaaggacccagaagctgcagaagctaggcgtggccagtttgaaagtgttgcaccttctcaaaatttctcggacagctctgaaagtgatactcatccatttgtaatagccaaaacggaattgtctactgctgtgcaacctaatgaatctacagaaacaactgagtctcttgaagttacatggaagcctgagacttaccctgaaacatcagaacatttttcaggtggtgagcctgatgttttccccacagtcccattccatgaggaatttgaaagtggaacagccaaaaaaggggcagaatcagtcacagagagagatactgaagttggtcatcaggcacatgaacatactgaacctgtatctctgtttcctgaagagtcttcaggagagattgccattgaccaagaatctcagaaaatagcctttgcaagggctacagaagtaacatttggtgaagaggtagaaaaaagtacttctgtcacatacactcccactatagttccaagttctgcatcagcatatgtttcagaggaagaagcagttaccctaataggaaatccttggccagatgacctgttgtctaccaaagaaagctgggtagaagcaactcctagacaagttgtagagctctcagggagttcttcgattccaattacagaaggctctggagaagcagaagaagatgaagatacaatgttcaccatggtaactgatttatcacagagaaatactactgatacactcattactttagacactagcaggataatcacagaaagcttttttgaggttcctgcaaccaccatttatccagtttctgaacaaccttctgcaaaagtggtgcctaccaagtttgtaagtgaaacagacacttctgagtggatttccagtaccactgttgaggaaaagaaaaggaaggaggaggagggaactacaggtacggcttctacatttgaggtatattcatctacacagagatcggatcaattaattttaccctttgaattagaaagtccaaatgtagctacatctagtgattcaggtaccaggaaaagttttatgtccttgacaacaccaacacagtctgaaagggaaatgacagattctactcctgtctttacagaaacaaatacattagaaaatttgggggcacagaccactgagcacagcagtatccatcaacctggggttcaggaagggctgaccactctcccacgtagtcctgcctctgtctttatggagcagggctctggagaagctgctgccgacccagaaaccaccactgtttcttcattttcattaaacgtagagtatgcaattcaagccgaaaaggaagtagctggcactttgtctccgcatgtggaaactacattctccactgagccaacaggactggttttgagtacagtaatggacagagtagttgctgaaaatataacccaaacatccagggaaatagtgatttcagagcgattaggagaaccaaattatggggcagaaataaggggcttttccacaggttttcctttggaggaagatttcagtggtgactttagagaatactcaacagtgtctcatcccatagcaaaagaagaaacggtaatgatggaaggctctggagatgcagcatttagggacacccagacttcaccatctacagtacctacttcagttcacatcagtcacatatctgactcagaaggacccagtagcaccatggtcagcacttcagccttcccctgggaagagtttacatcctcagctgagggctcaggtgagcaactggtcacagtcagcagctctgttgttccagtgcttcccagtgctgtgcaaaagttttctggtacagcttcctccattatcgacgaaggattgggagaagtgggtactgtcaatgaaattgatagaagatccaccattttaccaacagcagaagtggaaggtacgaaagctccagtagagaaggaggaagtaaaggtcagtggcacagtttcaacaaactttccccaaactatagagccagccaaattatggtctaggcaagaagtcaaccctgtaagacaagaaattgaaagtgaaacaacatcagaggaacaaattcaagaagaaaagtcatttgaatcccctcaaaactctcctgcaacagaacaaacaatctttgattcacagacatttactgaaactgaactcaaaaccacagattattctgtactaacaacaaagaaaacttacagtgatgataaagaaatgaaggaggaagacacttctttagttaacatgtctactccagatccagatgcaaatggcttggaatcttacacaactctccctgaagctactgaaaagtcacattttttcttagctactgcattagtaactgaatctataccagctgaacatgtagtcacagattcaccaatcaaaaaggaagaaagtacaaaacattttccgaaaggcatgaggccaacaattcaagagtcagatactgagctcttattctctggactgggatcaggagaagaagttttacctactctaccaacagagtcagtgaattttactgaagtggaacaaatcaataacacattatatccccacacttctcaagtggaaagtacctcaagtgacaaaattgaagactttaacagaatggaaaatgtggcaaaagaagttggaccactcgtatctcaaacagacatctttgaaggtagtgggtcagtaaccagcacaacattaatagaaattttaagtgacactggagcagaaggacccacggtggcacctctccctttctccacggacatcggacatcctcaaaatcagactgtcaggtgggcagaagaaatccagactagtagaccacaaaccataactgaacaagactctaacaagaattcttcaacagcagaaattaacgaaacaacaacctcatctactgattttctggctagagcttatggttttgaaatggccaaagaatttgttacatcagcaccaaaaccatctgacttgtattatgaaccttctggagaaggatctggagaagtggatattgttgattcatttcacacttctgcaactactcaggcaaccagacaagaaagcagcaccacatttgtttctgatgggtccctggaaaaacatcctgaggtgccaagcgctaaagctgttactgctgatggattcccaacagtttcagtgatgctgcctcttcattcagagcagaacaaaagctcccctgatccaactagcacactgtcaaatacagtgtcatatgagaggtccacagacggtagtttccaagaccgtttcagggaattcgaggattccaccttaaaacctaacagaaaaaaacccactgaaaatattatcatagacctggacaaagaggacaaggatttaatattgacaattacagagagtaccatccttgaaattctacctgagctgacatcggataaaaatactatcatagatattgatcatactaaacctgtgtatgaagacattcttggaatgcaaacagatatagatacagaggtaccatcagaaccacatgacagtaatgatgaaagtaatgatgacagcactcaagttcaagagatctatgaggcagctgtcaacctttctttaactgaggaaacatttgagggctctgctgatgttctggctagctacactcaggcaacacatgatgaatcaatgacttatgaagatagaagccaactagatcacatgggctttcacttcacaactgggatccctgctcctagcacagaaacagaattagacgttttacttcccacggcaacatccctgccaattcctcgtaagtctgccacagttattccagagattgaaggaataaaagctgaagcaaaagccctggatgacatgtttgaatcaagcactttgtctgatggtcaagctattgcagaccaaagtgaaataataccaacattgggccaatttgaaaggactcaggaggagtatgaagacaaaaaacatgctggtccttcttttcagccagaattctcttcaggagctgaggaggcattagtagaccatactccctatctaagtattgctactacccaccttatggatcagagtgtaacagaggtgcctgatgtgatggaaggatccaatcccccatattacactgatacaacattagcagtttcaacatttgcgaagttgtcttctcagacaccatcatctcccctcactatctactcaggcagtgaagcctctggacacacagagatcccccagcccagtgctctgccaggaatagacgtcggctcatctgtaatgtccccacaggattcttttaaggaaattcatgtaaatattgaagcgactttcaaaccatcaagtgaggaataccttcacataactgagcctccctctttatctcctgacacaaaattagaaccttcagaagatgatggtaaacctgagttattagaagaaatggaagcttctcccacagaacttattgctgtggaaggaactgagattctccaagatttccaaaacaaaaccgatggtcaagtttctggagaagcaatcaagatgtttcccaccattaaaacacctgaggctggaactgttattacaactgccgatgaaattgaattagaaggtgctacacagtggccacactctacttctgcttctgccacctatggggtcgaggcaggtgtggtgccttggctaagtccacagacttctgagaggcccacgctttcttcttctccagaaataaaccctgaaactcaagcagctttaatcagagggcaggattccacgatagcagcatcagaacagcaagtggcagcgagaattcttgattccaatgatcaggcaacagtaaaccctgtggaatttaatactgaggttgcaacaccaccattttcccttctggagacttctaatgaaacagatttcctgattggcattaatgaagagtcagtggaaggcacggcaatctatttaccaggacctgatcgctgcaaaatgaacccgtgccttaacggaggcacctgttatcctactgaaacttcctacgtatgcacctgtgtgccaggatacagcggagaccagtgtgaacttgattttgatgaatgtcactctaatccctgtcgtaatggagccacttgtgttgatggttttaacacattcaggtgcctctgccttccaagttatgttggtgcactttgtgagcaagataccgagacatgtgactatggctggcacaaattccaagggcagtgctacaaatactttgcccatcgacgcacatgggatgcagctgaacgggaatgccgtctgcagggtgcccatctcacaagcatcctgtctcacgaagaacaaatgtttgttaatcgtgtgggccatgattatcagtggataggcctcaatgacaagatgtttgagcatgacttccgttggactgatggcagcacactgcaatacgagaattggagacccaaccagccagacagcttcttttctgctggagaagactgtgttgtaatcatttggcatgagaatggccagtggaatgatgttccctgcaattaccatctcacctatacgtgcaagaaaggaacagttgcttgcggccagccccctgttgtagaaaatgccaagacctttggaaagatgaaacctcgttatgaaatcaactccctgattagataccactgcaaagatggtttcattcaacgtcaccttccaactatccggtgcttaggaaatggaagatgggctatacctaaaattacctgcatgaacccatctgcataccaaaggacttattctatgaaatactttaaaaattcctcatcagcaaaggacaattcaataaatacatccaaacatgatcatcgttggagccggaggtggcaggagtcgaggcgctgatccctaaaatggcgaacatgtgttttcatcatttcagccaaagtcctaacttcctgtgcctttcctatcacctcgagaagtaattatcagttggtttggatttttggaccaccgttcagtcattttgggttgccgtgctcccaaaacattttaaatgaaagtattggcattcaaaaagacagcagacaaaatgaaagaaaatgagagcagaaagtaagcatttccagcctatctaatttctttagttttctatttgcctccagtgcagtccatttcctaatgtataccagcctactgtactatttaaaatgctcaatttcagcaccgatggccatgtaaataagatgatttaatgttgattttaatcctgtatataaaataaaaagtcacaatgagtttgggcatatttaatgatgattatggagccttagaggtctttaatcattggttcggctgcttttatgtagtttaggctggaaatggtttcacttgctctttgactgtcagcaagactgaagatggcttttcctggacagctagaaaacacaaaatcttgtaggtcattgcacctatctcagccataggtgcagtttgcttctacatgatgctaaaggctgcgaatgggatcctgatggaactaaggactccaatgtcgaactcttctttgctgcattcctttttcttcacttacaagaaaggcctgaatggaggacttttctgtaaccaggaacattttttaggggtcaaagtgctaataattaactcaaccaggtctactttttaatggctttcataacactaactcataaggttaccgatcaatgcatttcatacggatatagacctagggctctggagggtgggggattgttaaaacacatgcaaaaaaaaaaaaaaaaaaagaaattttgtatatataaccattttaatcttttataaagttttgaatgttcatgtatgaatgctgcagctgtgaagcatacataaataaatgaagtaagccatactgatttaatttattggatgttattttccctaagacctgaaaatgaacatagtatgctagttatttttcagtgttagccttttactttcctcacacaatttggaatcatataatataggtactttgtccctgattaaataatgtgacggatagaatgcatcaagtgtttattatgaaaagagtggaaaagtatatagcttttagcaaaaggtgtttgcccattctaagaaatgagcgaatatatagaaatagtttatgctgctaatacgggggatcctcatagacgtcg

SEQ ID NO: 317226 - DNA, 9072 bp, Homo sapiens
  misc_feature (8698)..(8698): n is a, c, g, or t
  misc_feature (8701)..(8701): n is a, c, g, or t
  misc_feature (8705)..(8705): n is a, c, g, or t
gctgtccccaagccgattggtacttcttgtcaggaagaaacgccaagaggtgggagtgcctggggagggaggcaggcggtccctaccgcaggcgcggggagctgcctttccgcccctccgcctgctttccaagcctggactcttaggagtggctgaagctgcggagcgcttttggagcctgtgaatgaaccctcctcctctccctcctccttcttctcgctgagtctcctcctcggctctgacggtacagtgatataatgatgatgggtgtcacaacccgcatttgaacttgcaggcgagctgccccgagcctttctggggaagaactccaggcgtgcggacgcaacagccgagaacattaggtgttgtggacaggagctgggaccaagatcttcggccagccccgcatcctcccgcatcttccagcaccgtcccgcaccctccgcatccttccccgggccaccacgcttcctatgtgacccgcctgggcaacgccgaacccagtcgcgcagcgctgcagtgaattttccccccaaactgcaataagccgccttccaaggccaagatgttcataaatataaagagcatcttatggatgtgttcaaccttaatagtaacccatgcgctacataaagtcaaagtgggaaaaagcccaccggtgaggggctccctctctggaaaagtcagcctaccttgtcatttttcaacgatgcctactttgccacccagttacaacaccagtgaatttctccgcatcaaatggtctaagattgaagtggacaaaaatggaaaagatttgaaagagactactgtccttgtggcccaaaatggaaatatcaagattggtcaggactacaaagggagagtgtctgtgcccacacatcccgaggctgtgggcgatgcctccctcactgtggtcaagctgctggcaagtgatgcgggtctttaccgctgtgacgtcatgtacgggattgaagacacacaagacacggtgtcactgactgtggatggggttgtgtttcactacagggcggcaaccagcaggtacacactgaattttgaggctgctcagaaggcttgtttggacgttggggcagtcatagcaactccagagcagctctttgctgcctatgaagatggatttgagcagtgtgacgcaggctggctggctgatcagactgtcagatatcccatccgggctcccagagtaggctgttatggagataagatgggaaaggcaggagtcaggacttatggattccgttctccccaggaaacttacgatgtgtattgttatgtggatcatctggatggtgatgtgttccacctcactgtccccagtaaattcaccttcgaggaggctgcaaaagagtgtgaaaaccaggatgccaggctggcaacagtgggggaactccaggcggcatggaggaacggctttgaccagtgcgattacgggtggctgtcggatgccagcgtgcgccaccctgtgactgtggccagggcccagtgtggaggtggtctacttggggtgagaaccctgtatcgttttgagaaccagacaggcttccctccccctgatagcagatttgatgcctactgctttaaacgtcgaatgagtgatttgagtgtaattggtcatccaatagattcagaatctaaagaagatgaaccttgtagtgaagaaacagatccagtgcatgatctaatggctgaaattttacctgaattccctgacataattgaaatagacctataccacagtgaagaaaatgaagaagaagaagaagagtgtgcaaatgctactgatgtgacaaccaccccatctgtgcagtacataaatgggaagcatctcgttaccactgtgcccaaggacccagaagctgcagaagctaggcgtggccagtttgaaagtgttgcaccttctcaaaatttctcggacagctctgaaagtgatactcatccatttgtaatagccaaaacggaattgtctactgctgtgcaacctaatgaatctacagaaacaactgagtctcttgaagttacatggaagcctgagacttaccctgaaacatcagaacatttttcaggtggtgagcctgatgttttccccacagtcccattccatgaggaatttgaaagtggaacagccaaaaaaggggcagaatcagtcacagagagagatactgaagttggtcatcaggcacatgaacatactgaacctgtatctctgtttcctgaagagtcttcaggagagattgccattgaccaagaatctcagaaaatagcctttgcaagggctacagaagtaacatttggtgaagaggtagaaaaaagtacttctgtcacatacactcccactatagttccaagttctgcatcagcatatgtttcagaggaagaagcagttaccctaataggaaatccttggccagatgacctgttgtctaccaaagaaagctgggtagaagcaactcctagacaagttgtagagctctcagggagttcttcgattccaattacagaaggctctggagaagcagaagaagatgaagatacaatgttcaccatggtaactgatttatcacagagaaatactactgatacactcattactttagacactagcaggataatcacagaaagcttttttgaggttcctgcaaccaccatttatccagtttctgaacaaccttctgcaaaagtggtgcctaccaagtttgtaagtgaaacagacacttctgagtggatttccagtaccactgttgaggaaaagaaaaggaaggaggaggagggaactacaggtacggcttctacatttgaggtatattcatctacacagagatcggatcaattaattttaccctttgaattagaaagtccaaatgtagctacatctagtgattcaggtaccaggaaaagttttatgtccttgacaacaccaacacagtctgaaagggaaatgacagattctactcctgtctttacagaaacaaatacattagaaaatttgggggcacagaccactgagcacagcagtatccatcaacctggggttcaggaagggctgaccactctcccacgtagtcctgcctctgtctttatggagcagggctctggagaagctgctgccgacccagaaaccaccactgtttcttcattttcattaaacgtagagtatgcaattcaagccgaaaaggaagtagctggcactttgtctccgcatgtggaaactacattctccactgagccaacaggactggttttgagtacagtaatggacagagtagttgctgaaaatataacccaaacatccagggaaatagtgatttcagagcgattaggagaaccaaattatggggcagaaataaggggcttttccacaggttttcctttggaggaagatttcagtggtgactttagagaatactcaacagtgtctcatcccatagcaaaagaagaaacggtaatgatggaaggctctggagatgcagcatttagggacacccagacttcaccatctacagtacctacttcagttcacatcagtcacatatctgactcagaaggacccagtagcaccatggtcagcacttcagccttcccctgggaagagtttacatcctcagctgagggctcaggtgagcaactggtcacagtcagcagctctgttgttccagtgcttcccagtgctgtgcaaaagttttctggtacagcttcctccattatcgacgaaggattgggagaagtgggtactgtcaatgaaattgatagaagatccaccattttaccaacagcagaagtggaaggtacgaaagctccagtagagaaggaggaagtaaaggtcagtggcacagtttcaacaaactttccccaaactatagagccagccaaattatggtctaggcaagaagtcaaccctgtaagacaagaaattgaaagtgaaacaacatcagaggaacaaattcaagaagaaaagtcatttgaatcccctcaaaactctcctgcaacagaacaaacaatctttgattcacagacatttactgaaactgaactcaaaaccacagattattctgtactaacaacaaagaaaacttacagtgatgataaagaaatgaaggaggaagacacttctttagttaacatgtctactccagatccagatgcaaatggcttggaatcttacacaactctccctgaagctactgaaaagtcacattttttcttagctactgcattagtaactgaatctataccagctgaacatgtagtcacagattcaccaatcaaaaaggaagaaagtacaaaacattttccgaaaggcatgaggccaacaattcaagagtcagatactgagctcttattctctggactgggatcaggagaagaagttttacctactctaccaacagagtcagtgaattttactgaagtggaacaaatcaataacacattatatccccacacttctcaagtggaaagtacctcaagtgacaaaattgaagactttaacagaatggaaaatgtggcaaaagaagttggaccactcgtatctcaaacagacatctttgaaggtagtgggtcagtaaccagcacaacattaatagaaattttaagtgacactggagcagaaggacccacggtggcacctctccctttctccacggacatcggacatcctcaaaatcagactgtcaggtgggcagaagaaatccagactagtagaccacaaaccataactgaacaagactctaacaagaattcttcaacagcagaaattaacgaaacaacaacctcatctactgattttctggctagagcttatggttttgaaatggccaaagaatttgttacatcagcaccaaaaccatctgacttgtattatgaaccttctggagaaggatctggagaagtggatattgttgattcatttcacacttctgcaactactcaggcaaccagacaagaaagcagcaccacatttgtttctgatgggtccctggaaaaacatcctgaggtgccaagcgctaaagctgttactgctgatggattcccaacagtttcagtgatgctgcctcttcattcagagcagaacaaaagctcccctgatccaactagcacactgtcaaatacagtgtcatatgagaggtccacagacggtagtttccaagaccgtttcagggaattcgaggattccaccttaaaacctaacagaaaaaaacccactgaaaatattatcatagacctggacaaagaggacaaggatttaatattgacaattacagagagtaccatccttgaaattctacctgagctgacatcggataaaaatactatcatagatattgatcatactaaacctgtgtatgaagacattcttggaatgcaaacagatatagatacagaggtaccatcagaaccacatgacagtaatgatgaaagtaatgatgacagcactcaagttcaagagatctatgaggcagctgtcaacctttctttaactgaggaaacatttgagggctctgctgatgttctggctagctacactcaggcaacacatgatgaatcaatgacttatgaagatagaagccaactagatcacatgggctttcacttcacaactgggatccctgctcctagcacagaaacagaattagacgttttacttcccacggcaacatccctgccaattcctcgtaagtctgccacagttattccagagattgaaggaataaaagctgaagcaaaagccctggatgacatgtttgaatcaagcactttgtctgatggtcaagctattgcagaccaaagtgaaataataccaacattgggccaatttgaaaggactcaggaggagtatgaagacaaaaaacatgctggtccttcttttcagccagaattctcttcaggagctgaggaggcattagtagaccatactccctatctaagtattgctactacccaccttatggatcagagtgtaacagaggtgcctgatgtgatggaaggatccaatcccccatattacactgatacaacattagcagtttcaacatttgcgaagttgtcttctcagacaccatcatctcccctcactatctactcaggcagtgaagcctctggacacacagagatcccccagcccagtgctctgccaggaatagacgtcggctcatctgtaatgtccccacaggattcttttaaggaaattcatgtaaatattgaagcgactttcaaaccatcaagtgaggaataccttcacataactgagcctccctctttatctcctgacacaaaattagaaccttcagaagatgatggtaaacctgagttattagaagaaatggaagcttctcccacagaacttattgctgtggaaggaactgagattctccaagatttccaaaacaaaaccgatggtcaagtttctggagaagcaatcaagatgtttcccaccattaaaacacctgaggctggaactgttattacaactgccgatgaaattgaattagaaggtgctacacagtggccacactctacttctgcttctgccacctatggggtcgaggcaggtgtggtgccttggctaagtccacagacttctgagaggcccacgctttcttcttctccagaaataaaccctgaaactcaagcagctttaatcagagggcaggattccacgatagcagcatcagaacagcaagtggcagcgagaattcttgattccaatgatcaggcaacagtaaaccctgtggaatttaatactgaggttgcaacaccaccattttcccttctggagacttctaatgaaacagatttcctgattggcattaatgaagagtcagtggaaggcacggcaatctatttaccaggacctgatcgctgcaaaatgaacccgtgccttaacggaggcacctgttatcctactgaaacttcctacgtatgcacctgtgtgccaggatacagcggagaccagtgtgaacttgattttgatgaatgtcactctaatccctgtcgtaatggagccacttgtgttgatggttttaacacattcaggtgcctctgccttccaagttatgttggtgcactttgtgagcaagataccgagacatgtgactatggctggcacaaattccaagggcagtgctacaaatactttgcccatcgacgcacatgggatgcagctgaacgggaatgccgtctgcagggtgcccatctcacaagcatcctgtctcacgaagaacaaatgtttgttaatcgtgtgggccatgattatcagtggataggcctcaatgacaagatgtttgagcatgacttccgttggactgatggcagcacactgcaatacgagaattggagacccaaccagccagacagcttcttttctgctggagaagactgtgttgtaatcatttggcatgagaatggccagtggaatgatgttccctgcaattaccatctcacctatacgtgcaagaaaggaacagttgcttgcggccagccccctgttgtagaaaatgccaagacctttggaaagatgaaacctcgttatgaaatcaactccctgattagataccactgcaaagatggtttcattcaacgtcaccttccaactatccggtgcttaggaaatggaagatgggctatacctaaaattacctgcatgaacccatctgcataccaaaggacttattctatgaaatactttaaaaattcctcatcagcaaaggacaattcaataaatacatccaaacatgatcatcgttggagccggaggtggcaggagtcgaggcgctgatccctaaaatggcgaacatgtgttttcatcatttcagccaaagtcctaacttcctgtgcctttcctatcacctcgagaagtaattatcagttggtttggatttttggaccaccgttcagtcattttgggttgccgtgctcccaaaacattttaaatgaaagtattggcattcaaaaagacagcagacaaaatgaaagaaaatgagagcagaaagtaagcatttccagcctatctaatttctttagttttctatttgcctccagtgcagtccatttcctaatgtataccagcctactgtactatttaaaatgctcaatttcagcaccgatggccatgtaaataagatgatttaatgttgattttaatcctgtatataaaataaaaagtcacaatgagtttgggcatatttaatgatgattatggagccttagaggtctttaatcattggttcggctgcttttatgtagtttaggctggaaatggtttcacttgctctttgactgtcagcaagactgaagatggcttttcctggacagctagaaaacacaaaatcttgtaggtcattgcacctatctcagccataggtgcagtttgcttctacatgatgctaaaggctgcgaatgggatcctgatggaactaaggactccaatgtcgaactcttctttgctgcattcctttttcttcacttacaagaaaggcctgaatggaggacttttctgtaaccaggaacattttttaggggtcaaagtgctaataattaactcaaccaggtctactttttaatggctttcataacactaactcataaggttaccgatcaatgcatttcatacggatatagacctagggctctggagggtgggggattgttaaaacacatgcaaaaaaaaaaaaaaaaaaanaantttnggtttttttcccctttaactttaaaaagggtttgggaagtggtccccgtgtttgtcaatttgcggccgcgtgtgagccatacattaatattaatataagtaaccgccaatccgggttacacttagtgggcgtgtatttcccctaaaaccctgagagataggacattagattggcaaaggtaatttccacgaggtgagcgcttttaatttccctcacccatgtcgggatccctttaactaaacgggcgttgggcccccgataaaaaagtgggcggagaaaaggcgccagcgggttctgacacgcggcgacatttttcgtttccccaggtgtgtgcgctttaaaaggcgatataaaagggggagttcgg

SEQ ID NO: 317227 - DNA, 8715 bp, Homo sapiens
gctgtccccaagccgattggtacttcttgtcaggaagaaacgccaagaggtgggagtgcctggggagggaggcaggcggtccctaccgcaggcgcggggagctgcctttccgcccctccgcctgctttccaagcctggactcttaggagtggctgaagctgcggagcgcttttggagcctgtgaatgaaccctcctcctctccctcctccttcttctcgctgagtctcctcctcggctctgacggtacagtgatataatgatgatgggtgtcacaacccgcatttgaacttgcaggcgagctgccccgagcctttctggggaagaactccaggcgtgcggacgcaacagccgagaacattaggtgttgtggacaggagctgggaccaagatcttcggccagccccgcatcctcccgcatcttccagcaccgtcccgcaccctccgcatccttccccgggccaccacgcttcctatgtgacccgcctgggcaacgccgaacccagtcgcgcagcgctgcagtgaattttccccccaaactgcaataagccgccttccaaggccaagatgttcataaatataaagagcatcttatggatgtgttcaaccttaatagtaacccatgcgctacataaagtcaaagtgggaaaaagcccaccggtgaggggctccctctctggaaaagtcagcctaccttgtcatttttcaacgatgcctactttgccacccagttacaacaccagtgaatttctccgcatcaaatggtctaagattgaagtggacaaaaatggaaaagatttgaaagagactactgtccttgtggcccaaaatggaaatatcaagattggtcaggactacaaagggagagtgtctgtgcccacacatcccgaggctgtgggcgatgcctccctcactgtggtcaagctgctggcaagtgatgcgggtctttaccgctgtgacgtcatgtacgggattgaagacacacaagacacggtgtcactgactgtggatggggttgtgtttcactacagggcggcaaccagcaggtacacactgaattttgaggctgctcagaaggcttgtttggacgttggggcagtcatagcaactccagagcagctctttgctgcctatgaagatggatttgagcagtgtgacgcaggctggctggctgatcagactgtcagatatcccatccgggctcccagagtaggctgttatggagataagatgggaaaggcaggagtcaggacttatggattccgttctccccaggaaacttacgatgtgtattgttatgtggatcatctggatggtgatgtgttccacctcactgtccccagtaaattcaccttcgaggaggctgcaaaagagtgtgaaaaccaggatgccaggctggcaacagtgggggaactccaggcggcatggaggaacggctttgaccagtgcgattacgggtggctgtcggatgccagcgtgcgccaccctgtgactgtggccagggcccagtgtggaggtggtctacttggggtgagaaccctgtatcgttttgagaaccagacaggcttccctccccctgatagcagatttgatgcctactgctttaaacgtcgaatgagtgatttgagtgtaattggtcatccaatagattcagaatctaaagaagatgaaccttgtagtgaagaaacagatccagtgcatgatctaatggctgaaattttacctgaattccctgacataattgaaatagacctataccacagtgaagaaaatgaagaagaagaagaagagtgtgcaaatgctactgatgtgacaaccaccccatctgtgcagtacataaatgggaagcatctcgttaccactgtgcccaaggacccagaagctgcagaagctaggcgtggccagtttgaaagtgttgcaccttctcaaaatttctcggacagctctgaaagtgatactcatccatttgtaatagccaaaacggaattgtctactgctgtgcaacctaatgaatctacagaaacaactgagtctcttgaagttacatggaagcctgagacttaccctgaaacatcagaacatttttcaggtggtgagcctgatgttttccccacagtcccattccatgaggaatttgaaagtggaacagccaaaaaaggggcagaatcagtcacagagagagatactgaagttggtcatcaggcacatgaacatactgaacctgtatctctgtttcctgaagagtcttcaggagagattgccattgaccaagaatctcagaaaatagcctttgcaagggctacagaagtaacatttggtgaagaggtagaaaaaagtacttctgtcacatacactcccactatagttccaagttctgcatcagcatatgtttcagaggaagaagcagttaccctaataggaaatccttggccagatgacctgttgtctaccaaagaaagctgggtagaagcaactcctagacaagttgtagagctctcagggagttcttcgattccaattacagaaggctctggagaagcagaagaagatgaagatacaatgttcaccatggtaactgatttatcacagagaaatactactgatacactcattactttagacactagcaggataatcacagaaagcttttttgaggttcctgcaaccaccatttatccagtttctgaacaaccttctgcaaaagtggtgcctaccaagtttgtaagtgaaacagacacttctgagtggatttccagtaccactgttgaggaaaagaaaaggaaggaggaggagggaactacaggtacggcttctacatttgaggtatattcatctacacagagatcggatcaattaattttaccctttgaattagaaagtccaaatgtagctacatctagtgattcaggtaccaggaaaagttttatgtccttgacaacaccaacacagtctgaaagggaaatgacagattctactcctgtctttacagaaacaaatacattagaaaatttgggggcacagaccactgagcacagcagtatccatcaacctggggttcaggaagggctgaccactctcccacgtagtcctgcctctgtctttatggagcagggctctggagaagctgctgccgacccagaaaccaccactgtttcttcattttcattaaacgtagagtatgcaattcaagccgaaaaggaagtagctggcactttgtctccgcatgtggaaactacattctccactgagccaacaggactggttttgagtacagtaatggacagagtagttgctgaaaatataacccaaacatccagggaaatagtgatttcagagcgattaggagaaccaaattatggggcagaaataaggggcttttccacaggttttcctttggaggaagatttcagtggtgactttagagaatactcaacagtgtctcatcccatagcaaaagaagaaacggtaatgatggaaggctctggagatgcagcatttagggacacccagacttcaccatctacagtacctacttcagttcacatcagtcacatatctgactcagaaggacccagtagcaccatggtcagcacttcagccttcccctgggaagagtttacatcctcagctgagggctcaggtgagcaactggtcacagtcagcagctctgttgttccagtgcttcccagtgctgtgcaaaagttttctggtacagcttcctccattatcgacgaaggattgggagaagtgggtactgtcaatgaaattgatagaagatccaccattttaccaacagcagaagtggaaggtacgaaagctccagtagagaaggaggaagtaaaggtcagtggcacagtttcaacaaactttccccaaactatagagccagccaaattatggtctaggcaagaagtcaaccctgtaagacaagaaattgaaagtgaaacaacatcagaggaacaaattcaagaagaaaagtcatttgaatcccctcaaaactctcctgcaacagaacaaacaatctttgattcacagacatttactgaaactgaactcaaaaccacagattattctgtactaacaacaaagaaaacttacagtgatgataaagaaatgaaggaggaagacacttctttagttaacatgtctactccagatccagatgcaaatggcttggaatcttacacaactctccctgaagctactgaaaagtcacattttttcttagctactgcattagtaactgaatctataccagctgaacatgtagtcacagattcaccaatcaaaaaggaagaaagtacaaaacattttccgaaaggcatgaggccaacaattcaagagtcagatactgagctcttattctctggactgggatcaggagaagaagttttacctactctaccaacagagtcagtgaattttactgaagtggaacaaatcaataacacattatatccccacacttctcaagtggaaagtacctcaagtgacaaaattgaagactttaacagaatggaaaatgtggcaaaagaagttggaccactcgtatctcaaacagacatctttgaaggtagtgggtcagtaaccagcacaacattaatagaaattttaagtgacactggagcagaaggacccacggtggcacctctccctttctccacggacatcggacatcctcaaaatcagactgtcaggtgggcagaagaaatccagactagtagaccacaaaccataactgaacaagactctaacaagaattcttcaacagcagaaattaacgaaacaacaacctcatctactgattttctggctagagcttatggttttgaaatggccaaagaatttgttacatcagcaccaaaaccatctgacttgtattatgaaccttctggagaaggatctggagaagtggatattgttgattcatttcacacttctgcaactactcaggcaaccagacaagaaagcagcaccacatttgtttctgatgggtccctggaaaaacatcctgaggtgccaagcgctaaagctgttactgctgatggattcccaacagtttcagtgatgctgcctcttcattcagagcagaacaaaagctcccctgatccaactagcacactgtcaaatacagtgtcatatgagaggtccacagacggtagtttccaagaccgtttcagggaattcgaggattccaccttaaaacctaacagaaaaaaacccactgaaaatattatcatagacctggacaaagaggacaaggatttaatattgacaattacagagagtaccatccttgaaattctacctgagctgacatcggataaaaatactatcatagatattgatcatactaaacctgtgtatgaagacattcttggaatgcaaacagatatagatacagaggtaccatcagaaccacatgacagtaatgatgaaagtaatgatgacagcactcaagttcaagagatctatgaggcagctgtcaacctttctttaactgaggaaacatttgagggctctgctgatgttctggctagctacactcaggcaacacatgatgaatcaatgacttatgaagatagaagccaactagatcacatgggctttcacttcacaactgggatccctgctcctagcacagaaacagaattagacgttttacttcccacggcaacatccctgccaattcctcgtaagtctgccacagttattccagagattgaaggaataaaagctgaagcaaaagccctggatgacatgtttgaatcaagcactttgtctgatggtcaagctattgcagaccaaagtgaaataataccaacattgggccaatttgaaaggactcaggaggagtatgaagacaaaaaacatgctggtccttcttttcagccagaattctcttcaggagctgaggaggcattagtagaccatactccctatctaagtattgctactacccaccttatggatcagagtgtaacagaggtgcctgatgtgatggaaggatccaatcccccatattacactgatacaacattagcagtttcaacatttgcgaagttgtcttctcagacaccatcatctcccctcactatctactcaggcagtgaagcctctggacacacagagatcccccagcccagtgctctgccaggaatagacgtcggctcatctgtaatgtccccacaggattcttttaaggaaattcatgtaaatattgaagcgactttcaaaccatcaagtgaggaataccttcacataactgagcctccctctttatctcctgacacaaaattagaaccttcagaagatgatggtaaacctgagttattagaagaaatggaagcttctcccacagaacttattgctgtggaaggaactgagattctccaagatttccaaaacaaaaccgatggtcaagtttctggagaagcaatcaagatgtttcccaccattaaaacacctgaggctggaactgttattacaactgccgatgaaattgaattagaaggtgctacacagtggccacactctacttctgcttctgccacctatggggtcgaggcaggtgtggtgccttggctaagtccacagacttctgagaggcccacgctttcttcttctccagaaataaaccctgaaactcaagcagctttaatcagagggcaggattccacgatagcagcatcagaacagcaagtggcagcgagaattcttgattccaatgatcaggcaacagtaaaccctgtggaatttaatactgaggttgcaacaccaccattttcccttctggagacttctaatgaaacagatttcctgattggcattaatgaagagtcagtggaaggcacggcaatctatttaccaggacctgatcgctgcaaaatgaacccgtgccttaacggaggcacctgttatcctactgaaacttcctacgtatgcacctgtgtgccaggatacagcggagaccagtgtgaacttgattttgatgaatgtcactctaatccctgtcgtaatggagccacttgtgttgatggttttaacacattcaggtgcctctgccttccaagttatgttggtgcactttgtgagcaagataccgagacatgtgactatggctggcacaaattccaagggcagtgctacaaatactttgcccatcgacgcacatgggatgcagctgaacgggaatgccgtctgcagggtgcccatctcacaagcatcctgtctcacgaagaacaaatgtttgttaatcgtgtgggccatgattatcagtggataggcctcaatgacaagatgtttgagcatgacttccgttggactgatggcagcacactgcaatacgagaattggagacccaaccagccagacagcttcttttctgctggagaagactgtgttgtaatcatttggcatgagaatggccagtggaatgatgttccctgcaattaccatctcacctatacgtgcaagaaaggaacagttgcttgcggccagccccctgttgtagaaaatgccaagacctttggaaagatgaaacctcgttatgaaatcaactccctgattagataccactgcaaagatggtttcattcaacgtcaccttccaactatccggtgcttaggaaatggaagatgggctatacctaaaattacctgcatgaacccatctgcataccaaaggacttattctatgaaatactttaaaaattcctcatcagcaaaggacaattcaataaatacatccaaacatgatcatcgttggagccggaggtggcaggagtcgaggcgctgatccctaaaatggcgaacatgtgttttcatcatttcagccaaagtcctaacttcctgtgcctttcctatcacctcgagaagtaattatcagttggtttggatttttggaccaccgttcagtcattttgggttgccgtgctcccaaaacattttaaatgaaagtattggcattcaaaaagacagcagacaaaatgaaagaaaatgagagcagaaagtaagcatttccagcctatctaatttctttagttttctatttgcctccagtgcagtccatttcctaatgtataccagcctactgtactatttaaaatgctcaatttcagcaccgatggccatgtaaataagatgatttaatgttgattttaatcctgtatataaaataaaaagtcacaatgagtttgggcatatttaatgatgattatggagccttagaggtctttaatcattggttcggctgcttttatgtagtttaggctggaaatggtttcacttgctctttgactgtcagcaagactgaagatggcttttcctggacagctagaaaacacaaaatcttgtaggtcattgcacctatctcagccataggtgcagtttgcttctacatgatgctaaaggctgcgaatgggatcctgatggaactaaggactccaatgtcgaactcttctttgctgcattcctttttcttcacttacaagaaaggcctgaatggaggacttttctgtaaccaggaacattttttaggggtcaaagtgctaataattaactcaaccaggtctactttttaatggctttcataacactaactcataaggttaccgatcaatgcatttcatacggatatagacctagggctctggagggtgggggattgttaaaacacatgcacagacccacaatgaattctgtatacagactctggtt

SEQ ID NO: 317228 - DNA, 8523 bp, Homo sapiens
tcccccttttccacaggggtggatcatctggatggtgatgtgttccacctcactgtccccagtaaattcaccttcgaggaggctgcaaaagagtgtgaaaaccaggatgccaggctggcaacagtgggggaactccaggcggcatggaggaacggctttgaccagtgcgattacgggtggctgtcggatgccagcgtgcgccaccctgtgactgtggccagggcccagtgtggaggtggtctacttggggtgagaaccctgtatcgttttgagaaccagacaggcttccctccccctgatagcagatttgatgcctactgctttaaacgtcgaatgagtgatttgagtgtaattggtcatccaatagattcagaatctaaagaagatgaaccttgtagtgaagaaacagatccagtgcatgatctaatggctgaaattttacctgaattccctgacataattgaaatagacctataccacagtgaagaaaatgaagaagaagaagaagagtgtgcaaatgctactgatgtgacaaccaccccatctgtgcagtacataaatgggaagcatctcgttaccactgtgcccaaggacccagaagctgcagaagctaggcgtggccagtttgaaagtgttgcaccttctcaaaatttctcggacagctctgaaagtgatactcatccatttgtaatagccaaaacggaattgtctactgctgtgcaacctaatgaatctacagaaacaactgagtctcttgaagttacatggaagcctgagacttaccctgaaacatcagaacatttttcaggtggtgagcctgatgttttccccacagtcccattccatgaggaatttgaaagtggaacagccaaaaaaggggcagaatcagtcacagagagagatactgaagttggtcatcaggcacatgaacatactgaacctgtatctctgtttcctgaagagtcttcaggagagattgccattgaccaagaatctcagaaaatagcctttgcaagggctacagaagtaacatttggtgaagaggtagaaaaaagtacttctgtcacatacactcccactatagttccaagttctgcatcagcatatgtttcagaggaagaagcagttaccctaataggaaatccttggccagatgacctgttgtctaccaaagaaagctgggtagaagcaactcctagacaagttgtagagctctcagggagttcttcgattccaattacagaaggctctggagaagcagaagaagatgaagatacaatgttcaccatggtaactgatttatcacagagaaatactactgatacactcattactttagacactagcaggataatcacagaaagcttttttgaggttcctgcaaccaccatttatccagtttctgaacaaccttctgcaaaagtggtgcctaccaagtttgtaagtgaaacagacacttctgagtggatttccagtaccactgttgaggaaaagaaaaggaaggaggaggagggaactacaggtacggcttctacatttgaggtatattcatctacacagagatcggatcaattaattttaccctttgaattagaaagtccaaatgtagctacatctagtgattcaggtaccaggaaaagttttatgtccttgacaacaccaacacagtctgaaagggaaatgacagattctactcctgtctttacagaaacaaatacattagaaaatttgggggcacagaccactgagcacagcagtatccatcaacctggggttcaggaagggctgaccactctcccacgtagtcctgcctctgtctttatggagcagggctctggagaagctgctgccgacccagaaaccaccactgtttcttcattttcattaaacgtagagtatgcaattcaagccgaaaaggaagtagctggcactttgtctccgcatgtggaaactacattctccactgagccaacaggactggttttgagtacagtaatggacagagtagttgctgaaaatataacccaaacatccagggaaatagtgatttcagagcgattaggagaaccaaattatggggcagaaataaggggcttttccacaggttttcctttggaggaagatttcagtggtgactttagagaatactcaacagtgtctcatcccatagcaaaagaagaaacggtaatgatggaaggctctggagatgcagcatttagggacacccagacttcaccatctacagtacctacttcagttcacatcagtcacatatctgactcagaaggacccagtagcaccatggtcagcacttcagccttcccctgggaagagtttacatcctcagctgagggctcaggtgagcaactggtcacagtcagcagctctgttgttccagtgcttcccagtgctgtgcaaaagttttctggtacagcttcctccattatcgacgaaggattgggagaagtgggtactgtcaatgaaattgatagaagatccaccattttaccaacagcagaagtggaaggtacgaaagctccagtagagaaggaggaagtaaaggtcagtggcacagtttcaacaaactttccccaaactatagagccagccaaattatggtctaggcaagaagtcaaccctgtaagacaagaaattgaaagtgaaacaacatcagaggaacaaattcaagaagaaaagtcatttgaatcccctcaaaactctcctgcaacagaacaaacaatctttgattcacagacatttactgaaactgaactcaaaaccacagattattctgtactaacaacaaagaaaacttacagtgatgataaagaaatgaaggaggaagacacttctttagttaacatgtctactccagatccagatgcaaatggcttggaatcttacacaactctccctgaagctactgaaaagtcacattttttcttagctactgcattagtaactgaatctataccagctgaacatgtagtcacagattcaccaatcaaaaaggaagaaagtacaaaacattttccgaaaggcatgaggccaacaattcaagagtcagatactgagctcttattctctggactgggatcaggagaagaagttttacctactctaccaacagagtcagtgaattttactgaagtggaacaaatcaataacacattatatccccacacttctcaagtggaaagtacctcaagtgacaaaattgaagactttaacagaatggaaaatgtggcaaaagaagttggaccactcgtatctcaaacagacatctttgaaggtagtgggtcagtaaccagcacaacattaatagaaattttaagtgacactggagcagaaggacccacggtggcacctctccctttctccacggacatcggacatcctcaaaatcagactgtcaggtgggcagaagaaatccagactagtagaccacaaaccataactgaacaagactctaacaagaattcttcaacagcagaaattaacgaaacaacaacctcatctactgattttctggctagagcttatggttttgaaatggccaaagaatttgttacatcagcaccaaaaccatctgacttgtattatgaaccttctggagaaggatctggagaagtggatattgttgattcatttcacacttctgcaactactcaggcaaccagacaagaaagcagcaccacatttgtttctgatgggtccctggaaaaacatcctgaggtgccaagcgctaaagctgttactgctgatggattcccaacagtttcagtgatgctgcctcttcattcagagcagaacaaaagctcccctgatccaactagcacactgtcaaatacagtgtcatatgagaggtccacagacggtagtttccaagaccgtttcagggaattcgaggattccaccttaaaacctaacagaaaaaaacccactgaaaatattatcatagacctggacaaagaggacaaggatttaatattgacaattacagagagtaccatccttgaaattctacctgagctgacatcggataaaaatactatcatagatattgatcatactaaacctgtgtatgaagacattcttggaatgcaaacagatatagatacagaggtaccatcagaaccacatgacagtaatgatgaaagtaatgatgacagcactcaagttcaagagatctatgaggcagctgtcaacctttctttaactgaggaaacatttgagggctctgctgatgttctggctagctacactcaggcaacacatgatgaatcaatgacttatgaagatagaagccaactagatcacatgggctttcacttcacaactgggatccctgctcctagcacagaaacagaattagacgttttacttcccacggcaacatccctgccaattcctcgtaagtctgccacagttattccagagattgaaggaataaaagctgaagcaaaagccctggatgacatgtttgaatcaagcactttgtctgatggtcaagctattgcagaccaaagtgaaataataccaacattgggccaatttgaaaggactcaggaggagtatgaagacaaaaaacatgctggtccttcttttcagccagaattctcttcaggagctgaggaggcattagtagaccatactccctatctaagtattgctactacccaccttatggatcagagtgtaacagaggtgcctgatgtgatggaaggatccaatcccccatattacactgatacaacattagcagtttcaacatttgcgaagttgtcttctcagacaccatcatctcccctcactatctactcaggcagtgaagcctctggacacacagagatcccccagcccagtgctctgccaggaatagacgtcggctcatctgtaatgtccccacaggattcttttaaggaaattcatgtaaatattgaagcgactttcaaaccatcaagtgaggaataccttcacataactgagcctccctctttatctcctgacacaaaattagaaccttcagaagatgatggtaaacctgagttattagaagaaatggaagcttctcccacagaacttattgctgtggaaggaactgagattctccaagatttccaaaacaaaaccgatggtcaagtttctggagaagcaatcaagatgtttcccaccattaaaacacctgaggctggaactgttattacaactgccgatgaaattgaattagaaggtgctacacagtggccacactctacttctgcttctgccacctatggggtcgaggcaggtgtggtgccttggctaagtccacagacttctgagaggcccacgctttcttcttctccagaaataaaccctgaaactcaagcagctttaatcagagggcaggattccacgatagcagcatcagaacagcaagtggcagcgagaattcttgattccaatgatcaggcaacagtaaaccctgtggaatttaatactgaggttgcaacaccaccattttcccttctggagacttctaatgaaacagatttcctgattggcattaatgaagagtcagtggaaggcacggcaatctatttaccaggacctgatcgctgcaaaatgaacccgtgccttaacggaggcacctgttatcctactgaaacttcctacgtatgcacctgtgtgccaggatacagcggagaccagtgtgaacttgattttgatgaatgtcactctaatccctgtcgtaatggagccacttgtgttgatggttttaacacattcaggtgcctctgccttccaagttatgttggtgcactttgtgagcaagataccgagacatgtgactatggctggcacaaattccaagggcagtgctacaaatactttgcccatcgacgcacatgggatgcagctgaacgggaatgccgtctgcagggtgcccatctcacaagcatcctgtctcacgaagaacaaatgtttgttaatcgtgtgggccatgattatcagtggataggcctcaatgacaagatgtttgagcatgacttccgttggactgatggcagcacactgcaatacgagaattggagacccaaccagccagacagcttcttttctgctggagaagactgtgttgtaatcatttggcatgagaatggccagtggaatgatgttccctgcaattaccatctcacctatacgtgcaagaaaggaacagttgcttgcggccagccccctgttgtagaaaatgccaagacctttggaaagatgaaacctcgttatgaaatcaactccctgattagataccactgcaaagatggtttcattcaacgtcaccttccaactatccggtgcttaggaaatggaagatgggctatacctaaaattacctgcatgaacccatctgcataccaaaggacttattctatgaaatactttaaaaattcctcatcagcaaaggacaattcaataaatacatccaaacatgatcatcgttggagccggaggtggcaggagtcgaggcgctgatccctaaaatggcgaacatgtgttttcatcatttcagccaaagtcctaacttcctgtgcctttcctatcacctcgagaagtaattatcagttggtttggatttttggaccaccgttcagtcattttgggttgccgtgctcccaaaacattttaaatgaaagtattggcattcaaaaagacagcagacaaaatgaaagaaaatgagagcagaaagtaagcatttccagcctatctaatttctttagttttctatttgcctccagtgcagtccatttcctaatgtataccagcctactgtactatttaaaatgctcaatttcagcaccgatggccatgtaaataagatgatttaatgttgattttaatcctgtatataaaataaaaagtcacaatgagtttgggcatatttaatgatgattatggagccttagaggtctttaatcattggttcggctgcttttatgtagtttaggctggaaatggtttcacttgctctttgactgtcagcaagactgaagatggcttttcctggacagctagaaaacacaaaatcttgtaggtcattgcacctatctcagccataggtgcagtttgcttctacatgatgctaaaggctgcgaatgggatcctgatggaactaaggactccaatgtcgaactcttctttgctgcattcctttttcttcacttacaagaaaggcctgaatggaggacttttctgtaaccaggaacattttttaggggtcaaagtgctaataattaactcaaccaggtctactttttaatggctttcataacactaactcataaggttaccgatcaatgcatttcatacggatatagacctagggctctggagggtgggggattgttaaaacacatgcaaaaaaaaaaaaaaaaaaagaaattttgtatatataaccattttaatcttttataaagttttgaatgttcatgtatgaatgctgcagctgtgaagcatacataaataaatgaagtaagccatactgatttaatttattggatgttattttccctaagacctgaaaatgaacatagtatgctagttatttttcagtgttagccttttactttcctcacacaatttggaatcatataatataggtactttgtccctgattaaataatgtgacggatagaatgcatcaagtgtttattatgaaaagagtggaaaagtatatagcttttagcaaaaggtgtttgcccattctaagaaatgagcgaatatatagaaatagtgtgggcatttcttcctgttaggtggagtgtatgtgttgacatttctccccatctcttcccactctgttttctccccattatttgaataaagtgactgctgaagatgactttgaatccttatccacttaatttaatgtttaaagaaaaacctgtaatggaaagtaagactccttccctaatttcagtttagagcaacttgaagaagagtagacaaaaaataaaatgcacatagaaaaagagaaaaagggcacaaagggattggcccaatattgattcttttttataaaacctcctttggcttagaaggaatgactctagctacaataatacacagtatgtttaagcaggttcccttggttgttgcattaaatgtaatccacctttaggtattttagagcacagaacaacactgtgttgatctagtaggtttctatttttcctttctctttacaatgcacataatactttcctgtatttatatcataacgtgtatagtgtaaaatgtgaatgactttttttgtgaatgaaaatctaaaatctttgtaactttttatatctgcttttgtttcaccaaagaaacctaaaatccttcttttactacacaaaacacaaacaaacaggcgccgacaaaattccccaggcccattacggaccattctacaagcgcccaaaaaagaataaaaaacggccctaaacgtgtggaagcatggctgaagacctgggtaaggacacaaaccagaaatgctgc

SEQ ID NO: 317229 - DNA, 7501 bp, Homo sapiens
gctgtccccaagccgattggtacttcttgtcaggaagaaacgccaagaggtgggagtgcctggggagggaggcaggcggtccctaccgcaggcgcggggagctgcctttccgcccctccgcctgctttccaagcctggactcttaggagtggctgaagctgcggagcgcttttggagcctgtgaatgaaccctcctcctctccctcctccttcttctcgctgagtctcctcctcggctctgacggtacagtgatataatgatgatgggtgtcacaacccgcatttgaacttgcaggcgagctgccccgagcctttctggggaagaactccaggcgtgcggacgcaacagccgagaacattaggtgttgtggacaggagctgggaccaagatcttcggccagccccgcatcctcccgcatcttccagcaccgtcccgcaccctccgcatccttccccgggccaccacgcttcctatgtgacccgcctgggcaacgccgaacccagtcgcgcagcgctgcagtgaattttccccccaaactgcaataagccgccttccaaggccaagatgttcataaatataaagagcatcttatggatgtgttcaaccttaatagtaacccatgcgctacataaagtcaaagtgggaaaaagcccaccggtgaggggctccctctctggaaaagtcagcctaccttgtcatttttcaacgatgcctactttgccacccagttacaacaccagtgaatttctccgcatcaaatggtctaagattgaagtggacaaaaatggaaaagatttgaaagagactactgtccttgtggcccaaaatggaaatatcaagattggtcaggactacaaagggagagtgtctgtgcccacacatcccgaggctgtgggcgatgcctccctcactgtggtcaagctgctggcaagtgatgcgggtctttaccgctgtgacgtcatgtacgggattgaagacacacaagacacggtgtcactgactgtggatggggttgtgtttcactacagggcggcaaccagcaggtacacactgaattttgaggctgctcagaaggcttgtttggacgttggggcagtcatagcaactccagagcagctctttgctgcctatgaagatggatttgagcagtgtgacgcaggctggctggctgatcagactgtcagatatcccatccgggctcccagagtaggctgttatggagataagatgggaaaggcaggagtcaggacttatggattccgttctccccaggaaacttacgatgtgtattgttatgtggatcatctggatggtgatgtgttccacctcactgtccccagtaaattcaccttcgaggaggctgcaaaagagtgtgaaaaccaggatgccaggctggcaacagtgggggaactccaggcggcatggaggaacggctttgaccagtgcgattacgggtggctgtcggatgccagcgtgcgccaccctgtgactgtggccagggcccagtgtggaggtggtctacttggggtgagaaccctgtatcgttttgagaaccagacaggcttccctccccctgatagcagatttgatgcctactgctttaaacctaaagaggctacaaccatcgatttgagtatcctcgcagaaactgcatcacccagtttatccaaagaaccacaaatggtttctgatagaactacaccaatcatccctttagttgatgaattacctgtcattccaacagagttccctcccgtgggaaatattgtcagttttgaacagaaagccacagtccaacctcaggctatcacagatagtttagccaccaaattacccacacctactggcagtaccaagaagccctgggatatggatgactactcaccttctgcttcaggacctcttggaaagctagacatatcagaaattaaggaagaagtgctccagagtacaactggcgtctctcattatgctacggattcatgggatggtgtcgtggaagataaacaaacacaagaatcggttacacagattgaacaaatagaagtgggtcctttggtaacatctatggaaatcttaaagcacattccttccaaggaattccctgtaactgaaacaccattggtaactgcaagaatgatcctggaatccaaaactgaaaagaaaatggtaagcactgtttctgaattggtaaccacaggtcactatggattcaccttgggagaagaggatgatgaagacagaacacttacagttggatctgatgagagcaccttgatctttgaccaaattcctgaagtcattacggtgtcaaagacttcagaagacaccatccacactcatttagaagacttggagtcagtctcagcatccacaactgtttcccctttaattatgcctgataataatggatcatccatggatgactgggaagagagacaaactagtggtaggataacggaagagtttcttggcaaatatctgtctactacaccttttccatcacagcatcgtacagaaatagaattgtttccttattctggtgataaaatattagtagagggaatttccacagttatttatccttctctacaaacagaaatgacacatagaagagaaagaacagaaacactaataccagagatgagaacagatacttatacagatgaaatacaagaagagatcactaaaagtccatttatgggaaaaacagaagaagaagtcttctctgggatgaaactctctacatctctctcagagccaattcatgttacagagtcttctgtggaaatgaccaagtcttttgatttcccaacattgataacaaagttaagtgcagagccaacagaagtaagagatatggaggaagactttacagcaactccaggtactacaaaatatgatgaaaatattacaacagtgcttttggcccatggtactttaagtgttgaagcagccactgtatcaaaatggtcatgggatgaagataatacaacatccaagcctttagagtctacagaaccttcagcctcttcaaaattgccccctgccttactcacaactgtggggatgaatggaaaggataaagacatcccaagtttcactgaagatggagcagatgaatttactcttattccagatagtactcaaaagcagttagaggaggttactgatgaagacatagcagcccatggaaaattcacaattagatttcagccaactacatcaactggtattgcagaaaagtcaactttgagagattctacaactgaagaaaaagttccacctatcacaagcactgaaggccaagtttatgcaaccatggaaggaagtgctttgggtgaagtagaagatgtggacctctctaagccagtatctactgttccccaatttgcacacacttcagaggtggaaggattagcatttgttagttatagtagcacccaagagcctactacttatgtagactcttcccataccattcctctttctgtaattcccaagacagactggggagtgttagtaccttctgttccatcagaagatgaagttctaggtgaaccctctcaagacatacttgtcattgatcagactcgccttgaagcgactatttctccagaaactatgagaacaacaaaaatcacagagggaacaactcaggaagaattcccttggaaagaacagactgcagagaaaccagttcctgctctcagttctacagcttggactcccaaggaggcagtaacaccactggatgaacaagagggcgatggatcagcatatacagtctctgaagatgaattgttgacaggttctgagagggtcccagttttagaaacaactccagttggaaaaattgatcacagtgtgtcttatccaccaggtgctgtaactgagcacaaagtgaaaacagatgaagtggtaacactaacaccacgcattgggccaaaagtatctttaagtccagggcctgaacaaaaatatgaaacagaaggtagtagtacaacaggatttacatcatctttgagtccttttagtacccacattacccagcttatggaagaaaccactactgagaaaacatccctagaggatattgatttaggctcaggattatttgaaaagcccaaagccacagaactcatagaattttcaacaatcaaagtcacagttccaagtgatattaccactgccttcagttcagtagacagacttcacacaacttcagcattcaagccatcttccgcgatcactaagaaaccacctctcatcgacagggaacctggtgaagaaacaaccagtgacatggtaatcattggagaatcaacatctcatgttcctcccactacccttgaagatattgtagccaaggaaacagaaaccgatattgatagagagtatttcacgacttcaagtcctcctgctacacagccaacaagaccacccactgtggaagacaaagaggcctttggacctcaggcgctttctacgccacagcccccagcaagcacaaaatttcaccctgacattaatgtttatattattgaggtcagagaaaataagacaggacctgatcgctgcaaaatgaacccgtgccttaacggaggcacctgttatcctactgaaacttcctacgtatgcacctgtgtgccaggatacagcggagaccagtgtgaacttgattttgatgaatgtcactctaatccctgtcgtaatggagccacttgtgttgatggttttaacacattcaggtgcctctgccttccaagttatgttggtgcactttgtgagcaagataccgagacatgtgactatggctggcacaaattccaagggcagtgctacaaatactttgcccatcgacgcacatgggatgcagctgaacgggaatgccgtctgcagggtgcccatctcacaagcatcctgtctcacgaagaacaaatgtttgttaatcgtgtgggccatgattatcagtggataggcctcaatgacaagatgtttgagcatgacttccgttggactgatggcagcacactgcaatacgagaattggagacccaaccagccagacagcttcttttctgctggagaagactgtgttgtaatcatttggcatgagaatggccagtggaatgatgttccctgcaattaccatctcacctatacgtgcaagaaaggaacagttgcttgcggccagccccctgttgtagaaaatgccaagacctttggaaagatgaaacctcgttatgaaatcaactccctgattagataccactgcaaagatggtttcattcaacgtcaccttccaactatccggtgcttaggaaatggaagatgggctatacctaaaattacctgcatgaacccatctgcataccaaaggacttattctatgaaatactttaaaaattcctcatcagcaaaggacaattcaataaatacatccaaacatgatcatcgttggagccggaggtggcaggagtcgaggcgctgatccctaaaatggcgaacatgtgttttcatcatttcagccaaagtcctaacttcctgtgcctttcctatcacctcgagaagtaattatcagttggtttggatttttggaccaccgttcagtcattttgggttgccgtgctcccaaaacattttaaatgaaagtattggcattcaaaaagacagcagacaaaatgaaagaaaatgagagcagaaagtaagcatttccagcctatctaatttctttagttttctatttgcctccagtgcagtccatttcctaatgtataccagcctactgtactatttaaaatgctcaatttcagcaccgatggccatgtaaataagatgatttaatgttgattttaatcctgtatataaaataaaaagtcacaatgagtttgggcatatttaatgatgattatggagccttagaggtctttaatcattggttcggctgcttttatgtagtttaggctggaaatggtttcacttgctctttgactgtcagcaagactgaagatggcttttcctggacagctagaaaacacaaaatcttgtaggtcattgcacctatctcagccataggtgcagtttgcttctacatgatgctaaaggctgcgaatgggatcctgatggaactaaggactccaatgtcgaactcttctttgctgcattcctttttcttcacttacaagaaaggcctgaatggaggacttttctgtaaccaggaacattttttaggggtcaaagtgctaataattaactcaaccaggtctactttttaatggctttcataacactaactcataaggttaccgatcaatgcatttcatacggatatagacctagggctctggagggtgggggattgttaaaacacatgcaaaaaaaaaaaaaaaaaaagaaattttgtatatataaccattttaatcttttataaagttttgaatgttcatgtatgaatgctgcagctgtgaagcatacataaataaatgaagtaagccatactgatttaatttattggatgttattttccctaagacctgaaaatgaacatagtatgctagttatttttcagtgttagccttttactttcctcacacaatttggaatcatataatataggtactttgtccctgattaaataatgtgacggatagaatgcatcaagtgtttattatgaaaagagtggaaaagtatatagcttttagcaaaaggtgtttgcccattctaagaaatgagcgaatatatagaaatagtgtgggcatttcttcctgttaggtggagtgtatgtgttgacatttctccccatctcttcccactctgttttctccccattatttgaataaagtgactgctgaagatgactttgaatccttatccacttaatttaatgtttaaagaaaaacctgtaatggaaagtaagactccttccctaatttcagtttagagcaacttgaagaagagtagacaaaaaataaaatgcacatagaaaaagagaaaaagggcacaaagggattggcccaatattgattcttttttataaaacctcctttggcttagaaggaatgactctagctacaataatacacagtatgtttaagcaggttcccttggttgttgcattaaatgtaatccacctttaggtattttagagcacagaacaacactgtgttgatctagtaggtttctatttttcctttctctttacaatgcacataatactttcctgtatttatatcataacgtgtatagtgtaaaatgtgaatgactttttttgtgaatgaaaatctaaaatctttgtaactttttatatctgcttttgtttcaccaaagaaacctaaaatccttcttttactacacaaaacacaaacaaacaggcgccgacaaaattccccaggcccattacggaccattctacaagcgcccaaaaaagaataaaaaacggccctaaacgtgtggaagcatggctgaagacctgggtaaggacacaaaccagaaatgctgc

SEQ ID NO: 317230 - DNA, 12907 bp, Homo sapiens
gctgtccccaagccgattggtacttcttgtcaggaagaaacgccaagaggtgggagtgcctggggagggaggcaggcggtccctaccgcaggcgcggggagctgcctttccgcccctccgcctgctttccaagcctggactcttaggagtggctgaagctgcggagcgcttttggagcctgtgaatgaaccctcctcctctccctcctccttcttctcgctgagtctcctcctcggctctgacggtacagtgatataatgatgatgggtgtcacaacccgcatttgaacttgcaggcgagctgccccgagcctttctggggaagaactccaggcgtgcggacgcaacagccgagaacattaggtgttgtggacaggagctgggaccaagatcttcggccagccccgcatcctcccgcatcttccagcaccgtcccgcaccctccgcatccttccccgggccaccacgcttcctatgtgacccgcctgggcaacgccgaacccagtcgcgcagcgctgcagtgaattttccccccaaactgcaataagccgccttccaaggccaagatgttcataaatataaagagcatcttatggatgtgttcaaccttaatagtaacccatgcgctacataaagtcaaagtgggaaaaagcccaccggtgaggggctccctctctggaaaagtcagcctaccttgtcatttttcaacgatgcctactttgccacccagttacaacaccagtgaatttctccgcatcaaatggtctaagattgaagtggacaaaaatggaaaagatttgaaagagactactgtccttgtggcccaaaatggaaatatcaagattggtcaggactacaaagggagagtgtctgtgcccacacatcccgaggctgtgggcgatgcctccctcactgtggtcaagctgctggcaagtgatgcgggtctttaccgctgtgacgtcatgtacgggattgaagacacacaagacacggtgtcactgactgtggatggggttgtgtttcactacagggcggcaaccagcaggtacacactgaattttgaggctgctcagaaggcttgtttggacgttggggcagtcatagcaactccagagcagctctttgctgcctatgaagatggatttgagcagtgtgacgcaggctggctggctgatcagactgtcagatatcccatccgggctcccagagtaggctgttatggagataagatgggaaaggcaggagtcaggacttatggattccgttctccccaggaaacttacgatgtgtattgttatgtggatcatctggatggtgatgtgttccacctcactgtccccagtaaattcaccttcgaggaggctgcaaaagagtgtgaaaaccaggatgccaggctggcaacagtgggggaactccaggcggcatggaggaacggctttgaccagtgcgattacgggtggctgtcggatgccagcgtgcgccaccctgtgactgtggccagggcccagtgtggaggtggtctacttggggtgagaaccctgtatcgttttgagaaccagacaggcttccctccccctgatagcagatttgatgcctactgctttaaacctaaagaggctacaaccatcgatttgagtatcctcgcagaaactgcatcacccagtttatccaaagaaccacaaatggtttctgatagaactacaccaatcatccctttagttgatgaattacctgtcattccaacagagttccctcccgtgggaaatattgtcagttttgaacagaaagccacagtccaacctcaggctatcacagatagtttagccaccaaattacccacacctactggcagtaccaagaagccctgggatatggatgactactcaccttctgcttcaggacctcttggaaagctagacatatcagaaattaaggaagaagtgctccagagtacaactggcgtctctcattatgctacggattcatgggatggtgtcgtggaagataaacaaacacaagaatcggttacacagattgaacaaatagaagtgggtcctttggtaacatctatggaaatcttaaagcacattccttccaaggaattccctgtaactgaaacaccattggtaactgcaagaatgatcctggaatccaaaactgaaaagaaaatggtaagcactgtttctgaattggtaaccacaggtcactatggattcaccttgggagaagaggatgatgaagacagaacacttacagttggatctgatgagagcaccttgatctttgaccaaattcctgaagtcattacggtgtcaaagacttcagaagacaccatccacactcatttagaagacttggagtcagtctcagcatccacaactgtttcccctttaattatgcctgataataatggatcatccatggatgactgggaagagagacaaactagtggtaggataacggaagagtttcttggcaaatatctgtctactacaccttttccatcacagcatcgtacagaaatagaattgtttccttattctggtgataaaatattagtagagggaatttccacagttatttatccttctctacaaacagaaatgacacatagaagagaaagaacagaaacactaataccagagatgagaacagatacttatacagatgaaatacaagaagagatcactaaaagtccatttatgggaaaaacagaagaagaagtcttctctgggatgaaactctctacatctctctcagagccaattcatgttacagagtcttctgtggaaatgaccaagtcttttgatttcccaacattgataacaaagttaagtgcagagccaacagaagtaagagatatggaggaagactttacagcaactccaggtactacaaaatatgatgaaaatattacaacagtgcttttggcccatggtactttaagtgttgaagcagccactgtatcaaaatggtcatgggatgaagataatacaacatccaagcctttagagtctacagaaccttcagcctcttcaaaattgccccctgccttactcacaactgtggggatgaatggaaaggataaagacatcccaagtttcactgaagatggagcagatgaatttactcttattccagatagtactcaaaagcagttagaggaggttactgatgaagacatagcagcccatggaaaattcacaattagatttcagccaactacatcaactggtattgcagaaaagtcaactttgagagattctacaactgaagaaaaagttccacctatcacaagcactgaaggccaagtttatgcaaccatggaaggaagtgctttgggtgaagtagaagatgtggacctctctaagccagtatctactgttccccaatttgcacacacttcagaggtggaaggattagcatttgttagttatagtagcacccaagagcctactacttatgtagactcttcccataccattcctctttctgtaattcccaagacagactggggagtgttagtaccttctgttccatcagaagatgaagttctaggtgaaccctctcaagacatacttgtcattgatcagactcgccttgaagcgactatttctccagaaactatgagaacaacaaaaatcacagagggaacaactcaggaagaattcccttggaaagaacagactgcagagaaaccagttcctgctctcagttctacagcttggactcccaaggaggcagtaacaccactggatgaacaagagggcgatggatcagcatatacagtctctgaagatgaattgttgacaggttctgagagggtcccagttttagaaacaactccagttggaaaaattgatcacagtgtgtcttatccaccaggtgctgtaactgagcacaaagtgaaaacagatgaagtggtaacactaacaccacgcattgggccaaaagtatctttaagtccagggcctgaacaaaaatatgaaacagaaggtagtagtacaacaggatttacatcatctttgagtccttttagtacccacattacccagcttatggaagaaaccactactgagaaaacatccctagaggatattgatttaggctcaggattatttgaaaagcccaaagccacagaactcatagaattttcaacaatcaaagtcacagttccaagtgatattaccactgccttcagttcagtagacagacttcacacaacttcagcattcaagccatcttccgcgatcactaagaaaccacctctcatcgacagggaacctggtgaagaaacaaccagtgacatggtaatcattggagaatcaacatctcatgttcctcccactacccttgaagatattgtagccaaggaaacagaaaccgatattgatagagagtatttcacgacttcaagtcctcctgctacacagccaacaagaccacccactgtggaagacaaagaggcctttggacctcaggcgctttctacgccacagcccccagcaagcacaaaatttcaccctgacattaatgtttatattattgaggtcagagaaaataagacaggtcgaatgagtgatttgagtgtaattggtcatccaatagattcagaatctaaagaagatgaaccttgtagtgaagaaacagatccagtgcatgatctaatggctgaaattttacctgaattccctgacataattgaaatagacctataccacagtgaagaaaatgaagaagaagaagaagagtgtgcaaatgctactgatgtgacaaccaccccatctgtgcagtacataaatgggaagcatctcgttaccactgtgcccaaggacccagaagctgcagaagctaggcgtggccagtttgaaagtgttgcaccttctcaaaatttctcggacagctctgaaagtgatactcatccatttgtaatagccaaaacggaattgtctactgctgtgcaacctaatgaatctacagaaacaactgagtctcttgaagttacatggaagcctgagacttaccctgaaacatcagaacatttttcaggtggtgagcctgatgttttccccacagtcccattccatgaggaatttgaaagtggaacagccaaaaaaggggcagaatcagtcacagagagagatactgaagttggtcatcaggcacatgaacatactgaacctgtatctctgtttcctgaagagtcttcaggagagattgccattgaccaagaatctcagaaaatagcctttgcaagggctacagaagtaacatttggtgaagaggtagaaaaaagtacttctgtcacatacactcccactatagttccaagttctgcatcagcatatgtttcagaggaagaagcagttaccctaataggaaatccttggccagatgacctgttgtctaccaaagaaagctgggtagaagcaactcctagacaagttgtagagctctcagggagttcttcgattccaattacagaaggctctggagaagcagaagaagatgaagatacaatgttcaccatggtaactgatttatcacagagaaatactactgatacactcattactttagacactagcaggataatcacagaaagcttttttgaggttcctgcaaccaccatttatccagtttctgaacaaccttctgcaaaagtggtgcctaccaagtttgtaagtgaaacagacacttctgagtggatttccagtaccactgttgaggaaaagaaaaggaaggaggaggagggaactacaggtacggcttctacatttgaggtatattcatctacacagagatcggatcaattaattttaccctttgaattagaaagtccaaatgtagctacatctagtgattcaggtaccaggaaaagttttatgtccttgacaacaccaacacagtctgaaagggaaatgacagattctactcctgtctttacagaaacaaatacattagaaaatttgggggcacagaccactgagcacagcagtatccatcaacctggggttcaggaagggctgaccactctcccacgtagtcctgcctctgtctttatggagcagggctctggagaagctgctgccgacccagaaaccaccactgtttcttcattttcattaaacgtagagtatgcaattcaagccgaaaaggaagtagctggcactttgtctccgcatgtggaaactacattctccactgagccaacaggactggttttgagtacagtaatggacagagtagttgctgaaaatataacccaaacatccagggaaatagtgatttcagagcgattaggagaaccaaattatggggcagaaataaggggcttttccacaggttttcctttggaggaagatttcagtggtgactttagagaatactcaacagtgtctcatcccatagcaaaagaagaaacggtaatgatggaaggctctggagatgcagcatttagggacacccagacttcaccatctacagtacctacttcagttcacatcagtcacatatctgactcagaaggacccagtagcaccatggtcagcacttcagccttcccctgggaagagtttacatcctcagctgagggctcaggtgagcaactggtcacagtcagcagctctgttgttccagtgcttcccagtgctgtgcaaaagttttctggtacagcttcctccattatcgacgaaggattgggagaagtgggtactgtcaatgaaattgatagaagatccaccattttaccaacagcagaagtggaaggtacgaaagctccagtagagaaggaggaagtaaaggtcagtggcacagtttcaacaaactttccccaaactatagagccagccaaattatggtctaggcaagaagtcaaccctgtaagacaagaaattgaaagtgaaacaacatcagaggaacaaattcaagaagaaaagtcatttgaatcccctcaaaactctcctgcaacagaacaaacaatctttgattcacagacatttactgaaactgaactcaaaaccacagattattctgtactaacaacaaagaaaacttacagtgatgataaagaaatgaaggaggaagacacttctttagttaacatgtctactccagatccagatgcaaatggcttggaatcttacacaactctccctgaagctactgaaaagtcacattttttcttagctactgcattagtaactgaatctataccagctgaacatgtagtcacagattcaccaatcaaaaaggaagaaagtacaaaacattttccgaaaggcatgaggccaacaattcaagagtcagatactgagctcttattctctggactgggatcaggagaagaagttttacctactctaccaacagagtcagtgaattttactgaagtggaacaaatcaataacacattatatccccacacttctcaagtggaaagtacctcaagtgacaaaattgaagactttaacagaatggaaaatgtggcaaaagaagttggaccactcgtatctcaaacagacatctttgaaggtagtgggtcagtaaccagcacaacattaatagaaattttaagtgacactggagcagaaggacccacggtggcacctctccctttctccacggacatcggacatcctcaaaatcagactgtcaggtgggcagaagaaatccagactagtagaccacaaaccataactgaacaagactctaacaagaattcttcaacagcagaaattaacgaaacaacaacctcatctactgattttctggctagagcttatggttttgaaatggccaaagaatttgttacatcagcaccaaaaccatctgacttgtattatgaaccttctggagaaggatctggagaagtggatattgttgattcatttcacacttctgcaactactcaggcaaccagacaagaaagcagcaccacatttgtttctgatgggtccctggaaaaacatcctgaggtgccaagcgctaaagctgttactgctgatggattcccaacagtttcagtgatgctgcctcttcattcagagcagaacaaaagctcccctgatccaactagcacactgtcaaatacagtgtcatatgagaggtccacagacggtagtttccaagaccgtttcagggaattcgaggattccaccttaaaacctaacagaaaaaaacccactgaaaatattatcatagacctggacaaagaggacaaggatttaatattgacaattacagagagtaccatccttgaaattctacctgagctgacatcggataaaaatactatcatagatattgatcatactaaacctgtgtatgaagacattcttggaatgcaaacagatatagatacagaggtaccatcagaaccacatgacagtaatgatgaaagtaatgatgacagcactcaagttcaagagatctatgaggcagctgtcaacctttctttaactgaggaaacatttgagggctctgctgatgttctggctagctacactcaggcaacacatgatgaatcaatgacttatgaagatagaagccaactagatcacatgggctttcacttcacaactgggatccctgctcctagcacagaaacagaattagacgttttacttcccacggcaacatccctgccaattcctcgtaagtctgccacagttattccagagattgaaggaataaaagctgaagcaaaagccctggatgacatgtttgaatcaagcactttgtctgatggtcaagctattgcagaccaaagtgaaataataccaacattgggccaatttgaaaggactcaggaggagtatgaagacaaaaaacatgctggtccttcttttcagccagaattctcttcaggagctgaggaggcattagtagaccatactccctatctaagtattgctactacccaccttatggatcagagtgtaacagaggtgcctgatgtgatggaaggatccaatcccccatattacactgatacaacattagcagtttcaacatttgcgaagttgtcttctcagacaccatcatctcccctcactatctactcaggcagtgaagcctctggacacacagagatcccccagcccagtgctctgccaggaatagacgtcggctcatctgtaatgtccccacaggattcttttaaggaaattcatgtaaatattgaagcgactttcaaaccatcaagtgaggaataccttcacataactgagcctccctctttatctcctgacacaaaattagaaccttcagaagatgatggtaaacctgagttattagaagaaatggaagcttctcccacagaacttattgctgtggaaggaactgagattctccaagatttccaaaacaaaaccgatggtcaagtttctggagaagcaatcaagatgtttcccaccattaaaacacctgaggctggaactgttattacaactgccgatgaaattgaattagaaggtgctacacagtggccacactctacttctgcttctgccacctatggggtcgaggcaggtgtggtgccttggctaagtccacagacttctgagaggcccacgctttcttcttctccagaaataaaccctgaaactcaagcagctttaatcagagggcaggattccacgatagcagcatcagaacagcaagtggcagcgagaattcttgattccaatgatcaggcaacagtaaaccctgtggaatttaatactgaggttgcaacaccaccattttcccttctggagacttctaatgaaacagatttcctgattggcattaatgaagagtcagtggaaggcacggcaatctatttaccaggacctgatcgctgcaaaatgaacccgtgccttaacggaggcacctgttatcctactgaaacttcctacgtatgcacctgtgtgccaggatacagcggagaccagtgtgaacttgattttgatgaatgtcactctaatccctgtcgtaatggagccacttgtgttgatggttttaacacattcaggtgcctctgccttccaagttatgttggtgcactttgtgagcaagataccgagacatgtgactatggctggcacaaattccaagggcagtgctacaaatactttgcccatcgacgcacatgggatgcagctgaacgggaatgccgtctgcagggtgcccatctcacaagcatcctgtctcacgaagaacaaatgtttgttaatcgtgtgggccatgattatcagtggataggcctcaatgacaagatgtttgagcatgacttccgttggactgatggcagcacactgcaatacgagaattggagacccaaccagccagacagcttcttttctgctggagaagactgtgttgtaatcatttggcatgagaatggccagtggaatgatgttccctgcaattaccatctcacctatacgtgcaagaaaggaacagttgcttgcggccagccccctgttgtagaaaatgccaagacctttggaaagatgaaacctcgttatgaaatcaactccctgattagataccactgcaaagatggtttcattcaacgtcaccttccaactatccggtgcttaggaaatggaagatgggctatacctaaaattacctgcatgaaccgtaagtggtcctttagaaagaatggactaccgtgctataacaactactagacaccttcattttacggctgtggtatcggcagtttagggtatggagcaagtaatattgtgtgttttctttttttctttctttccttccatgtagcatctgcataccaaaggacttattctatgaaatactttaaaaattcctcatcagcaaaggacaattcaataaatacatccaaacatgatcatcgttggagccggaggtggcaggagtcgaggcgctgatccctaaaatggcgaacatgtgttttcatcatttcagccaaagtcctaacttcctgtgcctttcctatcacctcgagaagtaattatcagttggtttggatttttggaccaccgttcagtcattttgggttgccgtgctcccaaaacattttaaatgaaagtattggcattcaaaaagacagcagacaaaatgaaagaaaatgagagcagaaagtaagcatttccagcctatctaatttctttagttttctatttgcctccagtgcagtccatttcctaatgtataccagcctactgtactatttaaaatgctcaatttcagcaccgatggccatgtaaataagatgatttaatgttgattttaatcctgtatataaaataaaaagtcacaatgagtttgggcatatttaatgatgattatggagccttagaggtctttaatcattggttcggctgcttttatgtagtttaggctggaaatggtttcacttgctctttgactgtcagcaagactgaagatggcttttcctggacagctagaaaacacaaaatcttgtaggtcattgcacctatctcagccataggtgcagtttgcttctacatgatgctaaaggctgcgaatgggatcctgatggaactaaggactccaatgtcgaactcttctttgctgcattcctttttcttcacttacaagaaaggcctgaatggaggacttttctgtaaccaggaacattttttaggggtcaaagtgctaataattaactcaaccaggtctactttttaatggctttcataacactaactcataaggttaccgatcaatgcatttcatacggatatagacctagggctctggagggtgggggattgttaaaacacatgcaaaaaaaaaaaaaaaaaaagaaattttgtatatataaccattttaatcttttataaagttttgaatgttcatgtatgaatgctgcagctgtgaagcatacataaataaatgaagtaagccatactgatttaatttattggatgttattttccctaagacctgaaaatgaacatagtatgctagttatttttcagtgttagccttttactttcctcacacaatttggaatcatataatataggtactttgtccctgattaaataatgtgacggatagaatgcatcaagtgtttattatgaaaagagtggaaaagtatatagcttttagcaaaaggtgtttgcccattctaagaaatgagcgaatatatagaaatagtgtgggcatttcttcctgttaggtggagtgtatgtgttgacatttctccccatctcttcccactctgttttctccccattatttgaataaagtgactgctgaagatgactttgaatccttatccacttaatttaatgtttaaagaaaaacctgtaatggaaagtaagactccttccctaatttcagtttagagcaacttgaagaagagtagacaaaaaataaaatgcacatagaaaaagagaaaaagggcacaaagggattggcccaatattgattcttttttataaaacctcctttggcttagaaggaatgactctagctacaataatacacagtatgtttaagcaggttcccttggttgttgcattaaatgtaatccacctttaggtattttagagcacagaacaacactgtgttgatctagtaggtttctatttttcctttctctttacaatgcacataatactttcctgtatttatatcataacgtgtatagtgtaaaatgtgaatgactttttttgtgaatgaaaatctaaaatctttgtaactttttatatctgcttttgtttcaccaaagaaacctaaaatccttcttttactacacaaaacacaaacaaacaggcgccgacaaaattccccaggcccattacggaccattctacaagcgcccaaaaaagaataaaaaacggccctaaacgtgtggaagcatggctgaagacctgggtaaggacacaaaccagaaatgctgc

SEQ ID NO: 317231 - DNA, 12712 bp, Homo sapiens
gctgtccccaagccgattggtacttcttgtcaggaagaaacgccaagaggtgggagtgcctggggagggaggcaggcggtccctaccgcaggcgcggggagctgcctttccgcccctccgcctgctttccaagcctggactcttaggagtggctgaagctgcggagcgcttttggagcctgtgaatgaaccctcctcctctccctcctccttcttctcgctgagtctcctcctcggctctgacggtacagtgatataatgatgatgggtgtcacaacccgcatttgaacttgcaggcgagctgccccgagcctttctggggaagaactccaggcgtgcggacgcaacagccgagaacattaggtgttgtggacaggagctgggaccaagatcttcggccagccccgcatcctcccgcatcttccagcaccgtcccgcaccctccgcatccttccccgggccaccacgcttcctatgtgacccgcctgggcaacgccgaacccagtcgcgcagcgctgcagtgaattttccccccaaactgcaataagccgccttccaaggccaagatgttcataaatataaagagcatcttatggatgtgttcaaccttaatagtaacccatgcgctacataaagtcaaagtgggaaaaagcccaccggtgaggggctccctctctggaaaagtcagcctaccttgtcatttttcaacgatgcctactttgccacccagttacaacaccagtgaatttctccgcatcaaatggtctaagattgaagtggacaaaaatggaaaagatttgaaagagactactgtccttgtggcccaaaatggaaatatcaagattggtcaggactacaaagggagagtgtctgtgcccacacatcccgaggctgtgggcgatgcctccctcactgtggtcaagctgctggcaagtgatgcgggtctttaccgctgtgacgtcatgtacgggattgaagacacacaagacacggtgtcactgactgtggatggggttgtgtttcactacagggcggcaaccagcaggtacacactgaattttgaggctgctcagaaggcttgtttggacgttggggcagtcatagcaactccagagcagctctttgctgcctatgaagatggatttgagcagtgtgacgcaggctggctggctgatcagactgtcagatatcccatccgggctcccagagtaggctgttatggagataagatgggaaaggcaggagtcaggacttatggattccgttctccccaggaaacttacgatgtgtattgttatgtggatcatctggatggtgatgtgttccacctcactgtccccagtaaattcaccttcgaggaggctgcaaaagagtgtgaaaaccaggatgccaggctggcaacagtgggggaactccaggcggcatggaggaacggctttgaccagtgcgattacgggtggctgtcggatgccagcgtgcgccaccctgtgactgtggccagggcccagtgtggaggtggtctacttggggtgagaaccctgtatcgttttgagaaccagacaggcttccctccccctgatagcagatttgatgcctactgctttaaacctaaagaggctacaaccatcgatttgagtatcctcgcagaaactgcatcacccagtttatccaaagaaccacaaatggtttctgatagaactacaccaatcatccctttagttgatgaattacctgtcattccaacagagttccctcccgtgggaaatattgtcagttttgaacagaaagccacagtccaacctcaggctatcacagatagtttagccaccaaattacccacacctactggcagtaccaagaagccctgggatatggatgactactcaccttctgcttcaggacctcttggaaagctagacatatcagaaattaaggaagaagtgctccagagtacaactggcgtctctcattatgctacggattcatgggatggtgtcgtggaagataaacaaacacaagaatcggttacacagattgaacaaatagaagtgggtcctttggtaacatctatggaaatcttaaagcacattccttccaaggaattccctgtaactgaaacaccattggtaactgcaagaatgatcctggaatccaaaactgaaaagaaaatggtaagcactgtttctgaattggtaaccacaggtcactatggattcaccttgggagaagaggatgatgaagacagaacacttacagttggatctgatgagagcaccttgatctttgaccaaattcctgaagtcattacggtgtcaaagacttcagaagacaccatccacactcatttagaagacttggagtcagtctcagcatccacaactgtttcccctttaattatgcctgataataatggatcatccatggatgactgggaagagagacaaactagtggtaggataacggaagagtttcttggcaaatatctgtctactacaccttttccatcacagcatcgtacagaaatagaattgtttccttattctggtgataaaatattagtagagggaatttccacagttatttatccttctctacaaacagaaatgacacatagaagagaaagaacagaaacactaataccagagatgagaacagatacttatacagatgaaatacaagaagagatcactaaaagtccatttatgggaaaaacagaagaagaagtcttctctgggatgaaactctctacatctctctcagagccaattcatgttacagagtcttctgtggaaatgaccaagtcttttgatttcccaacattgataacaaagttaagtgcagagccaacagaagtaagagatatggaggaagactttacagcaactccaggtactacaaaatatgatgaaaatattacaacagtgcttttggcccatggtactttaagtgttgaagcagccactgtatcaaaatggtcatgggatgaagataatacaacatccaagcctttagagtctacagaaccttcagcctcttcaaaattgccccctgccttactcacaactgtggggatgaatggaaaggataaagacatcccaagtttcactgaagatggagcagatgaatttactcttattccagatagtactcaaaagcagttagaggaggttactgatgaagacatagcagcccatggaaaattcacaattagatttcagccaactacatcaactggtattgcagaaaagtcaactttgagagattctacaactgaagaaaaagttccacctatcacaagcactgaaggccaagtttatgcaaccatggaaggaagtgctttgggtgaagtagaagatgtggacctctctaagccagtatctactgttccccaatttgcacacacttcagaggtggaaggattagcatttgttagttatagtagcacccaagagcctactacttatgtagactcttcccataccattcctctttctgtaattcccaagacagactggggagtgttagtaccttctgttccatcagaagatgaagttctaggtgaaccctctcaagacatacttgtcattgatcagactcgccttgaagcgactatttctccagaaactatgagaacaacaaaaatcacagagggaacaactcaggaagaattcccttggaaagaacagactgcagagaaaccagttcctgctctcagttctacagcttggactcccaaggaggcagtaacaccactggatgaacaagagggcgatggatcagcatatacagtctctgaagatgaattgttgacaggttctgagagggtcccagttttagaaacaactccagttggaaaaattgatcacagtgtgtcttatccaccaggtgctgtaactgagcacaaagtgaaaacagatgaagtggtaacactaacaccacgcattgggccaaaagtatctttaagtccagggcctgaacaaaaatatgaaacagaaggtagtagtacaacaggatttacatcatctttgagtccttttagtacccacattacccagcttatggaagaaaccactactgagaaaacatccctagaggatattgatttaggctcaggattatttgaaaagcccaaagccacagaactcatagaattttcaacaatcaaagtcacagttccaagtgatattaccactgccttcagttcagtagacagacttcacacaacttcagcattcaagccatcttccgcgatcactaagaaaccacctctcatcgacagggaacctggtgaagaaacaaccagtgacatggtaatcattggagaatcaacatctcatgttcctcccactacccttgaagatattgtagccaaggaaacagaaaccgatattgatagagagtatttcacgacttcaagtcctcctgctacacagccaacaagaccacccactgtggaagacaaagaggcctttggacctcaggcgctttctacgccacagcccccagcaagcacaaaatttcaccctgacattaatgtttatattattgaggtcagagaaaataagacaggtcgaatgagtgatttgagtgtaattggtcatccaatagattcagaatctaaagaagatgaaccttgtagtgaagaaacagatccagtgcatgatctaatggctgaaattttacctgaattccctgacataattgaaatagacctataccacagtgaagaaaatgaagaagaagaagaagagtgtgcaaatgctactgatgtgacaaccaccccatctgtgcagtacataaatgggaagcatctcgttaccactgtgcccaaggacccagaagctgcagaagctaggcgtggccagtttgaaagtgttgcaccttctcaaaatttctcggacagctctgaaagtgatactcatccatttgtaatagccaaaacggaattgtctactgctgtgcaacctaatgaatctacagaaacaactgagtctcttgaagttacatggaagcctgagacttaccctgaaacatcagaacatttttcaggtggtgagcctgatgttttccccacagtcccattccatgaggaatttgaaagtggaacagccaaaaaaggggcagaatcagtcacagagagagatactgaagttggtcatcaggcacatgaacatactgaacctgtatctctgtttcctgaagagtcttcaggagagattgccattgaccaagaatctcagaaaatagcctttgcaagggctacagaagtaacatttggtgaagaggtagaaaaaagtacttctgtcacatacactcccactatagttccaagttctgcatcagcatatgtttcagaggaagaagcagttaccctaataggaaatccttggccagatgacctgttgtctaccaaagaaagctgggtagaagcaactcctagacaagttgtagagctctcagggagttcttcgattccaattacagaaggctctggagaagcagaagaagatgaagatacaatgttcaccatggtaactgatttatcacagagaaatactactgatacactcattactttagacactagcaggataatcacagaaagcttttttgaggttcctgcaaccaccatttatccagtttctgaacaaccttctgcaaaagtggtgcctaccaagtttgtaagtgaaacagacacttctgagtggatttccagtaccactgttgaggaaaagaaaaggaaggaggaggagggaactacaggtacggcttctacatttgaggtatattcatctacacagagatcggatcaattaattttaccctttgaattagaaagtccaaatgtagctacatctagtgattcaggtaccaggaaaagttttatgtccttgacaacaccaacacagtctgaaagggaaatgacagattctactcctgtctttacagaaacaaatacattagaaaatttgggggcacagaccactgagcacagcagtatccatcaacctggggttcaggaagggctgaccactctcccacgtagtcctgcctctgtctttatggagcagggctctggagaagctgctgccgacccagaaaccaccactgtttcttcattttcattaaacgtagagtatgcaattcaagccgaaaaggaagtagctggcactttgtctccgcatgtggaaactacattctccactgagccaacaggactggttttgagtacagtaatggacagagtagttgctgaaaatataacccaaacatccagggaaatagtgatttcagagcgattaggagaaccaaattatggggcagaaataaggggcttttccacaggttttcctttggaggaagatttcagtggtgactttagagaatactcaacagtgtctcatcccatagcaaaagaagaaacggtaatgatggaaggctctggagatgcagcatttagggacacccagacttcaccatctacagtacctacttcagttcacatcagtcacatatctgactcagaaggacccagtagcaccatggtcagcacttcagccttcccctgggaagagtttacatcctcagctgagggctcaggtgagcaactggtcacagtcagcagctctgttgttccagtgcttcccagtgctgtgcaaaagttttctggtacagcttcctccattatcgacgaaggattgggagaagtgggtactgtcaatgaaattgatagaagatccaccattttaccaacagcagaagtggaaggtacgaaagctccagtagagaaggaggaagtaaaggtcagtggcacagtttcaacaaactttccccaaactatagagccagccaaattatggtctaggcaagaagtcaaccctgtaagacaagaaattgaaagtgaaacaacatcagaggaacaaattcaagaagaaaagtcatttgaatcccctcaaaactctcctgcaacagaacaaacaatctttgattcacagacatttactgaaactgaactcaaaaccacagattattctgtactaacaacaaagaaaacttacagtgatgataaagaaatgaaggaggaagacacttctttagttaacatgtctactccagatccagatgcaaatggcttggaatcttacacaactctccctgaagctactgaaaagtcacattttttcttagctactgcattagtaactgaatctataccagctgaacatgtagtcacagattcaccaatcaaaaaggaagaaagtacaaaacattttccgaaaggcatgaggccaacaattcaagagtcagatactgagctcttattctctggactgggatcaggagaagaagttttacctactctaccaacagagtcagtgaattttactgaagtggaacaaatcaataacacattatatccccacacttctcaagtggaaagtacctcaagtgacaaaattgaagactttaacagaatggaaaatgtggcaaaagaagttggaccactcgtatctcaaacagacatctttgaaggtagtgggtcagtaaccagcacaacattaatagaaattttaagtgacactggagcagaaggacccacggtggcacctctccctttctccacggacatcggacatcctcaaaatcagactgtcaggtgggcagaagaaatccagactagtagaccacaaaccataactgaacaagactctaacaagaattcttcaacagcagaaattaacgaaacaacaacctcatctactgattttctggctagagcttatggttttgaaatggccaaagaatttgttacatcagcaccaaaaccatctgacttgtattatgaaccttctggagaaggatctggagaagtggatattgttgattcatttcacacttctgcaactactcaggcaaccagacaagaaagcagcaccacatttgtttctgatgggtccctggaaaaacatcctgaggtgccaagcgctaaagctgttactgctgatggattcccaacagtttcagtgatgctgcctcttcattcagagcagaacaaaagctcccctgatccaactagcacactgtcaaatacagtgtcatatgagaggtccacagacggtagtttccaagaccgtttcagggaattcgaggattccaccttaaaacctaacagaaaaaaacccactgaaaatattatcatagacctggacaaagaggacaaggatttaatattgacaattacagagagtaccatccttgaaattctacctgagctgacatcggataaaaatactatcatagatattgatcatactaaacctgtgtatgaagacattcttggaatgcaaacagatatagatacagaggtaccatcagaaccacatgacagtaatgatgaaagtaatgatgacagcactcaagttcaagagatctatgaggcagctgtcaacctttctttaactgaggaaacatttgagggctctgctgatgttctggctagctacactcaggcaacacatgatgaatcaatgacttatgaagatagaagccaactagatcacatgggctttcacttcacaactgggatccctgctcctagcacagaaacagaattagacgttttacttcccacggcaacatccctgccaattcctcgtaagtctgccacagttattccagagattgaaggaataaaagctgaagcaaaagccctggatgacatgtttgaatcaagcactttgtctgatggtcaagctattgcagaccaaagtgaaataataccaacattgggccaatttgaaaggactcaggaggagtatgaagacaaaaaacatgctggtccttcttttcagccagaattctcttcaggagctgaggaggcattagtagaccatactccctatctaagtattgctactacccaccttatggatcagagtgtaacagaggtgcctgatgtgatggaaggatccaatcccccatattacactgatacaacattagcagtttcaacatttgcgaagttgtcttctcagacaccatcatctcccctcactatctactcaggcagtgaagcctctggacacacagagatcccccagcccagtgctctgccaggaatagacgtcggctcatctgtaatgtccccacaggattcttttaaggaaattcatgtaaatattgaagcgactttcaaaccatcaagtgaggaataccttcacataactgagcctccctctttatctcctgacacaaaattagaaccttcagaagatgatggtaaacctgagttattagaagaaatggaagcttctcccacagaacttattgctgtggaaggaactgagattctccaagatttccaaaacaaaaccgatggtcaagtttctggagaagcaatcaagatgtttcccaccattaaaacacctgaggctggaactgttattacaactgccgatgaaattgaattagaaggtgctacacagtggccacactctacttctgcttctgccacctatggggtcgaggcaggtgtggtgccttggctaagtccacagacttctgagaggcccacgctttcttcttctccagaaataaaccctgaaactcaagcagctttaatcagagggcaggattccacgatagcagcatcagaacagcaagtggcagcgagaattcttgattccaatgatcaggcaacagtaaaccctgtggaatttaatactgaggttgcaacaccaccattttcccttctggagacttctaatgaaacagatttcctgattggcattaatgaagagtcagtggaaggcacggcaatctatttaccaggacctgatcgctgcaaaatgaacccgtgccttaacggaggcacctgttatcctactgaaacttcctacgtatgcacctgtgtgccaggatacagcggagaccagtgtgaacttgattttgatgaatgtcactctaatccctgtcgtaatggagccacttgtgttgatggttttaacacattcaggtgcctctgccttccaagttatgttggtgcactttgtgagcaagataccgagacatgtgactatggctggcacaaattccaagggcagtgctacaaatactttgcccatctcacaagcatcctgtctcacgaagaacaaatgtttgttaatcgtgtgggccatgattatcagtggataggcctcaatgacaagatgtttgagcatgacttccgttggactgatggcagcacactgcaatacgagaattggagacccaaccagccagacagcttcttttctgctggagaagactgtgttgtaatcatttggcatgagaatggccagtggaatgatgttccctgcaattaccatctcacctatacgtgcaagaaaggaacagttgcttgcggccagccccctgttgtagaaaatgccaagacctttggaaagatgaaacctcgttatgaaatcaactccctgattagataccactgcaaagatggtttcattcaacgtcaccttccaactatccggtgcttaggaaatggaagatgggctatacctaaaattacctgcatgaacccatctgcataccaaaggacttattctatgaaatactttaaaaattcctcatcagcaaaggacaattcaataaatacatccaaacatgatcatcgttggagccggaggtggcaggagtcgaggcgctgatccctaaaatggcgaacatgtgttttcatcatttcagccaaagtcctaacttcctgtgcctttcctatcacctcgagaagtaattatcagttggtttggatttttggaccaccgttcagtcattttgggttgccgtgctcccaaaacattttaaatgaaagtattggcattcaaaaagacagcagacaaaatgaaagaaaatgagagcagaaagtaagcatttccagcctatctaatttctttagttttctatttgcctccagtgcagtccatttcctaatgtataccagcctactgtactatttaaaatgctcaatttcagcaccgatggccatgtaaataagatgatttaatgttgattttaatcctgtatataaaataaaaagtcacaatgagtttgggcatatttaatgatgattatggagccttagaggtctttaatcattggttcggctgcttttatgtagtttaggctggaaatggtttcacttgctctttgactgtcagcaagactgaagatggcttttcctggacagctagaaaacacaaaatcttgtaggtcattgcacctatctcagccataggtgcagtttgcttctacatgatgctaaaggctgcgaatgggatcctgatggaactaaggactccaatgtcgaactcttctttgctgcattcctttttcttcacttacaagaaaggcctgaatggaggacttttctgtaaccaggaacattttttaggggtcaaagtgctaataattaactcaaccaggtctactttttaatggctttcataacactaactcataaggttaccgatcaatgcatttcatacggatatagacctagggctctggagggtgggggattgttaaaacacatgcaaaaaaaaaaaaaaaaaaagaaattttgtatatataaccattttaatcttttataaagttttgaatgttcatgtatgaatgctgcagctgtgaagcatacataaataaatgaagtaagccatactgatttaatttattggatgttattttccctaagacctgaaaatgaacatagtatgctagttatttttcagtgttagccttttactttcctcacacaatttggaatcatataatataggtactttgtccctgattaaataatgtgacggatagaatgcatcaagtgtttattatgaaaagagtggaaaagtatatagcttttagcaaaaggtgtttgcccattctaagaaatgagcgaatatatagaaatagtgtgggcatttcttcctgttaggtggagtgtatgtgttgacatttctccccatctcttcccactctgttttctccccattatttgaataaagtgactgctgaagatgactttgaatccttatccacttaatttaatgtttaaagaaaaacctgtaatggaaagtaagactccttccctaatttcagtttagagcaacttgaagaagagtagacaaaaaataaaatgcacatagaaaaagagaaaaagggcacaaagggattggcccaatattgattcttttttataaaacctcctttggcttagaaggaatgactctagctacaataatacacagtatgtttaagcaggttcccttggttgttgcattaaatgtaatccacctttaggtattttagagcacagaacaacactgtgttgatctagtaggtttctatttttcctttctctttacaatgcacataatactttcctgtatttatatcataacgtgtatagtgtaaaatgtgaatgactttttttgtgaatgaaaatctaaaatctttgtaactttttatatctgcttttgtttcaccaaagaaacctaaaatccttcttttactacacaaaacacaaacaaacaggcgccgacaaaattccccaggcccattacggaccattctacaagcgcccaaaaaagaataaaaaacggccctaaacgtgtggaagcatggctgaagacctgggtaaggacacaaaccagaaatgctgc

SEQ ID NO: 317232 - DNA, 4540 bp, Homo sapiens
gctgtccccaagccgattggtacttcttgtcaggaagaaacgccaagaggtgggagtgcctggggagggaggcaggcggtccctaccgcaggcgcggggagctgcctttccgcccctccgcctgctttccaagcctggactcttaggagtggctgaagctgcggagcgcttttggagcctgtgaatgaaccctcctcctctccctcctccttcttctcgctgagtctcctcctcggctctgacggtacagtgatataatgatgatgggtgtcacaacccgcatttgaacttgcaggcgagctgccccgagcctttctggggaagaactccaggcgtgcggacgcaacagccgagaacattaggtgttgtggacaggagctgggaccaagatcttcggccagccccgcatcctcccgcatcttccagcaccgtcccgcaccctccgcatccttccccgggccaccacgcttcctatgtgacccgcctgggcaacgccgaacccagtcgcgcagcgctgcagtgaattttccccccaaactgcaataagccgccttccaaggccaagatgttcataaatataaagagcatcttatggatgtgttcaaccttaatagtaacccatgcgctacataaagtcaaagtgggaaaaagcccaccggtgaggggctccctctctggaaaagtcagcctaccttgtcatttttcaacgatgcctactttgccacccagttacaacaccagtgaatttctccgcatcaaatggtctaagattgaagtggacaaaaatggaaaagatttgaaagagactactgtccttgtggcccaaaatggaaatatcaagattggtcaggactacaaagggagagtgtctgtgcccacacatcccgaggctgtgggcgatgcctccctcactgtggtcaagctgctggcaagtgatgcgggtctttaccgctgtgacgtcatgtacgggattgaagacacacaagacacggtgtcactgactgtggatggggttgtgtttcactacagggcggcaaccagcaggtacacactgaattttgaggctgctcagaaggcttgtttggacgttggggcagtcatagcaactccagagcagctctttgctgcctatgaagatggatttgagcagtgtgacgcaggctggctggctgatcagactgtcagatatcccatccgggctcccagagtaggctgttatggagataagatgggaaaggcaggagtcaggacttatggattccgttctccccaggaaacttacgatgtgtattgttatgtggatcatctggatggtgatgtgttccacctcactgtccccagtaaattcaccttcgaggaggctgcaaaagagtgtgaaaaccaggatgccaggctggcaacagtgggggaactccaggcggcatggaggaacggctttgaccagtgcgattacgggtggctgtcggatgccagcgtgcgccaccctgtgactgtggccagggcccagtgtggaggtggtctacttggggtgagaaccctgtatcgttttgagaaccagacaggcttccctccccctgatagcagatttgatgcctactgctttaaacgacctgatcgctgcaaaatgaacccgtgccttaacggaggcacctgttatcctactgaaacttcctacgtatgcacctgtgtgccaggatacagcggagaccagtgtgaacttgattttgatgaatgtcactctaatccctgtcgtaatggagccacttgtgttgatggttttaacacattcaggtgcctctgccttccaagttatgttggtgcactttgtgagcaagataccgagacatgtgactatggctggcacaaattccaagggcagtgctacaaatactttgcccatcgacgcacatgggatgcagctgaacgggaatgccgtctgcagggtgcccatctcacaagcatcctgtctcacgaagaacaaatgtttgttaatcgtgtgggccatgattatcagtggataggcctcaatgacaagatgtttgagcatgacttccgttggactgatggcagcacactgcaatacgagaattggagacccaaccagccagacagcttcttttctgctggagaagactgtgttgtaatcatttggcatgagaatggccagtggaatgatgttccctgcaattaccatctcacctatacgtgcaagaaaggaacagttgcttgcggccagccccctgttgtagaaaatgccaagacctttggaaagatgaaacctcgttatgaaatcaactccctgattagataccactgcaaagatggtttcattcaacgtcaccttccaactatccggtgcttaggaaatggaagatgggctatacctaaaattacctgcatgaacccatctgcataccaaaggacttattctatgaaatactttaaaaattcctcatcagcaaaggacaattcaataaatacatccaaacatgatcatcgttggagccggaggtggcaggagtcgaggcgctgatccctaaaatggcgaacatgtgttttcatcatttcagccaaagtcctaacttcctgtgcctttcctatcacctcgagaagtaattatcagttggtttggatttttggaccaccgttcagtcattttgggttgccgtgctcccaaaacattttaaatgaaagtattggcattcaaaaagacagcagacaaaatgaaagaaaatgagagcagaaagtaagcatttccagcctatctaatttctttagttttctatttgcctccagtgcagtccatttcctaatgtataccagcctactgtactatttaaaatgctcaatttcagcaccgatggccatgtaaataagatgatttaatgttgattttaatcctgtatataaaataaaaagtcacaatgagtttgggcatatttaatgatgattatggagccttagaggtctttaatcattggttcggctgcttttatgtagtttaggctggaaatggtttcacttgctctttgactgtcagcaagactgaagatggcttttcctggacagctagaaaacacaaaatcttgtaggtcattgcacctatctcagccataggtgcagtttgcttctacatgatgctaaaggctgcgaatgggatcctgatggaactaaggactccaatgtcgaactcttctttgctgcattcctttttcttcacttacaagaaaggcctgaatggaggacttttctgtaaccaggaacattttttaggggtcaaagtgctaataattaactcaaccaggtctactttttaatggctttcataacactaactcataaggttaccgatcaatgcatttcatacggatatagacctagggctctggagggtgggggattgttaaaacacatgcaaaaaaaaaaaaaaaaaaagaaattttgtatatataaccattttaatcttttataaagttttgaatgttcatgtatgaatgctgcagctgtgaagcatacataaataaatgaagtaagccatactgatttaatttattggatgttattttccctaagacctgaaaatgaacatagtatgctagttatttttcagtgttagccttttactttcctcacacaatttggaatcatataatataggtactttgtccctgattaaataatgtgacggatagaatgcatcaagtgtttattatgaaaagagtggaaaagtatatagcttttagcaaaaggtgtttgcccattctaagaaatgagcgaatatatagaaatagtgtgggcatttcttcctgttaggtggagtgtatgtgttgacatttctccccatctcttcccactctgttttctccccattatttgaataaagtgactgctgaagatgactttgaatccttatccacttaatttaatgtttaaagaaaaacctgtaatggaaagtaagactccttccctaatttcagtttagagcaacttgaagaagagtagacaaaaaataaaatgcacatagaaaaagagaaaaagggcacaaagggattggcccaatattgattcttttttataaaacctcctttggcttagaaggaatgactctagctacaataatacacagtatgtttaagcaggttcccttggttgttgcattaaatgtaatccacctttaggtattttagagcacagaacaacactgtgttgatctagtaggtttctatttttcctttctctttacaatgcacataatactttcctgtatttatatcataacgtgtatagtgtaaaatgtgaatgactttttttgtgaatgaaaatctaaaatctttgtaactttttatatctgcttttgtttcaccaaagaaacctaaaatccttcttttactacacaaaacacaaacaaacaggcgccgacaaaattccccaggcccattacggaccattctacaagcgcccaaaaaagaataaaaaacggccctaaacgtgtggaagcatggctgaagacctgggtaaggacacaaaccagaaatgctgc

SEQ ID NO: 317233 - DNA, 3386 bp, Homo sapiens
ccagctatgggcttcgagcgcatggtggtgatagtcttggactcaaggtccacaggatgatctgcacggaggtcccatgcatttcatctgctccatcagataatataacctgaatcctccatacgacgagtctttaatcagagggcaggattccacgatagcagcatcagaacagcaagtggcagcgagaattcttgattccaatgatcaggcaacagtaaaccctgtggaatttaatactgaggttgcaacaccaccattttcccttctggagacttctaatgaaacagatttcctgattggcattaatgaagagtcagtggaaggcacggcaatctatttaccagtttaaaggagtacatttggaacgtgtttttggaaaaagcatgttaatgtagcagaagagacttcagtgcacactttcgaagaaaaacagtttctgagcattaagtggacctgatcgctgcaaaatgaacccgtgccttaacggaggcacctgttatcctactgaaacttcctacgtatgcacctgtgtgccaggatacagcggagaccagtgtgaacttgattttgatgaatgtcactctaatccctgtcgtaatggagccacttgtgttgatggttttaacacattcaggtgcctctgccttccaagttatgttggtgcactttgtgagcaagataccgagacatgtgactatggctggcacaaattccaagggcagtgctacaaatactttgcccatcgacgcacatgggatgcagctgaacgggaatgccgtctgcagggtgcccatctcacaagcatcctgtctcacgaagaacaaatgtttgttaatcgtgtgggccatgattatcagtggataggcctcaatgacaagatgtttgagcatgacttccgttggactgatggcagcacactgcaatacgagaattggagacccaaccagccagacagcttcttttctgctggagaagactgtgttgtaatcatttggcatgagaatggccagtggaatgatgttccctgcaattaccatctcacctatacgtgcaagaaaggaacagttgcttgcggccagccccctgttgtagaaaatgccaagacctttggaaagatgaaacctcgttatgaaatcaactccctgattagataccactgcaaagatggtttcattcaacgtcaccttccaactatccggtgcttaggaaatggaagatgggctatacctaaaattacctgcatgaacccatctgcataccaaaggacttattctatgaaatactttaaaaattcctcatcagcaaaggacaattcaataaatacatccaaacatgatcatcgttggagccggaggtggcaggagtcgaggcgctgatccctaaaatggcgaacatgtgttttcatcatttcagccaaagtcctaacttcctgtgcctttcctatcacctcgagaagtaattatcagttggtttggatttttggaccaccgttcagtcattttgggttgccgtgctcccaaaacattttaaatgaaagtattggcattcaaaaagacagcagacaaaatgaaagaaaatgagagcagaaagtaagcatttccagcctatctaatttctttagttttctatttgcctccagtgcagtccatttcctaatgtataccagcctactgtactatttaaaatgctcaatttcagcaccgatggccatgtaaataagatgatttaatgttgattttaatcctgtatataaaataaaaagtcacaatgagtttgggcatatttaatgatgattatggagccttagaggtctttaatcattggttcggctgcttttatgtagtttaggctggaaatggtttcacttgctctttgactgtcagcaagactgaagatggcttttcctggacagctagaaaacacaaaatcttgtaggtcattgcacctatctcagccataggtgcagtttgcttctacatgatgctaaaggctgcgaatgggatcctgatggaactaaggactccaatgtcgaactcttctttgctgcattcctttttcttcacttacaagaaaggcctgaatggaggacttttctgtaaccaggaacattttttaggggtcaaagtgctaataattaactcaaccaggtctactttttaatggctttcataacactaactcataaggttaccgatcaatgcatttcatacggatatagacctagggctctggagggtgggggattgttaaaacacatgcaaaaaaaaaaaaaaaaaaagaaattttgtatatataaccattttaatcttttataaagttttgaatgttcatgtatgaatgctgcagctgtgaagcatacataaataaatgaagtaagccatactgatttaatttattggatgttattttccctaagacctgaaaatgaacatagtatgctagttatttttcagtgttagccttttactttcctcacacaatttggaatcatataatataggtactttgtccctgattaaataatgtgacggatagaatgcatcaagtgtttattatgaaaagagtggaaaagtatatagcttttagcaaaaggtgtttgcccattctaagaaatgagcgaatatatagaaatagtgtgggcatttcttcctgttaggtggagtgtatgtgttgacatttctccccatctcttcccactctgttttctccccattatttgaataaagtgactgctgaagatgactttgaatccttatccacttaatttaatgtttaaagaaaaacctgtaatggaaagtaagactccttccctaatttcagtttagagcaacttgaagaagagtagacaaaaaataaaatgcacatagaaaaagagaaaaagggcacaaagggattggcccaatattgattcttttttataaaacctcctttggcttagaaggaatgactctagctacaataatacacagtatgtttaagcaggttcccttggttgttgcattaaatgtaatccacctttaggtattttagagcacagaacaacactgtgttgatctagtaggtttctatttttcctttctctttacaatgcacataatactttcctgtatttatatcataacgtgtatagtgtaaaatgtgaatgactttttttgtgaatgaaaatctaaaatctttgtaactttttatatctgcttttgtttcaccaaagaaacctaaaatccttcttttactacacaaaacacaaacaaacaggcgccgacaaaattccccaggcccattacggaccattctacaagcgcccaaaaaagaataaaaaacggccctaaacgtgtggaagcatggctgaagacctgggtaaggacacaaaccagaaatgctgc

SEQ ID NO: 317234 - DNA, 10612 bp, Homo sapiens
gctgtccccaagccgattggtacttcttgtcaggaagaaacgccaagaggtgggagtgcctggggagggaggcaggcggtccctaccgcaggcgcggggagctgcctttccgcccctccgcctgctttccaagcctggactcttaggagtggctgaagctgcggagcgcttttggagcctgtgaatgaaccctcctcctctccctcctccttcttctcgctgagtctcctcctcggctctgacggtacagtgatataatgatgatgggtgtcacaacccgcatttgaacttgcaggcgagctgccccgagcctttctggggaagaactccaggcgtgcggacgcaacagccgagaacattaggtgttgtggacaggagctgggaccaagatcttcggccagccccgcatcctcccgcatcttccagcaccgtcccgcaccctccgcatccttccccgggccaccacgcttcctatgtgacccgcctgggcaacgccgaacccagtcgcgcagcgctgcagtgaattttccccccaaactgcaataagccgccttccaaggccaagatgttcataaatataaagagcatcttatggatgtgttcaaccttaatagtaacccatgcgctacataaagtcaaagtgggaaaaagcccaccggtgaggggctccctctctggaaaagtcagcctaccttgtcatttttcaacgatgcctactttgccacccagttacaacaccagtgaatttctccgcatcaaatggtctaagattgaagtggacaaaaatggaaaagatttgaaagagactactgtccttgtggcccaaaatggaaatatcaagattggtcaggactacaaagggagagtgtctgtgcccacacatcccgaggctgtgggcgatgcctccctcactgtggtcaagctgctggcaagtgatgcgggtctttaccgctgtgacgtcatgtacgggattgaagacacacaagacacggtgtcactgactgtggatggggttgtgtttcactacagggcggcaaccagcaggtacacactgaattttgaggctgctcagaaggcttgtttggacgttggggcagtcatagcaactccagagcagctctttgctgcctatgaagatggatttgagcagtgtgacgcaggctggctggctgatcagactgtcagatatcccatccgggctcccagagtaggctgttatggagataagatgggaaaggcaggagtcaggacttatggattccgttctccccaggaaacttacgatgtgtattgttatgtggatcatctggatggtgatgtgttccacctcactgtccccagtaaattcaccttcgaggaggctgcaaaagagtgtgaaaaccaggatgccaggctggcaacagtgggggaactccaggcggcatggaggaacggctttgaccagtgcgattacgggtggctgtcggatgccagcgtgcgccaccctgtgactgtggccagggcccagtgtggaggtggtctacttggggtgagaaccctgtatcgttttgagaaccagacaggcttccctccccctgatagcagatttgatgcctactgctttaaacctaaagaggctacaaccatcgatttgagtatcctcgcagaaactgcatcacccagtttatccaaagaaccacaaatggtttctgatagaactacaccaatcatccctttagttgatgaattacctgtcattccaacagagttccctcccgtgggaaatattgtcagttttgaacagaaagccacagtccaacctcaggctatcacagatagtttagccaccaaattacccacacctactggcagtaccaagaagccctgggatatggatgactactcaccttctgcttcaggacctcttggaaagctagacatatcagaaattaaggaagaagtgctccagagtacaactggcgtctctcattatgctacggattcatgggatggtgtcgtggaagataaacaaacacaagaatcggttacacagattgaacaaatagaagtgggtcctttggtaacatctatggaaatcttaaagcacattccttccaaggaattccctgtaactgaaacaccattggtaactgcaagaatgatcctggaatccaaaactgaaaagaaaatggtaagcactgtttctgaattggtaaccacaggtcactatggattcaccttgggagaagaggatgatgaagacagaacacttacagttggatctgatgagagcaccttgatctttgaccaaattcctgaagtcattacggtgtcaaagacttcagaagacaccatccacactcatttagaagacttggagtcagtctcagcatccacaactgtttcccctttaattatgcctgataataatggatcatccatggatgactgggaagagagacaaactagtggtaggataacggaagagtttcttggcaaatatctgtctactacaccttttccatcacagcatcgtacagaaatagaattgtttccttattctggtgataaaatattagtagagggaatttccacagttatttatccttctctacaaacagaaatgacacatagaagagaaagaacagaaacactaataccagagatgagaacagatacttatacagatgaaatacaagaagagatcactaaaagtccatttatgggaaaaacagaagaagaagtcttctctgggatgaaactctctacatctctctcagagccaattcatgttacagagtcttctgtggaaatgaccaagtcttttgatttcccaacattgataacaaagttaagtgcagagccaacagaagtaagagatatggaggaagactttacagcaactccaggtactacaaaatatgatgaaaatattacaacagtgcttttggcccatggtactttaagtgttgaagcagccactgtatcaaaatggtcatgggatgaagataatacaacatccaagcctttagagtctacagaaccttcagcctcttcaaaattgccccctgccttactcacaactgtggggatgaatggaaaggataaagacatcccaagtttcactgaagatggagcagatgaatttactcttattccagatagtactcaaaagcagttagaggaggttactgatgaagacatagcagcccatggaaaattcacaattagatttcagccaactacatcaactggtattgcagaaaagtcaactttgagagattctacaactgaagaaaaagttccacctatcacaagcactgaaggccaagtttatgcaaccatggaaggaagtgctttgggtgaagtagaagatgtggacctctctaagccagtatctactgttccccaatttgcacacacttcagaggtggaaggattagcatttgttagttatagtagcacccaagagcctactacttatgtagactcttcccataccattcctctttctgtaattcccaagacagactggggagtgttagtaccttctgttccatcagaagatgaagttctaggtgaaccctctcaagacatacttgtcattgatcagactcgccttgaagcgactatttctccagaaactatgagaacaacaaaaatcacagagggaacaactcaggaagaattcccttggaaagaacagactgcagagaaaccagttcctgctctcagttctacagcttggactcccaaggaggcagtaacaccactggatgaacaagagggcgatggatcagcatatacagtctctgaagatgaattgttgacaggttctgagagggtcccagttttagaaacaactccagttggaaaaattgatcacagtgtgtcttatccaccaggtgctgtaactgagcacaaagtgaaaacagatgaagtggtaacactaacaccacgcattgggccaaaagtatctttaagtccagggcctgaacaaaaatatgaaacagaaggtagtagtacaacaggatttacatcatctttgagtccttttagtacccacattacccagcttatggaagaaaccactactgagaaaacatccctagaggatattgatttaggctcaggattatttgaaaagcccaaagccacagaactcatagaattttcaacaatcaaagtcacagttccaagtgatattaccactgccttcagttcagtagacagacttcacacaacttcagcattcaagccatcttccgcgatcactaagaaaccacctctcatcgacagggaacctggtgaagaaacaaccagtgacatggtaatcattggagaatcaacatctcatgttcctcccactacccttgaagatattgtagccaaggaaacagaaaccgatattgatagagagtatttcacgacttcaagtcctcctgctacacagccaacaagaccacccactgtggaagacaaagaggcctttggacctcaggcgctttctacgccacagcccccagcaagcacaaaatttcaccctgacattaatgtttatattattgaggtcagagaaaataagacaggtcgaatgagtgatttgagtgtaattggtcatccaatagattcagaatctaaagaagatgaaccttgtagtgaagaaacagatccagtgcatgatctaatggctgaaattttacctgaattccctgacataattgaaatagacctataccacagtgaagaaaatgaagaagaagaagaagagtgtgcaaatgctactgatgtgacaaccaccccatctgtgcagtacataaatgggaagcatctcgttaccactgtgcccaaggacccagaagctgcagaagctaggcgtggccagtttgaaagtgttgcaccttctcaaaatttctcggacagctctgaaagtgatactcatccatttgtaatagccaaaacggaattgtctactgctgtgcaacctaatgaatctacagaaacaactgagtctcttgaagttacatggaagcctgagacttaccctgaaacatcagaacatttttcaggtggtgagcctgatgttttccccacagtcccattccatgaggaatttgaaagtggaacagccaaaaaaggggcagaatcagtcacagagagagatactgaagttggtcatcaggcacatgaacatactgaacctgtatctctgtttcctgaagagtcttcaggagagattgccattgaccaagaatctcagaaaatagcctttgcaagggctacagaagtaacatttggtgaagaggtagaaaaaagtacttctgtcacatacactcccactatagttccaagttctgcatcagcatatgtttcagaggaagaagcagttaccctaataggaaatccttggccagatgacctgttgtctaccaaagaaagctgggtagaagcaactcctagacaagttgtagagctctcagggagttcttcgattccaattacagaaggctctggagaagcagaagaagatgaagatacaatgttcaccatggtaactgatttatcacagagaaatactactgatacactcattactttagacactagcaggataatcacagaaagcttttttgaggttcctgcaaccaccatttatccagtttctgaacaaccttctgcaaaagtggtgcctaccaagtttgtaagtgaaacagacacttctgagtggatttccagtaccactgttgaggaaaagaaaaggaaggaggaggagggaactacaggtacggcttctacatttgaggtatattcatctacacagagatcggatcaattaattttaccctttgaattagaaagtccaaatgtagctacatctagtgattcaggtaccaggaaaagttttatgtccttgacaacaccaacacagtctgaaagggaaatgacagattctactcctgtctttacagaaacaaatacattagaaaatttgggggcacagaccactgagcacagcagtatccatcaacctggggttcaggaagggctgaccactctcccacgtagtcctgcctctgtctttatggagcagggctctggagaagctgctgccgacccagaaaccaccactgtttcttcattttcattaaacgtagagtatgcaattcaagccgaaaaggaagtagctggcactttgtctccgcatgtggaaactacattctccactgagccaacaggactggttttgagtacagtaatggacagagtagttgctgaaaatataacccaaacatccagggaaatagtgatttcagagcgattaggagaaccaaattatggggcagaaataaggggcttttccacaggttttcctttggaggaagatttcagtggtgactttagagaatactcaacagtgtctcatcccatagcaaaagaagaaacggtaatgatggaaggctctggagatgcagcatttagggacacccagacttcaccatctacagtacctacttcagttcacatcagtcacatatctgactcagaaggacccagtagcaccatggtcagcacttcagccttcccctgggaagagtttacatcctcagctgagggctcaggtgagcaactggtcacagtcagcagctctgttgttccagtgcttcccagtgctgtgcaaaagttttctggtacagcttcctccattatcgacgaaggattgggagaagtgggtactgtcaatgaaattgatagaagatccaccattttaccaacagcagaagtggaaggtacgaaagctccagtagagaaggaggaagtaaaggtcagtggcacagtttcaacaaactttccccaaactatagagccagccaaattatggtctaggcaagaagtcaaccctgtaagacaagaaattgaaagtgaaacaacatcagaggaacaaattcaagaagaaaagtcatttgaatcccctcaaaactctcctgcaacagaacaaacaatctttgattcacagacatttactgaaactgaactcaaaaccacagattattctgtactaacaacaaagaaaacttacagtgatgataaagaaatgaaggaggaagacacttctttagttaacatgtctactccagatccagatgcaaatggcttggaatcttacacaactctccctgaagctactgaaaagtcacattttttcttagctactgcattagtaactgaatctataccagctgaacatgtagtcacagattcaccaatcaaaaaggaagaaagtacaaaacattttccgaaaggcatgaggccaacaattcaagagtcagatactgagctcttattctctggactgggatcaggagaagaagttttacctactctaccaacagagtcagtgaattttactgaagtggaacaaatcaataacacattatatccccacacttctcaagtggaaagtacctcaagtgacaaaattgaagactttaacagaatggaaaatgtggcaaaagaagttggaccactcgtatctcaaacagacatctttgaaggtagtgggtcagtaaccagcacaacattaatagaaattttaagtgacactggagcagaaggacccacggtggcacctctccctttctccacggacatcggacatcctcaaaatcagactgtcaggtgggcagaagaaatccagactagtagaccacaaaccataactgaacaagactctaacaagaattcttcaacagcagaaattaacgaaacaacaacctcatctactgattttctggctagagcttatggttttgaaatggccaaagaatttgttacatcagcaccaaaaccatctgacttgtattatgaaccttctggagaaggatctggagaagtggatattgttgattcatttcacacttctgcaactactcaggcaaccagacaagaaagcagcaccacatttgtttctgatgggtccctggaaaaacatcctgaggtgccaagcgctaaagctgttactgctgatggattcccaacagtttcagtgatgctgcctcttcattcagagcagaacaaaagctcccctgatccaactagcacactgtcaaatacagtgtcatatgagaggtccacagacggtagtttccaagaccgtttcagggaattcgaggattccaccttaaaacctaacagaaaaaaacccactgaaaatattatcatagacctggacaaagaggacaaggatttaatattgacaattacagagagtaccatccttgaaattctacctgagctgacatcggataaaaatactatcatagatattgatcatactaaacctgtgtatgaagacattcttggaatgcaaacagatatagatacagaggtaccatcagaaccacatgacagtaatgatgaaagtaatgatgacagcactcaagttcaagagatctatgaggcagctgtcaacctttctttaactgaggaaacatttgagggctctgctgatgttctggctagctacactcaggcaacacatgatgaatcaatgacttatgaagatagaagccaactagatcacatgggctttcacttcacaactgggatccctgctcctagcacagaaacagaattagacgttttacttcccacggcaacatccctgccaattcctcgtaagtctgccacagttattccagagattgaaggaataaaagctgaagcaaaagccctggatgacatgtttgaatcaagcactttgtctgatggtcaagctattgcagaccaaagtgaaataataccaacattgggccaatttgaaaggactcaggaggagtatgaagacaaaaaacatgctggtccttcttttcagccagaattctcttcaggagctgaggaggcattagtagaccatactccctatctaagtattgctactacccaccttatggatcagagtgtaacagaggtgcctgatgtgatggaaggatccaatcccccatattacactgatacaacattagcagtttcaacatttgcgaagttgtcttctcagacaccatcatctcccctcactatctactcaggcagtgaagcctctggacacacagagatcccccagcccagtgctctgccaggaatagacgtcggctcatctgtaatgtccccacaggattcttttaaggaaattcatgtaaatattgaagcgactttcaaaccatcaagtgaggaataccttcacataactgagcctccctctttatctcctgacacaaaattagaactcttctttgctgcattcctttttcttcacttacaagaaaggcctgaatggaggacttttctgtaaccaggaacattttttaggggtcaaagtgctaataattaactcaaccaggtctactttttaatggctttcataacactaactcataaggttaccgatcaatgcatttcatacggatatagacctagggctctggagggtgggggattgttaaaacacatgcaaaaaaaaaaaaaaaaaaagaaattttgtatatataaccattttaatcttttataaagttttgaatgttcatgtatgaatgctgcagctgtgaagcatacataaataaatgaagtaagccatactgatttaatttattggatgttattttccctaagacctgaaaatgaacatagtatgctagttatttttcagtgttagccttttactttcctcacacaatttggaatcatataatataggtactttgtccctgattaaataatgtgacggatagaatgcatcaagtgtttattatgaaaagagtggaaaagtatatagcttttagcaaaaggtgtttgcccattctaagaaatgagcgaatatatagaaatagtgtgggcatttcttcctgttaggtggagtgtatgtgttgacatttctccccatctcttcccactctgttttctccccattatttgaataaagtgactgctgaagatgactttgaatccttatccacttaatttaatgtttaaagaaaaacctgtaatggaaagtaagactccttccctaatttcagtttagagcaacttgaagaagagtagacaaaaaataaaatgcacatagaaaaagagaaaaagggcacaaagggattggcccaatattgattcttttttataaaacctcctttggcttagaaggaatgactctagctacaataatacacagtatgtttaagcaggttcccttggttgttgcattaaatgtaatccacctttaggtattttagagcacagaacaacactgtgttgatctagtaggtttctatttttcctttctctttacaatgcacataatactttcctgtatttatatcataacgtgtatagtgtaaaatgtgaatgactttttttgtgaatgaaaatctaaaatctttgtaactttttatatctgcttttgtttcaccaaagaaacctaaaatccttcttttactacacaaaacacaaacaaacaggcgccgacaaaattccccaggcccattacggaccattctacaagcgcccaaaaaagaataaaaaacggccctaaacgtgtggaagcatggctgaagacctgggtaaggacacaaaccagaaatgctgc

SEQ ID NO: 317235 - DNA, 11238 bp, Homo sapiens
gctgtccccaagccgattggtacttcttgtcaggaagaaacgccaagaggtgggagtgcctggggagggaggcaggcggtccctaccgcaggcgcggggagctgcctttccgcccctccgcctgctttccaagcctggactcttaggagtggctgaagctgcggagcgcttttggagcctgtgaatgaaccctcctcctctccctcctccttcttctcgctgagtctcctcctcggctctgacggtacagtgatataatgatgatgggtgtcacaacccgcatttgaacttgcaggcgagctgccccgagcctttctggggaagaactccaggcgtgcggacgcaacagccgagaacattaggtgttgtggacaggagctgggaccaagatcttcggccagccccgcatcctcccgcatcttccagcaccgtcccgcaccctccgcatccttccccgggccaccacgcttcctatgtgacccgcctgggcaacgccgaacccagtcgcgcagcgctgcagtgaattttccccccaaactgcaataagccgccttccaaggccaagatgttcataaatataaagagcatcttatggatgtgttcaaccttaatagtaacccatgcgctacataaagtcaaagtgggaaaaagcccaccggtgaggggctccctctctggaaaagtcagcctaccttgtcatttttcaacgatgcctactttgccacccagttacaacaccagtgaatttctccgcatcaaatggtctaagattgaagtggacaaaaatggaaaagatttgaaagagactactgtccttgtggcccaaaatggaaatatcaagattggtcaggactacaaagggagagtgtctgtgcccacacatcccgaggctgtgggcgatgcctccctcactgtggtcaagctgctggcaagtgatgcgggtctttaccgctgtgacgtcatgtacgggattgaagacacacaagacacggtgtcactgactgtggatggggttgtgtttcactacagggcggcaaccagcaggtacacactgaattttgaggctgctcagaaggcttgtttggacgttggggcagtcatagcaactccagagcagctctttgctgcctatgaagatggatttgagcagtgtgacgcaggctggctggctgatcagactgtcagatatcccatccgggctcccagagtaggctgttatggagataagatgggaaaggcaggagtcaggacttatggattccgttctccccaggaaacttacgatgtgtattgttatgtggatcatctggatggtgatgtgttccacctcactgtccccagtaaattcaccttcgaggaggctgcaaaagagtgtgaaaaccaggatgccaggctggcaacagtgggggaactccaggcggcatggaggaacggctttgaccagtgcgattacgggtggctgtcggatgccagcgtgcgccaccctgtgactgtggccagggcccagtgtggaggtggtctacttggggtgagaaccctgtatcgttttgagaaccagacaggcttccctccccctgatagcagatttgatgcctactgctttaaacctaaagaggctacaaccatcgatttgagtatcctcgcagaaactgcatcacccagtttatccaaagaaccacaaatggtttctgatagaactacaccaatcatccctttagttgatgaattacctgtcattccaacagagttccctcccgtgggaaatattgtcagttttgaacagaaagccacagtccaacctcaggctatcacagatagtttagccaccaaattacccacacctactggcagtaccaagaagccctgggatatggatgactactcaccttctgcttcaggacctcttggaaagctagacatatcagaaattaaggaagaagtgctccagagtacaactggcgtctctcattatgctacggattcatgggatggtgtcgtggaagataaacaaacacaagaatcggttacacagattgaacaaatagaagtgggtcctttggtaacatctatggaaatcttaaagcacattccttccaaggaattccctgtaactgaaacaccattggtaactgcaagaatgatcctggaatccaaaactgaaaagaaaatggtaagcactgtttctgaattggtaaccacaggtcactatggattcaccttgggagaagaggatgatgaagacagaacacttacagttggatctgatgagagcaccttgatctttgaccaaattcctgaagtcattacggtgtcaaagacttcagaagacaccatccacactcatttagaagacttggagtcagtctcagcatccacaactgtttcccctttaattatgcctgataataatggatcatccatggatgactgggaagagagacaaactagtggtaggataacggaagagtttcttggcaaatatctgtctactacaccttttccatcacagcatcgtacagaaatagaattgtttccttattctggtgataaaatattagtagagggaatttccacagttatttatccttctctacaaacagaaatgacacatagaagagaaagaacagaaacactaataccagagatgagaacagatacttatacagatgaaatacaagaagagatcactaaaagtccatttatgggaaaaacagaagaagaagtcttctctgggatgaaactctctacatctctctcagagccaattcatgttacagagtcttctgtggaaatgaccaagtcttttgatttcccaacattgataacaaagttaagtgcagagccaacagaagtaagagatatggaggaagactttacagcaactccaggtactacaaaatatgatgaaaatattacaacagtgcttttggcccatggtactttaagtgttgaagcagccactgtatcaaaatggtcatgggatgaagataatacaacatccaagcctttagagtctacagaaccttcagcctcttcaaaattgccccctgccttactcacaactgtggggatgaatggaaaggataaagacatcccaagtttcactgaagatggagcagatgaatttactcttattccagatagtactcaaaagcagttagaggaggttactgatgaagacatagcagcccatggaaaattcacaattagatttcagccaactacatcaactggtattgcagaaaagtcaactttgagagattctacaactgaagaaaaagttccacctatcacaagcactgaaggccaagtttatgcaaccatggaaggaagtgctttgggtgaagtagaagatgtggacctctctaagccagtatctactgttccccaatttgcacacacttcagaggtggaaggattagcatttgttagttatagtagcacccaagagcctactacttatgtagactcttcccataccattcctctttctgtaattcccaagacagactggggagtgttagtaccttctgttccatcagaagatgaagttctaggtgaaccctctcaagacatacttgtcattgatcagactcgccttgaagcgactatttctccagaaactatgagaacaacaaaaatcacagagggaacaactcaggaagaattcccttggaaagaacagactgcagagaaaccagttcctgctctcagttctacagcttggactcccaaggaggcagtaacaccactggatgaacaagagggcgatggatcagcatatacagtctctgaagatgaattgttgacaggttctgagagggtcccagttttagaaacaactccagttggaaaaattgatcacagtgtgtcttatccaccaggtgctgtaactgagcacaaagtgaaaacagatgaagtggtaacactaacaccacgcattgggccaaaagtatctttaagtccagggcctgaacaaaaatatgaaacagaaggtagtagtacaacaggatttacatcatctttgagtccttttagtacccacattacccagcttatggaagaaaccactactgagaaaacatccctagaggatattgatttaggctcaggattatttgaaaagcccaaagccacagaactcatagaattttcaacaatcaaagtcacagttccaagtgatattaccactgccttcagttcagtagacagacttcacacaacttcagcattcaagccatcttccgcgatcactaagaaaccacctctcatcgacagggaacctggtgaagaaacaaccagtgacatggtaatcattggagaatcaacatctcatgttcctcccactacccttgaagatattgtagccaaggaaacagaaaccgatattgatagagagtatttcacgacttcaagtcctcctgctacacagccaacaagaccacccactgtggaagacaaagaggcctttggacctcaggcgctttctacgccacagcccccagcaagcacaaaatttcaccctgacattaatgtttatattattgaggtcagagaaaataagacaggtcgaatgagtgatttgagtgtaattggtcatccaatagattcagaatctaaagaagatgaaccttgtagtgaagaaacagatccagtgcatgatctaatggctgaaattttacctgaattccctgacataattgaaatagacctataccacagtgaagaaaatgaagaagaagaagaagagtgtgcaaatgctactgatgtgacaaccaccccatctgtgcagtacataaatgggaagcatctcgttaccactgtgcccaaggacccagaagctgcagaagctaggcgtggccagtttgaaagtgttgcaccttctcaaaatttctcggacagctctgaaagtgatactcatccatttgtaatagccaaaacggaattgtctactgctgtgcaacctaatgaatctacagaaacaactgagtctcttgaagttacatggaagcctgagacttaccctgaaacatcagaacatttttcaggtggtgagcctgatgttttccccacagtcccattccatgaggaatttgaaagtggaacagccaaaaaaggggcagaatcagtcacagagagagatactgaagttggtcatcaggcacatgaacatactgaacctgtatctctgtttcctgaagagtcttcaggagagattgccattgaccaagaatctcagaaaatagcctttgcaagggctacagaagtaacatttggtgaagaggtagaaaaaagtacttctgtcacatacactcccactatagttccaagttctgcatcagcatatgtttcagaggaagaagcagttaccctaataggaaatccttggccagatgacctgttgtctaccaaagaaagctgggtagaagcaactcctagacaagttgtagagctctcagggagttcttcgattccaattacagaaggctctggagaagcagaagaagatgaagatacaatgttcaccatggtaactgatttatcacagagaaatactactgatacactcattactttagacactagcaggataatcacagaaagcttttttgaggttcctgcaaccaccatttatccagtttctgaacaaccttctgcaaaagtggtgcctaccaagtttgtaagtgaaacagacacttctgagtggatttccagtaccactgttgaggaaaagaaaaggaaggaggaggagggaactacaggtacggcttctacatttgaggtatattcatctacacagagatcggatcaattaattttaccctttgaattagaaagtccaaatgtagctacatctagtgattcaggtaccaggaaaagttttatgtccttgacaacaccaacacagtctgaaagggaaatgacagattctactcctgtctttacagaaacaaatacattagaaaatttgggggcacagaccactgagcacagcagtatccatcaacctggggttcaggaagggctgaccactctcccacgtagtcctgcctctgtctttatggagcagggctctggagaagctgctgccgacccagaaaccaccactgtttcttcattttcattaaacgtagagtatgcaattcaagccgaaaaggaagtagctggcactttgtctccgcatgtggaaactacattctccactgagccaacaggactggttttgagtacagtaatggacagagtagttgctgaaaatataacccaaacatccagggaaatagtgatttcagagcgattaggagaaccaaattatggggcagaaataaggggcttttccacaggttttcctttggaggaagatttcagtggtgactttagagaatactcaacagtgtctcatcccatagcaaaagaagaaacggtaatgatggaaggctctggagatgcagcatttagggacacccagacttcaccatctacagtacctacttcagttcacatcagtcacatatctgactcagaaggacccagtagcaccatggtcagcacttcagccttcccctgggaagagtttacatcctcagctgagggctcaggtgagcaactggtcacagtcagcagctctgttgttccagtgcttcccagtgctgtgcaaaagttttctggtacagcttcctccattatcgacgaaggattgggagaagtgggtactgtcaatgaaattgatagaagatccaccattttaccaacagcagaagtggaaggtacgaaagctccagtagagaaggaggaagtaaaggtcagtggcacagtttcaacaaactttccccaaactatagagccagccaaattatggtctaggcaagaagtcaaccctgtaagacaagaaattgaaagtgaaacaacatcagaggaacaaattcaagaagaaaagtcatttgaatcccctcaaaactctcctgcaacagaacaaacaatctttgattcacagacatttactgaaactgaactcaaaaccacagattattctgtactaacaacaaagaaaacttacagtgatgataaagaaatgaaggaggaagacacttctttagttaacatgtctactccagatccagatgcaaatggcttggaatcttacacaactctccctgaagctactgaaaagtcacattttttcttagctactgcattagtaactgaatctataccagctgaacatgtagtcacagattcaccaatcaaaaaggaagaaagtacaaaacattttccgaaaggcatgaggccaacaattcaagagtcagatactgagctcttattctctggactgggatcaggagaagaagttttacctactctaccaacagagtcagtgaattttactgaagtggaacaaatcaataacacattatatccccacacttctcaagtggaaagtacctcaagtgacaaaattgaagactttaacagaatggaaaatgtggcaaaagaagttggaccactcgtatctcaaacagacatctttgaaggtagtgggtcagtaaccagcacaacattaatagaaattttaagtgacactggagcagaaggacccacggtggcacctctccctttctccacggacatcggacatcctcaaaatcagactgtcaggtgggcagaagaaatccagactagtagaccacaaaccataactgaacaagactctaacaagaattcttcaacagcagaaattaacgaaacaacaacctcatctactgattttctggctagagcttatggttttgaaatggccaaagaatttgttacatcagcaccaaaaccatctgacttgtattatgaaccttctggagaaggatctggagaagtggatattgttgattcatttcacacttctgcaactactcaggcaaccagacaagaaagcagcaccacatttgtttctgatgggtccctggaaaaacatcctgaggtgccaagcgctaaagctgttactgctgatggattcccaacagtttcagtgatgctgcctcttcattcagagcagaacaaaagctcccctgatccaactagcacactgtcaaatacagtgtcatatgagaggtccacagacggtagtttccaagaccgtttcagggaattcgaggattccaccttaaaacctaacagaaaaaaacccactgaaaatattatcatagacctggacaaagaggacaaggatttaatattgacaattacagagagtaccatccttgaaattctacctgagctgacatcggataaaaatactatcatagatattgatcatactaaacctgtgtatgaagacattcttggaatgcaaacagatatagatacagaggtaccatcagaaccacatgacagtaatgatgaaagtaatgatgacagcactcaagttcaagagatctatgaggcagctgtcaacctttctttaactgaggaaacatttgagggctctgctgatgttctggctagctacactcaggcaacacatgatgaatcaatgacttatgaagatagaagccaactagatcacatgggctttcacttcacaactgggatccctgctcctagcacagaaacagaattagacgttttacttcccacggcaacatccctgccaattcctcgtaagtctgccacagttattccagagattgaaggaataaaagctgaagcaaaagccctggatgacatgtttgaatcaagcactttgtctgatggtcaagctattgcagaccaaagtgaaataataccaacattgggccaatttgaaaggactcaggaggagtatgaagacaaaaaacatgctggtccttcttttcagccagaattctcttcaggagctgaggaggcattagtagaccatactccctatctaagtattgctactacccaccttatggatcagagtgtaacagaggtgcctgatgtgatggaaggatccaatcccccatattacactgatacaacattagcagtttcaacatttgcgaagttgtcttctcagacaccatcatctcccctcactatctactcaggcagtgaagcctctggacacacagagatcccccagcccagtgctctgccaggaatagacgtcggctcatctgtaatgtccccacaggattcttttaaggaaattcatgtaaatattgaagcgactttcaaaccatcaagtgaggaataccttcacataactgagcctccctctttatctcctgacacaaaattagaaccttcagaagatgatggtaaacctgagttattagaagaaatggaagcttctcccacagaacttattgctgtggaaggaactgagattctccaagatttccaaaacaaaaccgatggtcaagtttctggagaagcaatcaagatgtttcccaccattaaaacacctgaggctggaactgttattacaactgccgatgaaattgaattagaaggtgctacacagtggccacactctacttctgcttctgccacctatggggtcgaggcaggtgtggtgccttggctaagtccacagacttctgagaggcccacgctttcttcttctccagaaataaaccctgaaactcaagcagctttaatcagagggcaggattccacgatagcagcatcagaacagcaagtggcagcgagaattcttgattccaatgatcaggcaacagtaaaccctgtggaatttaatactgaggttgcaacaccaccattttcccttctggagacttctaatgaaacagatttcctgattggcattaatgaagagtcagtggaaggcacggcaatctatttaccaggacctgatcgctgcaaaatgaacccgtgccttaacggaggcacctgttatcctactgaaacttcctacgtatgcacctgtgtgccaggatacagcggagaccagtgtgaacttgattttgatgaatgtcactctaatccctgtcgtaatggagccacttgtgttgatggttttaacacattcaggtgcctctgccttccaagttatgttggtgcactttgtgagcaagataccgagacatgtgactatggctggcacaaattccaagggcagtgctacaaatactttgcccatcgacgcacatgggatgcagctgaacgggaatgccgtctgcagggtgcccatctcacaagcatcctgtctcacgaagaacaaatgtttgttaatcgtgtgggccatgattatcagtggataggcctcaatgacaagatgtttgagcatgacttccgttggactgatggcagcacactgcaatacgagaattggagacccaaccagccagacagcttcttttctgctggagaagactgtgttgtaatcatttggcatgagaatggccagtggaatgatgttccctgcaattaccatctcacctatacgtgcaagaaaggaacagttgcttgcggccagccccctgttgtagaaaatgccaagacctttggaaagatgaaacctcgttatgaaatcaactccctgattagataccactgcaaagatggtttcattcaacgtcaccttccaactatccggtgcttaggaaatggaagatgggctatacctaaaattacctgcatgaacccatctgcataccaaaggacttattctatgaaatactttaaaaattcctcatcagcaaaggacaattcaataaatacatccaaacatgatcatcgttggagccggaggtggcaggagtcgaggcgctgatccctaaaatggcgaacatgtgttttcatcatttcagccaaagtcctaacttcctgtgcctttcctatcacctcgagaagtaattatcagttggtttggatttttggaccaccgttcagtcattttgggttgccgtgctcccaaaacattttaaatgaaagtattggcattcaaaaagacagcagacaaaatgaaagaaaatgagagcagaaagtaagcatttccagcctatctaatttctttagttttctatttgcctccagtgcagtccatttcctaatgtataccagcctactgtactatttaaaatgctcaatttcagcaccgatggccatgtaattccatgcttactgtgatttaatctgtctataagtaaagtccaagcacttggctattaccaccctctgagcccaaggcttagcatggacgagagaagaaatagcggaacactcaagcctatgggaccagacacggtaccgcgc

SEQ ID NO: 317236 - DNA, 10700 bp, Homo sapiens
gctgtccccaagccgattggtacttcttgtcaggaagaaacgccaagaggtgggagtgcctggggagggaggcaggcggtccctaccgcaggcgcggggagctgcctttccgcccctccgcctgctttccaagcctggactcttaggagtggctgaagctgcggagcgcttttggagcctgtgaatgaaccctcctcctctccctcctccttcttctcgctgagtctcctcctcggctctgacggtacagtgatataatgatgatgggtgtcacaacccgcatttgaacttgcaggcgagctgccccgagcctttctggggaagaactccaggcgtgcggacgcaacagccgagaacattaggtgttgtggacaggagctgggaccaagatcttcggccagccccgcatcctcccgcatcttccagcaccgtcccgcaccctccgcatccttccccgggccaccacgcttcctatgtgacccgcctgggcaacgccgaacccagtcgcgcagcgctgcagtgaattttccccccaaactgcaataagccgccttccaaggccaagatgttcataaatataaagagcatcttatggatgtgttcaaccttaatagtaacccatgcgctacataaagtcaaagtgggaaaaagcccaccggtgaggggctccctctctggaaaagtcagcctaccttgtcatttttcaacgatgcctactttgccacccagttacaacaccagtgaatttctccgcatcaaatggtctaagattgaagtggacaaaaatggaaaagatttgaaagagactactgtccttgtggcccaaaatggaaatatcaagattggtcaggactacaaagggagagtgtctgtgcccacacatcccgaggctgtgggcgatgcctccctcactgtggtcaagctgctggcaagtgatgcgggtctttaccgctgtgacgtcatgtacgggattgaagacacacaagacacggtgtcactgactgtggatggggttgtgtttcactacagggcggcaaccagcaggtacacactgaattttgaggctgctcagaaggcttgtttggacgttggggcagtcatagcaactccagagcagctctttgctgcctatgaagatggatttgagcagtgtgacgcaggctggctggctgatcagactgtcagatatcccatccgggctcccagagtaggctgttatggagataagatgggaaaggcaggagtcaggacttatggattccgttctccccaggaaacttacgatgtgtattgttatgtggatcatctggatggtgatgtgttccacctcactgtccccagtaaattcaccttcgaggaggctgcaaaagagtgtgaaaaccaggatgccaggctggcaacagtgggggaactccaggcggcatggaggaacggctttgaccagtgcgattacgggtggctgtcggatgccagcgtgcgccaccctgtgactgtggccagggcccagtgtggaggtggtctacttggggtgagaaccctgtatcgttttgagaaccagacaggcttccctccccctgatagcagatttgatgcctactgctttaaacctaaagaggctacaaccatcgatttgagtatcctcgcagaaactgcatcacccagtttatccaaagaaccacaaatggtttctgatagaactacaccaatcatccctttagttgatgaattacctgtcattccaacagagttccctcccgtgggaaatattgtcagttttgaacagaaagccacagtccaacctcaggctatcacagatagtttagccaccaaattacccacacctactggcagtaccaagaagccctgggatatggatgactactcaccttctgcttcaggacctcttggaaagctagacatatcagaaattaaggaagaagtgctccagagtacaactggcgtctctcattatgctacggattcatgggatggtgtcgtggaagataaacaaacacaagaatcggttacacagattgaacaaatagaagtgggtcctttggtaacatctatggaaatcttaaagcacattccttccaaggaattccctgtaactgaaacaccattggtaactgcaagaatgatcctggaatccaaaactgaaaagaaaatggtaagcactgtttctgaattggtaaccacaggtcactatggattcaccttgggagaagaggatgatgaagacagaacacttacagttggatctgatgagagcaccttgatctttgaccaaattcctgaagtcattacggtgtcaaagacttcagaagacaccatccacactcatttagaagacttggagtcagtctcagcatccacaactgtttcccctttaattatgcctgataataatggatcatccatggatgactgggaagagagacaaactagtggtaggataacggaagagtttcttggcaaatatctgtctactacaccttttccatcacagcatcgtacagaaatagaattgtttccttattctggtgataaaatattagtagagggaatttccacagttatttatccttctctacaaacagaaatgacacatagaagagaaagaacagaaacactaataccagagatgagaacagatacttatacagatgaaatacaagaagagatcactaaaagtccatttatgggaaaaacagaagaagaagtcttctctgggatgaaactctctacatctctctcagagccaattcatgttacagagtcttctgtggaaatgaccaagtcttttgatttcccaacattgataacaaagttaagtgcagagccaacagaagtaagagatatggaggaagactttacagcaactccaggtactacaaaatatgatgaaaatattacaacagtgcttttggcccatggtactttaagtgttgaagcagccactgtatcaaaatggtcatgggatgaagataatacaacatccaagcctttagagtctacagaaccttcagcctcttcaaaattgccccctgccttactcacaactgtggggatgaatggaaaggataaagacatcccaagtttcactgaagatggagcagatgaatttactcttattccagatagtactcaaaagcagttagaggaggttactgatgaagacatagcagcccatggaaaattcacaattagatttcagccaactacatcaactggtattgcagaaaagtcaactttgagagattctacaactgaagaaaaagttccacctatcacaagcactgaaggccaagtttatgcaaccatggaaggaagtgctttgggtgaagtagaagatgtggacctctctaagccagtatctactgttccccaatttgcacacacttcagaggtggaaggattagcatttgttagttatagtagcacccaagagcctactacttatgtagactcttcccataccattcctctttctgtaattcccaagacagactggggagtgttagtaccttctgttccatcagaagatgaagttctaggtgaaccctctcaagacatacttgtcattgatcagactcgccttgaagcgactatttctccagaaactatgagaacaacaaaaatcacagagggaacaactcaggaagaattcccttggaaagaacagactgcagagaaaccagttcctgctctcagttctacagcttggactcccaaggaggcagtaacaccactggatgaacaagagggcgatggatcagcatatacagtctctgaagatgaattgttgacaggttctgagagggtcccagttttagaaacaactccagttggaaaaattgatcacagtgtgtcttatccaccaggtgctgtaactgagcacaaagtgaaaacagatgaagtggtaacactaacaccacgcattgggccaaaagtatctttaagtccagggcctgaacaaaaatatgaaacagaaggtagtagtacaacaggatttacatcatctttgagtccttttagtacccacattacccagcttatggaagaaaccactactgagaaaacatccctagaggatattgatttaggctcaggattatttgaaaagcccaaagccacagaactcatagaattttcaacaatcaaagtcacagttccaagtgatattaccactgccttcagttcagtagacagacttcacacaacttcagcattcaagccatcttccgcgatcactaagaaaccacctctcatcgacagggaacctggtgaagaaacaaccagtgacatggtaatcattggagaatcaacatctcatgttcctcccactacccttgaagatattgtagccaaggaaacagaaaccgatattgatagagagtatttcacgacttcaagtcctcctgctacacagccaacaagaccacccactgtggaagacaaagaggcctttggacctcaggcgctttctacgccacagcccccagcaagcacaaaatttcaccctgacattaatgtttatattattgaggtcagagaaaataagacaggtcgaatgagtgatttgagtgtaattggtcatccaatagattcagaatctaaagaagatgaaccttgtagtgaagaaacagatccagtgcatgatctaatggctgaaattttacctgaattccctgacataattgaaatagacctataccacagtgaagaaaatgaagaagaagaagaagagtgtgcaaatgctactgatgtgacaaccaccccatctgtgcagtacataaatgggaagcatctcgttaccactgtgcccaaggacccagaagctgcagaagctaggcgtggccagtttgaaagtgttgcaccttctcaaaatttctcggacagctctgaaagtgatactcatccatttgtaatagccaaaacggaattgtctactgctgtgcaacctaatgaatctacagaaacaactgagtctcttgaagttacatggaagcctgagacttaccctgaaacatcagaacatttttcaggtggtgagcctgatgttttccccacagtcccattccatgaggaatttgaaagtggaacagccaaaaaaggggcagaatcagtcacagagagagatactgaagttggtcatcaggcacatgaacatactgaacctgtatctctgtttcctgaagagtcttcaggagagattgccattgaccaagaatctcagaaaatagcctttgcaagggctacagaagtaacatttggtgaagaggtagaaaaaagtacttctgtcacatacactcccactatagttccaagttctgcatcagcatatgtttcagaggaagaagcagttaccctaataggaaatccttggccagatgacctgttgtctaccaaagaaagctgggtagaagcaactcctagacaagttgtagagctctcagggagttcttcgattccaattacagaaggctctggagaagcagaagaagatgaagatacaatgttcaccatggtaactgatttatcacagagaaatactactgatacactcattactttagacactagcaggataatcacagaaagcttttttgaggttcctgcaaccaccatttatccagtttctgaacaaccttctgcaaaagtggtgcctaccaagtttgtaagtgaaacagacacttctgagtggatttccagtaccactgttgaggaaaagaaaaggaaggaggaggagggaactacaggtacggcttctacatttgaggtatattcatctacacagagatcggatcaattaattttaccctttgaattagaaagtccaaatgtagctacatctagtgattcaggtaccaggaaaagttttatgtccttgacaacaccaacacagtctgaaagggaaatgacagattctactcctgtctttacagaaacaaatacattagaaaatttgggggcacagaccactgagcacagcagtatccatcaacctggggttcaggaagggctgaccactctcccacgtagtcctgcctctgtctttatggagcagggctctggagaagctgctgccgacccagaaaccaccactgtttcttcattttcattaaacgtagagtatgcaattcaagccgaaaaggaagtagctggcactttgtctccgcatgtggaaactacattctccactgagccaacaggactggttttgagtacagtaatggacagagtagttgctgaaaatataacccaaacatccagggaaatagtgatttcagagcgattaggagaaccaaattatggggcagaaataaggggcttttccacaggttttcctttggaggaagatttcagtggtgactttagagaatactcaacagtgtctcatcccatagcaaaagaagaaacggtaatgatggaaggctctggagatgcagcatttagggacacccagacttcaccatctacagtacctacttcagttcacatcagtcacatatctgactcagaaggacccagtagcaccatggtcagcacttcagccttcccctgggaagagtttacatcctcagctgagggctcaggtgagcaactggtcacagtcagcagctctgttgttccagtgcttcccagtgctgtgcaaaagttttctggtacagcttcctccattatcgacgaaggattgggagaagtgggtactgtcaatgaaattgatagaagatccaccattttaccaacagcagaagtggaaggtacgaaagctccagtagagaaggaggaagtaaaggtcagtggcacagtttcaacaaactttccccaaactatagagccagccaaattatggtctaggcaagaagtcaaccctgtaagacaagaaattgaaagtgaaacaacatcagaggaacaaattcaagaagaaaagtcatttgaatcccctcaaaactctcctgcaacagaacaaacaatctttgattcacagacatttactgaaactgaactcaaaaccacagattattctgtactaacaacaaagaaaacttacagtgatgataaagaaatgaaggaggaagacacttctttagttaacatgtctactccagatccagatgcaaatggcttggaatcttacacaactctccctgaagctactgaaaagtcacattttttcttagctactgcattagtaactgaatctataccagctgaacatgtagtcacagattcaccaatcaaaaaggaagaaagtacaaaacattttccgaaaggcatgaggccaacaattcaagagtcagatactgagctcttattctctggactgggatcaggagaagaagttttacctactctaccaacagagtcagtgaattttactgaagtggaacaaatcaataacacattatatccccacacttctcaagtggaaagtacctcaagtgacaaaattgaagactttaacagaatggaaaatgtggcaaaagaagttggaccactcgtatctcaaacagacatctttgaaggtagtgggtcagtaaccagcacaacattaatagaaattttaagtgacactggagcagaaggacccacggtggcacctctccctttctccacggacatcggacatcctcaaaatcagactgtcaggtgggcagaagaaatccagactagtagaccacaaaccataactgaacaagactctaacaagaattcttcaacagcagaaattaacgaaacaacaacctcatctactgattttctggctagagcttatggttttgaaatggccaaagaatttgttacatcagcaccaaaaccatctgacttgtattatgaaccttctggagaaggatctggagaagtggatattgttgattcatttcacacttctgcaactactcaggcaaccagacaagaaagcagcaccacatttgtttctgatgggtccctggaaaaacatcctgaggtgccaagcgctaaagctgttactgctgatggattcccaacagtttcagtgatgctgcctcttcattcagagcagaacaaaagctcccctgatccaactagcacactgtcaaatacagtgtcatatgagaggtccacagacggtagtttccaagaccgtttcagggaattcgaggattccaccttaaaacctaacagaaaaaaacccactgaaaatattatcatagacctggacaaagaggacaaggatttaatattgacaattacagagagtaccatccttgaaattctacctgagctgacatcggataaaaatactatcatagatattgatcatactaaacctgtgtatgaagacattcttggaatgcaaacagatatagatacagaggtaccatcagaaccacatgacagtaatgatgaaagtaatgatgacagcactcaagttcaagagatctatgaggcagctgtcaacctttctttaactgaggaaacatttgagggctctgctgatgttctggctagctacactcaggcaacacatgatgaatcaatgacttatgaagatagaagccaactagatcacatgggctttcacttcacaactgggatccctgctcctagcacagaaacagaattagacgttttacttcccacggcaacatccctgccaattcctcgtaagtctgccacagttattccagagattgaaggaataaaagctgaagcaaaagccctggatgacatgtttgaatcaagcactttgtctgatggtcaagctattgcagaccaaagtgaaataataccaacattgggccaatttgaaaggactcaggaggagtatgaagacaaaaaacatgctggtccttcttttcagccagaattctcttcaggagctgaggaggcattagtagaccatactccctatctaagtattgctactacccaccttatggatcagagtgtaacagaggtgcctgatgtgatggaaggatccaatcccccatattacactgatacaacattagcagtttcaacatttgcgaagttgtcttctcagacaccatcatctcccctcactatctactcaggcagtgaagcctctggacacacagagatcccccagcccagtgctctgccaggaatagacgtcggctcatctgtaatgtccccacaggattcttttaaggaaattcatgtaaatattgaagcgactttcaaaccatcaagtgaggaataccttcacataactgagcctccctctttatctcctgacacaaaattagaaccttcagaagatgatggtaaacctgagttattagaagaaatggaagcttctcccacagaacttattgctgtggaaggaactgagattctccaagatttccaaaacaaaaccgatggtcaagtttctggagaagcaatcaagatgtttcccaccattaaaacacctgaggctggaactgttattacaactgccgatgaaattgaattagaaggtgctacacagtggccacactctacttctgcttctgccacctatggggtcgaggcaggtgtggtgccttggctaagtccacagacttctgagaggcccacgctttcttcttctccagaaataaaccctgaaactcaagcagctttaatcagagggcaggattccacgatagcagcatcagaacagcaagtggcagcgagaattcttgattccaatgatcaggcaacagtaaaccctgtggaatttaatactgaggttgcaacaccaccattttcccttctggagacttctaatgaaacagatttcctgattggcattaatgaagagtcagtggaaggcacggcaatctatttaccaggacctgatcgctgcaaaatgaacccgtgccttaacggaggcacctgttatcctactgaaacttcctacgtatgcacctgtgtgccaggatacagcggagaccagtgtgaacttgattttgatgaatgtcactctaatccctgtcgtaatggagccacttgtgttgatggttttaacacattcaggtgcctctgccttccaagttatgttggtgcactttgtgagcaagataccgagacatgtgactatggctggcacaaattccaagggcagtgctacaaatactttgcccatcgacgcacatgggatgcagctgaacgggaatgccgtctgcagggtgcccatctcacaagcatcctgtctcacgaagaacaaatgtttgttaatcgtgtgggccatgattatcagtggataggcctcaatgacaagatgtttgagcatgacttccgttggactgatggcagcacactgcaatacgagaattggagacccaaccagccagacagcttcttttctgctggagaagactgtgttgtaatcatttggcatgagaatggccagtggaatgatgttccctgcaattaccatctcacctatacgtgcaagaaaggaacagttgcttgcggccagccccctgttgtagaaaatgccaagacctttggaaagatgaaacctcgttatgaaatcaactccctgattagataccactgcaaagatggtttcattcaacgtcaccttccaactatccggtgcttaggaaatggaagatgggctatacctaaaattacctgcatgaacccatctgcataccaaaggacttattctatgaaatactttaaaaattccgtcgctgcactccgggtaccgagct

SEQ ID NO: 317237 - DNA, 8630 bp, Homo sapiens
gctgtccccaagccgattggtacttcttgtcaggaagaaacgccaagaggtgggagtgcctggggagggaggcaggcggtccctaccgcaggcgcggggagctgcctttccgcccctccgcctgctttccaagcctggactcttaggagtggctgaagctgcggagcgcttttggagcctgtgaatgaaccctcctcctctccctcctccttcttctcgctgagtctcctcctcggctctgacggtacagtgatataatgatgatgggtgtcacaacccgcatttgaacttgcaggcgagctgccccgagcctttctggggaagaactccaggcgtgcggacgcaacagccgagaacattaggtgttgtggacaggagctgggaccaagatcttcggccagccccgcatcctcccgcatcttccagcaccgtcccgcaccctccgcatccttccccgggccaccacgcttcctatgtgacccgcctgggcaacgccgaacccagtcgcgcagcgctgcagtgaattttccccccaaactgcaataagccgccttccaaggccaagatgttcataaatataaagagcatcttatggatgtgttcaaccttaatagtaacccatgcgctacataaagtcaaagtgggaaaaagcccaccggtgaggggctccctctctggaaaagtcagcctaccttgtcatttttcaacgatgcctactttgccacccagttacaacaccagtgaatttctccgcatcaaatggtctaagattgaagtggacaaaaatggaaaagatttgaaagagactactgtccttgtggcccaaaatggaaatatcaagattggtcaggactacaaagggagagtgtctgtgcccacacatcccgaggctgtgggcgatgcctccctcactgtggtcaagctgctggcaagtgatgcgggtctttaccgctgtgacgtcatgtacgggattgaagacacacaagacacggtgtcactgactgtggatggggttgtgtttcactacagggcggcaaccagcaggtacacactgaattttgaggctgctcagaaggcttgtttggacgttggggcagtcatagcaactccagagcagctctttgctgcctatgaagatggatttgagcagtgtgacgcaggctggctggctgatcagactgtcagatatcccatccgggctcccagagtaggctgttatggagataagatgggaaaggcaggagtcaggacttatggattccgttctccccaggaaacttacgatgtgtattgttatgtggatcatctggatggtgatgtgttccacctcactgtccccagtaaattcaccttcgaggaggctgcaaaagagtgtgaaaaccaggatgccaggctggcaacagtgggggaactccaggcggcatggaggaacggctttgaccagtgcgattacgggtggctgtcggatgccagcgtgcgccaccctgtgactgtggccagggcccagtgtggaggtggtctacttggggtgagaaccctgtatcgttttgagaaccagacaggcttccctccccctgatagcagatttgatgcctactgctttaaacctaaagaggctacaaccatcgatttgagtatcctcgcagaaactgcatcacccagtttatccaaagaaccacaaatggtttctgatagaactacaccaatcatccctttagttgatgaattacctgtcattccaacagagttccctcccgtgggaaatattgtcagttttgaacagaaagccacagtccaacctcaggctatcacagatagtttagccaccaaattacccacacctactggcagtaccaagaagccctgggatatggatgactactcaccttctgcttcaggacctcttggaaagctagacatatcagaaattaaggaagaagtgctccagagtacaactggcgtctctcattatgctacggattcatgggatggtgtcgtggaagataaacaaacacaagaatcggttacacagattgaacaaatagaagtgggtcctttggtaacatctatggaaatcttaaagcacattccttccaaggaattccctgtaactgaaacaccattggtaactgcaagaatgatcctggaatccaaaactgaaaagaaaatggtaagcactgtttctgaattggtaaccacaggtcactatggattcaccttgggagaagaggatgatgaagacagaacacttacagttggatctgatgagagcaccttgatctttgaccaaattcctgaagtcattacggtgtcaaagacttcagaagacaccatccacactcatttagaagacttggagtcagtctcagcatccacaactgtttcccctttaattatgcctgataataatggatcatccatggatgactgggaagagagacaaactagtggtaggataacggaagagtttcttggcaaatatctgtctactacaccttttccatcacagcatcgtacagaaatagaattgtttccttattctggtgataaaatattagtagagggaatttccacagttatttatccttctctacaaacagaaatgacacatagaagagaaagaacagaaacactaataccagagatgagaacagatacttatacagatgaaatacaagaagagatcactaaaagtccatttatgggaaaaacagaagaagaagtcttctctgggatgaaactctctacatctctctcagagccaattcatgttacagagtcttctgtggaaatgaccaagtcttttgatttcccaacattgataacaaagttaagtgcagagccaacagaagtaagagatatggaggaagactttacagcaactccaggtactacaaaatatgatgaaaatattacaacagtgcttttggcccatggtactttaagtgttgaagcagccactgtatcaaaatggtcatgggatgaagataatacaacatccaagcctttagagtctacagaaccttcagcctcttcaaaattgccccctgccttactcacaactgtggggatgaatggaaaggataaagacatcccaagtttcactgaagatggagcagatgaatttactcttattccagatagtactcaaaagcagttagaggaggttactgatgaagacatagcagcccatggaaaattcacaattagatttcagccaactacatcaactggtattgcagaaaagtcaactttgagagattctacaactgaagaaaaagttccacctatcacaagcactgaaggccaagtttatgcaaccatggaaggaagtgctttgggtgaagtagaagatgtggacctctctaagccagtatctactgttccccaatttgcacacacttcagaggtggaaggattagcatttgttagttatagtagcacccaagagcctactacttatgtagactcttcccataccattcctctttctgtaattcccaagacagactggggagtgttagtaccttctgttccatcagaagatgaagttctaggtgaaccctctcaagacatacttgtcattgatcagactcgccttgaagcgactatttctccagaaactatgagaacaacaaaaatcacagagggaacaactcaggaagaattcccttggaaagaacagactgcagagaaaccagttcctgctctcagttctacagcttggactcccaaggaggcagtaacaccactggatgaacaagagggcgatggatcagcatatacagtctctgaagatgaattgttgacaggttctgagagggtcccagttttagaaacaactccagttggaaaaattgatcacagtgtgtcttatccaccaggtgctgtaactgagcacaaagtgaaaacagatgaagtggtaacactaacaccacgcattgggccaaaagtatctttaagtccagggcctgaacaaaaatatgaaacagaaggtagtagtacaacaggatttacatcatctttgagtccttttagtacccacattacccagcttatggaagaaaccactactgagaaaacatccctagaggatattgatttaggctcaggattatttgaaaagcccaaagccacagaactcatagaattttcaacaatcaaagtcacagttccaagtgatattaccactgccttcagttcagtagacagacttcacacaacttcagcattcaagccatcttccgcgatcactaagaaaccacctctcatcgacagggaacctggtgaagaaacaaccagtgacatggtaatcattggagaatcaacatctcatgttcctcccactacccttgaagatattgtagccaaggaaacagaaaccgatattgatagagagtatttcacgacttcaagtcctcctgctacacagccaacaagaccacccactgtggaagacaaagaggcctttggacctcaggcgctttctacgccacagcccccagcaagcacaaaatttcaccctgacattaatgtttatattattgaggtcagagaaaataagacaggtcgaatgagtgatttgagtgtaattggtcatccaatagattcagaatctaaagaagatgaaccttgtagtgaagaaacagatccagtgcatgatctaatggctgaaattttacctgaattccctgacataattgaaatagacctataccacagtgaagaaaatgaagaagaagaagaagagtgtgcaaatgctactgatgtgacaaccaccccatctgtgcagtacataaatgggaagcatctcgttaccactgtgcccaaggacccagaagctgcagaagctaggcgtggccagtttgaaagtgttgcaccttctcaaaatttctcggacagctctgaaagtgatactcatccatttgtaatagccaaaacggaattgtctactgctgtgcaacctaatgaatctacagaaacaactgagtctcttgaagttacatggaagcctgagacttaccctgaaacatcagaacatttttcaggtggtgagcctgatgttttccccacagtcccattccatgaggaatttgaaagtggaacagccaaaaaaggggcagaatcagtcacagagagagatactgaagttggtcatcaggcacatgaacatactgaacctgtatctctgtttcctgaagagtcttcaggagagattgccattgaccaagaatctcagaaaatagcctttgcaagggctacagaagtaacatttggtgaagaggtagaaaaaagtacttctgtcacatacactcccactatagttccaagttctgcatcagcatatgtttcagaggaagaagcagttaccctaataggaaatccttggccagatgacctgttgtctaccaaagaaagctgggtagaagcaactcctagacaagttgtagagctctcagggagttcttcgattccaattacagaaggctctggagaagcagaagaagatgaagatacaatgttcaccatggtaactgatttatcacagagaaatactactgatacactcattactttagacactagcaggataatcacagaaagcttttttgaggttcctgcaaccaccatttatccagtttctgaacaaccttctgcaaaagtggtgcctaccaagtttgtaagtgaaacagacacttctgagtggatttccagtaccactgttgaggaaaagaaaaggaaggaggaggagggaactacaggtacggcttctacatttgaggtatattcatctacacagagatcggatcaattaattttaccctttgaattagaaagtccaaatgtagctacatctagtgattcaggtaccaggaaaagttttatgtccttgacaacaccaacacagtctgaaagggaaatgacagattctactcctgtctttacagaaacaaatacattagaaaatttgggggcacagaccactgagcacagcagtatccatcaacctggggttcaggaagggctgaccactctcccacgtagtcctgcctctgtctttatggagcagggctctggagaagctgctgccgacccagaaaccaccactgtttcttcattttcattaaacgtagagtatgcaattcaagccgaaaaggaagtagctggcactttgtctccgcatgtggaaactacattctccactgagccaacaggactggttttgagtacagtaatggacagagtagttgctgaaaatataacccaaacatccagggaaatagtgatttcagagcgattaggagaaccaaattatggggcagaaataaggggcttttccacaggttttcctttggaggaagatttcagtggtgactttagagaatactcaacagtgtctcatcccatagcaaaagaagaaacggtaatgatggaaggctctggagatgcagcatttagggacacccagacttcaccatctacagtacctacttcagttcacatcagtcacatatctgactcagaaggacccagtagcaccatggtcagcacttcagccttcccctgggaagagtttacatcctcagctgagggctcaggtgagcaactggtcacagtcagcagctctgttgttccagtgcttcccagtgctgtgcaaaagttttctggtacagcttcctccattatcgacgaaggattgggagaagtgggtactgtcaatgaaattgatagaagatccaccattttaccaacagcagaagtggaaggtacgaaagctccagtagagaaggaggaagtaaaggtcagtggcacagtttcaacaaactttccccaaactatagagccagccaaattatggtctaggcaagaagtcaaccctgtaagacaagaaattgaaagtgaaacaacatcagaggaacaaattcaagaagaaaagtcatttgaatcccctcaaaactctcctgcaacagaacaaacaatctttgattcacagacatttactgaaactgaactcaaaaccacagattattctgtactaacaacaaagaaaacttacagtgatgataaagaaatgaaggaggaagacacttctttagttaacatgtctactccagatccagatgcaaatggcttggaatcttacacaactctccctgaagctactgaaaagtcacattttttcttagctactgcattagtaactgaatctataccagctgaacatgtagtcacagattcaccaatcaaaaaggaagaaagtacaaaacattttccgaaaggcatgaggccaacaattcaagagtcagatactgagctcttattctctggactgggatcaggagaagaagttttacctactctaccaacagagtcagtgaattttactgaagtggaacaaatcaataacacattatatccccacacttctcaagtggaaagtacctcaagtgacaaaattgaagactttaacagaatggaaaatgtggcaaaagaagttggaccactcgtatctcaaacagacatctttgaaggtagtgggtcagtaaccagcacaacattaatagaaattttaagtgacactggagcagaaggacccacggtggcacctctccctttctccacggacatcggacatcctcaaaatcagactgtcaggtgggcagaagaaatccagactagtagaccacaaaccataactgaacaagactctaacaagaattcttcaacagcagaaattaacgaaacaacaacctcatctactgattttctggctagagcttatggttttgaaatggccaaagaatttgttacatcagcaccaaaaccatctgacttgtattatgaaccttctggagaaggatctggagaagtggatattgttgattcatttcacacttctgcaactactcaggcaaccagacaagaaagcagcaccacatttgtttctgatgggtccctggaaaaacatcctgaggtgccaagcgctaaagctgttactgctgatggattcccaacagtttcagtgatgctgcctcttcattcagagcagaacaaaagctcccctgatccaactagcacactgtcaaatacagtgtcatatgagaggtccacagacggtagtttccaagaccgtttcagggaattcgaggattccaccttaaaacctaacagaaaaaaacccactgaaaatattatcatagacctggacaaagaggacaaggatttaatattgacaattacagagagtaccatccttgaaattctacctgagctgacatcggataaaaatactatcatagatattgatcatactaaacctgtgtatgaagacattcttggaatgcaaacagatatagatacagaggtaccatcagaaccacatgacagtaatgatgaaagtaatgatgacagcactcaagttcaagagatctatgaggcagctgtcaacctttctttaactgaggaaacatttgagggctctgctgatgttctggctagctacactcaggcaacacatgatgaatcaatgacttatgaagatagaagccaactagatcacatgggctttcacttcacaactgggatccctgctcctagcacagaacagctaccttccaatcagcttatcg

SEQ ID NO: 317238 - DNA, 8139 bp, Homo sapiens
gctgtccccaagccgattggtacttcttgtcaggaagaaacgccaagaggtgggagtgcctggggagggaggcaggcggtccctaccgcaggcgcggggagctgcctttccgcccctccgcctgctttccaagcctggactcttaggagtggctgaagctgcggagcgcttttggagcctgtgaatgaaccctcctcctctccctcctccttcttctcgctgagtctcctcctcggctctgacggtacagtgatataatgatgatgggtgtcacaacccgcatttgaacttgcaggcgagctgccccgagcctttctggggaagaactccaggcgtgcggacgcaacagccgagaacattaggtgttgtggacaggagctgggaccaagatcttcggccagccccgcatcctcccgcatcttccagcaccgtcccgcaccctccgcatccttccccgggccaccacgcttcctatgtgacccgcctgggcaacgccgaacccagtcgcgcagcgctgcagtgaattttccccccaaactgcaataagccgccttccaaggccaagatgttcataaatataaagagcatcttatggatgtgttcaaccttaatagtaacccatgcgctacataaagtcaaagtgggaaaaagcccaccggtgaggggctccctctctggaaaagtcagcctaccttgtcatttttcaacgatgcctactttgccacccagttacaacaccagtgaatttctccgcatcaaatggtctaagattgaagtggacaaaaatggaaaagatttgaaagagactactgtccttgtggcccaaaatggaaatatcaagattggtcaggactacaaagggagagtgtctgtgcccacacatcccgaggctgtgggcgatgcctccctcactgtggtcaagctgctggcaagtgatgcgggtctttaccgctgtgacgtcatgtacgggattgaagacacacaagacacggtgtcactgactgtggatggggttgtgtttcactacagggcggcaaccagcaggtacacactgaattttgaggctgctcagaaggcttgtttggacgttggggcagtcatagcaactccagagcagctctttgctgcctatgaagatggatttgagcagtgtgacgcaggctggctggctgatcagactgtcagatatcccatccgggctcccagagtaggctgttatggagataagatgggaaaggcaggagtcaggacttatggattccgttctccccaggaaacttacgatgtgtattgttatgtggatcatctggatggtgatgtgttccacctcactgtccccagtaaattcaccttcgaggaggctgcaaaagagtgtgaaaaccaggatgccaggctggcaacagtgggggaactccaggcggcatggaggaacggctttgaccagtgcgattacgggtggctgtcggatgccagcgtgcgccaccctgtgactgtggccagggcccagtgtggaggtggtctacttggggtgagaaccctgtatcgttttgagaaccagacaggcttccctccccctgatagcagatttgatgcctactgctttaaacctaaagaggctacaaccatcgatttgagtatcctcgcagaaactgcatcacccagtttatccaaagaaccacaaatggtttctgatagaactacaccaatcatccctttagttgatgaattacctgtcattccaacagagttccctcccgtgggaaatattgtcagttttgaacagaaagccacagtccaacctcaggctatcacagatagtttagccaccaaattacccacacctactggcagtaccaagaagccctgggatatggatgactactcaccttctgcttcaggacctcttggaaagctagacatatcagaaattaaggaagaagtgctccagagtacaactggcgtctctcattatgctacggattcatgggatggtgtcgtggaagataaacaaacacaagaatcggttacacagattgaacaaatagaagtgggtcctttggtaacatctatggaaatcttaaagcacattccttccaaggaattccctgtaactgaaacaccattggtaactgcaagaatgatcctggaatccaaaactgaaaagaaaatggtaagcactgtttctgaattggtaaccacaggtcactatggattcaccttgggagaagaggatgatgaagacagaacacttacagttggatctgatgagagcaccttgatctttgaccaaattcctgaagtcattacggtgtcaaagacttcagaagacaccatccacactcatttagaagacttggagtcagtctcagcatccacaactgtttcccctttaattatgcctgataataatggatcatccatggatgactgggaagagagacaaactagtggtaggataacggaagagtttcttggcaaatatctgtctactacaccttttccatcacagcatcgtacagaaatagaattgtttccttattctggtgataaaatattagtagagggaatttccacagttatttatccttctctacaaacagaaatgacacatagaagagaaagaacagaaacactaataccagagatgagaacagatacttatacagatgaaatacaagaagagatcactaaaagtccatttatgggaaaaacagaagaagaagtcttctctgggatgaaactctctacatctctctcagagccaattcatgttacagagtcttctgtggaaatgaccaagtcttttgatttcccaacattgataacaaagttaagtgcagagccaacagaagtaagagatatggaggaagactttacagcaactccaggtactacaaaatatgatgaaaatattacaacagtgcttttggcccatggtactttaagtgttgaagcagccactgtatcaaaatggtcatgggatgaagataatacaacatccaagcctttagagtctacagaaccttcagcctcttcaaaattgccccctgccttactcacaactgtggggatgaatggaaaggataaagacatcccaagtttcactgaagatggagcagatgaatttactcttattccagatagtactcaaaagcagttagaggaggttactgatgaagacatagcagcccatggaaaattcacaattagatttcagccaactacatcaactggtattgcagaaaagtcaactttgagagattctacaactgaagaaaaagttccacctatcacaagcactgaaggccaagtttatgcaaccatggaaggaagtgctttgggtgaagtagaagatgtggacctctctaagccagtatctactgttccccaatttgcacacacttcagaggtggaaggattagcatttgttagttatagtagcacccaagagcctactacttatgtagactcttcccataccattcctctttctgtaattcccaagacagactggggagtgttagtaccttctgttccatcagaagatgaagttctaggtgaaccctctcaagacatacttgtcattgatcagactcgccttgaagcgactatttctccagaaactatgagaacaacaaaaatcacagagggaacaactcaggaagaattcccttggaaagaacagactgcagagaaaccagttcctgctctcagttctacagcttggactcccaaggaggcagtaacaccactggatgaacaagagggcgatggatcagcatatacagtctctgaagatgaattgttgacaggttctgagagggtcccagttttagaaacaactccagttggaaaaattgatcacagtgtgtcttatccaccaggtgctgtaactgagcacaaagtgaaaacagatgaagtggtaacactaacaccacgcattgggccaaaagtatctttaagtccagggcctgaacaaaaatatgaaacagaaggtagtagtacaacaggatttacatcatctttgagtccttttagtacccacattacccagcttatggaagaaaccactactgagaaaacatccctagaggatattgatttaggctcaggattatttgaaaagcccaaagccacagaactcatagaattttcaacaatcaaagtcacagttccaagtgatattaccactgccttcagttcagtagacagacttcacacaacttcagcattcaagccatcttccgcgatcactaagaaaccacctctcatcgacagggaacctggtgaagaaacaaccagtgacatggtaatcattggagaatcaacatctcatgttcctcccactacccttgaagatattgtagccaaggaaacagaaaccgatattgatagagagtatttcacgacttcaagtcctcctgctacacagccaacaagaccacccactgtggaagacaaagaggcctttggacctcaggcgctttctacgccacagcccccagcaagcacaaaatttcaccctgacattaatgtttatattattgaggtcagagaaaataagacaggtcgaatgagtgatttgagtgtaattggtcatccaatagattcagaatctaaagaagatgaaccttgtagtgaagaaacagatccagtgcatgatctaatggctgaaattttacctgaattccctgacataattgaaatagacctataccacagtgaagaaaatgaagaagaagaagaagagtgtgcaaatgctactgatgtgacaaccaccccatctgtgcagtacataaatgggaagcatctcgttaccactgtgcccaaggacccagaagctgcagaagctaggcgtggccagtttgaaagtgttgcaccttctcaaaatttctcggacagctctgaaagtgatactcatccatttgtaatagccaaaacggaattgtctactgctgtgcaacctaatgaatctacagaaacaactgagtctcttgaagttacatggaagcctgagacttaccctgaaacatcagaacatttttcaggtggtgagcctgatgttttccccacagtcccattccatgaggaatttgaaagtggaacagccaaaaaaggggcagaatcagtcacagagagagatactgaagttggtcatcaggcacatgaacatactgaacctgtatctctgtttcctgaagagtcttcaggagagattgccattgaccaagaatctcagaaaatagcctttgcaagggctacagaagtaacatttggtgaagaggtagaaaaaagtacttctgtcacatacactcccactatagttccaagttctgcatcagcatatgtttcagaggaagaagcagttaccctaataggaaatccttggccagatgacctgttgtctaccaaagaaagctgggtagaagcaactcctagacaagttgtagagctctcagggagttcttcgattccaattacagaaggctctggagaagcagaagaagatgaagatacaatgttcaccatggtaactgatttatcacagagaaatactactgatacactcattactttagacactagcaggataatcacagaaagcttttttgaggttcctgcaaccaccatttatccagtttctgaacaaccttctgcaaaagtggtgcctaccaagtttgtaagtgaaacagacacttctgagtggatttccagtaccactgttgaggaaaagaaaaggaaggaggaggagggaactacaggtacggcttctacatttgaggtatattcatctacacagagatcggatcaattaattttaccctttgaattagaaagtccaaatgtagctacatctagtgattcaggtaccaggaaaagttttatgtccttgacaacaccaacacagtctgaaagggaaatgacagattctactcctgtctttacagaaacaaatacattagaaaatttgggggcacagaccactgagcacagcagtatccatcaacctggggttcaggaagggctgaccactctcccacgtagtcctgcctctgtctttatggagcagggctctggagaagctgctgccgacccagaaaccaccactgtttcttcattttcattaaacgtagagtatgcaattcaagccgaaaaggaagtagctggcactttgtctccgcatgtggaaactacattctccactgagccaacaggactggttttgagtacagtaatggacagagtagttgctgaaaatataacccaaacatccagggaaatagtgatttcagagcgattaggagaaccaaattatggggcagaaataaggggcttttccacaggttttcctttggaggaagatttcagtggtgactttagagaatactcaacagtgtctcatcccatagcaaaagaagaaacggtaatgatggaaggctctggagatgcagcatttagggacacccagacttcaccatctacagtacctacttcagttcacatcagtcacatatctgactcagaaggacccagtagcaccatggtcagcacttcagccttcccctgggaagagtttacatcctcagctgagggctcaggtgagcaactggtcacagtcagcagctctgttgttccagtgcttcccagtgctgtgcaaaagttttctggtacagcttcctccattatcgacgaaggattgggagaagtgggtactgtcaatgaaattgatagaagatccaccattttaccaacagcagaagtggaaggtacgaaagctccagtagagaaggaggaagtaaaggtcagtggcacagtttcaacaaactttccccaaactatagagccagccaaattatggtctaggcaagaagtcaaccctgtaagacaagaaattgaaagtgaaacaacatcagaggaacaaattcaagaagaaaagtcatttgaatcccctcaaaactctcctgcaacagaacaaacaatctttgattcacagacatttactgaaactgaactcaaaaccacagattattctgtactaacaacaaagaaaacttacagtgatgataaagaaatgaaggaggaagacacttctttagttaacatgtctactccagatccagatgcaaatggcttggaatcttacacaactctccctgaagctactgaaaagtcacattttttcttagctactgcattagtaactgaatctataccagctgaacatgtagtcacagattcaccaatcaaaaaggaagaaagtacaaaacattttccgaaaggcatgaggccaacaattcaagagtcagatactgagctcttattctctggactgggatcaggagaagaagttttacctactctaccaacagagtcagtgaattttactgaagtggaacaaatcaataacacattatatccccacacttctcaagtggaaagtacctcaagtgacaaaattgaagactttaacagaatggaaaatgtggcaaaagaagttggaccactcgtatctcaaacagacatctttgaaggtagtgggtcagtaaccagcacaacattaatagaaattttaagtgacactggagcagaaggacccacggtggcacctctccctttctccacggacatcggacatcctcaaaatcagactgtcaggtgggcagaagaaatccagactagtagaccacaaaccataactgaacaagactctaacaagaattcttcaacagcagaaattaacgaaacaacaacctcatctactgattttctggctagagcttatggttttgaaatggccaaagaatttgttacatcagcaccaaaaccatctgacttgtattatgaaccttctggagaaggatctggagaagtggatattgttgattcatttcacacttctgcaactactcaggcaaccagacaagaaagcagcaccacatttgtttctgatgggtccctggaaaaacatcctgaggtgccaagcgctaaagctgttactgctgatggattcccaacagtttcagtgatgctgcctcttcattcagagcagaacaaaagctcccctgatccaactagcacactgtcaaatacagtgtcatatgagagggaaggatcgtagagaggaaggatggtacgagc

SEQ ID NO: 317239 - DNA, 5918 bp, Homo sapiens
gctgtccccaagccgattggtacttcttgtcaggaagaaacgccaagaggtgggagtgcctggggagggaggcaggcggtccctaccgcaggcgcggggagctgcctttccgcccctccgcctgctttccaagcctggactcttaggagtggctgaagctgcggagcgcttttggagcctgtgaatgaaccctcctcctctccctcctccttcttctcgctgagtctcctcctcggctctgacggtacagtgatataatgatgatgggtgtcacaacccgcatttgaacttgcaggcgagctgccccgagcctttctggggaagaactccaggcgtgcggacgcaacagccgagaacattaggtgttgtggacaggagctgggaccaagatcttcggccagccccgcatcctcccgcatcttccagcaccgtcccgcaccctccgcatccttccccgggccaccacgcttcctatgtgacccgcctgggcaacgccgaacccagtcgcgcagcgctgcagtgaattttccccccaaactgcaataagccgccttccaaggccaagatgttcataaatataaagagcatcttatggatgtgttcaaccttaatagtaacccatgcgctacataaagtcaaagtgggaaaaagcccaccggtgaggggctccctctctggaaaagtcagcctaccttgtcatttttcaacgatgcctactttgccacccagttacaacaccagtgaatttctccgcatcaaatggtctaagattgaagtggacaaaaatggaaaagatttgaaagagactactgtccttgtggcccaaaatggaaatatcaagattggtcaggactacaaagggagagtgtctgtgcccacacatcccgaggctgtgggcgatgcctccctcactgtggtcaagctgctggcaagtgatgcgggtctttaccgctgtgacgtcatgtacgggattgaagacacacaagacacggtgtcactgactgtggatggggttgtgtttcactacagggcggcaaccagcaggtacacactgaattttgaggctgctcagaaggcttgtttggacgttggggcagtcatagcaactccagagcagctctttgctgcctatgaagatggatttgagcagtgtgacgcaggctggctggctgatcagactgtcagatatcccatccgggctcccagagtaggctgttatggagataagatgggaaaggcaggagtcaggacttatggattccgttctccccaggaaacttacgatgtgtattgttatgtggatcatctggatggtgatgtgttccacctcactgtccccagtaaattcaccttcgaggaggctgcaaaagagtgtgaaaaccaggatgccaggctggcaacagtgggggaactccaggcggcatggaggaacggctttgaccagtgcgattacgggtggctgtcggatgccagcgtgcgccaccctgtgactgtggccagggcccagtgtggaggtggtctacttggggtgagaaccctgtatcgttttgagaaccagacaggcttccctccccctgatagcagatttgatgcctactgctttaaacctaaagaggctacaaccatcgatttgagtatcctcgcagaaactgcatcacccagtttatccaaagaaccacaaatggtttctgatagaactacaccaatcatccctttagttgatgaattacctgtcattccaacagagttccctcccgtgggaaatattgtcagttttgaacagaaagccacagtccaacctcaggctatcacagatagtttagccaccaaattacccacacctactggcagtaccaagaagccctgggatatggatgactactcaccttctgcttcaggacctcttggaaagctagacatatcagaaattaaggaagaagtgctccagagtacaactggcgtctctcattatgctacggattcatgggatggtgtcgtggaagataaacaaacacaagaatcggttacacagattgaacaaatagaagtgggtcctttggtaacatctatggaaatcttaaagcacattccttccaaggaattccctgtaactgaaacaccattggtaactgcaagaatgatcctggaatccaaaactgaaaagaaaatggtaagcactgtttctgaattggtaaccacaggtcactatggattcaccttgggagaagaggatgatgaagacagaacacttacagttggatctgatgagagcaccttgatctttgaccaaattcctgaagtcattacggtgtcaaagacttcagaagacaccatccacactcatttagaagacttggagtcagtctcagcatccacaactgtttcccctttaattatgcctgataataatggatcatccatggatgactgggaagagagacaaactagtggtaggataacggaagagtttcttggcaaatatctgtctactacaccttttccatcacagcatcgtacagaaatagaattgtttccttattctggtgataaaatattagtagagggaatttccacagttatttatccttctctacaaacagaaatgacacatagaagagaaagaacagaaacactaataccagagatgagaacagatacttatacagatgaaatacaagaagagatcactaaaagtccatttatgggaaaaacagaagaagaagtcttctctgggatgaaactctctacatctctctcagagccaattcatgttacagagtcttctgtggaaatgaccaagtcttttgatttcccaacattgataacaaagttaagtgcagagccaacagaagtaagagatatggaggaagactttacagcaactccaggtactacaaaatatgatgaaaatattacaacagtgcttttggcccatggtactttaagtgttgaagcagccactgtatcaaaatggtcatgggatgaagataatacaacatccaagcctttagagtctacagaaccttcagcctcttcaaaattgccccctgccttactcacaactgtggggatgaatggaaaggataaagacatcccaagtttcactgaagatggagcagatgaatttactcttattccagatagtactcaaaagcagttagaggaggttactgatgaagacatagcagcccatggaaaattcacaattagatttcagccaactacatcaactggtattgcagaaaagtcaactttgagagattctacaactgaagaaaaagttccacctatcacaagcactgaaggccaagtttatgcaaccatggaaggaagtgctttgggtgaagtagaagatgtggacctctctaagccagtatctactgttccccaatttgcacacacttcagaggtggaaggattagcatttgttagttatagtagcacccaagagcctactacttatgtagactcttcccataccattcctctttctgtaattcccaagacagactggggagtgttagtaccttctgttccatcagaagatgaagttctaggtgaaccctctcaagacatacttgtcattgatcagactcgccttgaagcgactatttctccagaaactatgagaacaacaaaaatcacagagggaacaactcaggaagaattcccttggaaagaacagactgcagagaaaccagttcctgctctcagttctacagcttggactcccaaggaggcagtaacaccactggatgaacaagagggcgatggatcagcatatacagtctctgaagatgaattgttgacaggttctgagagggtcccagttttagaaacaactccagttggaaaaattgatcacagtgtgtcttatccaccaggtgctgtaactgagcacaaagtgaaaacagatgaagtggtaacactaacaccacgcattgggccaaaagtatctttaagtccagggcctgaacaaaaatatgaaacagaaggtagtagtacaacaggatttacatcatctttgagtccttttagtacccacattacccagcttatggaagaaaccactactgagaaaacatccctagaggatattgatttaggctcaggattatttgaaaagcccaaagccacagaactcatagaattttcaacaatcaaagtcacagttccaagtgatattaccactgccttcagttcagtagacagacttcacacaacttcagcattcaagccatcttccgcgatcactaagaaaccacctctcatcgacagggaacctggtgaagaaacaaccagtgacatggtaatcattggagaatcaacatctcatgttcctcccactacccttgaagatattgtagccaaggaaacagaaaccgatattgatagagagtatttcacgacttcaagtcctcctgctacacagccaacaagaccacccactgtggaagacaaagaggcctttggacctcaggcgctttctacgccacagcccccagcaagcacaaaatttcaccctgacattaatgtttatattattgaggtcagagaaaataagacaggtcgaatgagtgatttgagtgtaattggtcatccaatagattcagaatctaaagaagatgaaccttgtagtgaagaaacagatccagtgcatgatctaatggctgaaattttacctgaattccctgacataattgaaatagacctataccacagtgaagaaaatgaagaagaagaagaagagtgtgcaaatgctactgatgtgacaaccaccccatctgtgcagtacataaatgggaagcatctcgttaccactgtgcccaaggacccagaagctgcagaagctaggcgtggccagtttgaaagtgttgcaccttctcaaaatttctcggacagctctgaaagtgatactcatccatttgtaatagccaaaacggaattgtctactgctgtgcaacctaatgaatctacagaaacaactgagtctcttgaagttacatggaagcctgagacttaccctgaaacatcagaacatttttcaggtggtgagcctgatgttttccccacagtcccattccatgaggaatttgaaagtggaacagccaaaaaaggggcagaatcagtcacagagagagatactgaagttggtcatcaggcacatgaacatactgaacctgtatctctgtttcctgaagagtcttcaggagagattgccattgaccaagaatctcagaaaatagcctttgcaagggctacagaagtaacatttggtgaagaggtagaaaaaagtacttctgtcacatacactcccactatagttccaagttctgcatcagcatatgtttcagaggaagaagcagttaccctaataggaaatccttggccagatgacctgttgtctaccaaagaaagctgggtagaagcaactcctagacaagttgtagagctctcagggagttcttcgattccaattacagaaggctctggagaagcagaagaagatgaagatacaatgttcaccatggtaactgatttatcacagagaaatactactgatacactcattactttagacactagcaggataatcacagaaagcttttttgaggttcctgcaaccaccatttatccagtttctgaacaaccttctgcaaaagtggtgcctaccaagtttgtaagtgaaacagacacttctgagtggatttccagtaccactgttgaggaaaagaaaaggaaggaggaggagggaactacaggtacggcttctacatttgaggtatattcatctacacagagatcggatcaattaattttaccctttgaattagaaagtccaggtatgccagcaaggtccaggtatgccagaaggtccaggtatgccagaaggtaacaggtatgccagaagtcacagt

SEQ ID NO: 317240 - DNA, 675 bp, Homo sapiens
aaacaatatacaaagaataagtataaactcaatgaaaatacacttatccaagcaatattgcaatataaaatatatgcttcaagtggtgtaaaagtgtttgcacttagaaaatatatttaaactgtttgtcctcataaatttatgtcttcggccttcacatttatctcccaggagtgtcggttttatttgtattttaataagaaaattataataaaaacttggggtttcattttaggtgaggtttttgtatttgggtttgtttttctacagtagagtttaatccatgtgttgcttttcttcaagtatagtttaaaggagtacatttggaacgtgtttttggaaaaagcatgttaatgtagcagaagagacttcagtgcacactttcgaagaaaaacagtttctgagcattaagtggtaaaaggcaataataattcaaatgatgataacaagccaacctgctaaaaagaatgcatgttctgtgtatccagccatttcacatgaactaaccccatttaaaagaatacattttccattcactgtgcacatatgtgtaatcatttttgactaaaatcaattgccattatcatgccaactaaatctgcagtagaatatattagttgccagatacagtacaaaaaatatcatttaagagtaatcgtgattgaatcccagaaa

SEQ ID NO: 317241 - DNA, 268 bp, Homo sapiens
gggcagaggcctctctggggtctcttttatgagggcaccaatcccatccatgagaattccactctcctgacctaatcacctcccaaaggccccacatcctaataccatcaccttgggggttaagatttcaacatatgagttgagggggacacagcattgggaccagagcaatcccttcatgaaccctttaaggttcatgagagtagaagctgattcactcacttatctccagtttctatgcctggcacaaaacagggcgaggatcaga

SEQ ID NO: 317242 - DNA, 720 bp, Homo sapiens
ggcttccgtagcgggagggcgaaagatggcggcggcagtactgggacagttgggtgcgttatggatacataacctgaggagccgggggaagctggccttgggtgttttacctcaatcatatatccacacaagtgcttctcttgacatttctcgaaaatgggagaagaagaataaaattgtttatcctccacaactgcctggagaacctcggagaccagcagaaatctaccactgtcgaagacaaataaaatatagcaaagacaagatgtggtatttggcaaaattgatacgaggaatgtctattgaccaggctttggctcagttggaattcaatgacaaaaaaggggccaaaataattaaagaggttctcttagaagcacaagatatggcagtgagagaccataacgtggaattcaggtccaatttatatatagctgagtccacctcaggacgaggccagtgcctgaaacgcatccgctaccatggcagaggtcgctttgggatcatggagaaggtttattgccattattttgtgaagttggtggaagggcccccacctccacctgagccaccaaagacggcagttgcccatgccaaagagtatattcagcagcttcgcagccggaccatcgttcacactctatgatgaggagattcagactccacagtgtatatattttgccatttattttctaaaaataaacaaaaattgaaggcaaa

SEQ ID NO: 317243 - DNA, 602 bp, Homo sapiens
ggcttccgtagcgggagggcgaaagatggcggcggcagtactgggacagttgggtgcgttatggatacataacctgaggagccgggggaagctggccttggggaaatctaccactgtcgaagacaaataaaatatagcaaagacaagatgtggtatttggcaaaattgatacgaggaatgtctattgaccaggctttggctcagttggaattcaatgacaaaaaaggggccaaaataattaaagaggttctcttagaagcacaagatatggcagtgagagaccataacgtggaattcaggtccaatttatatatagctgagtccacctcaggacgaggccagtgcctgaaacgcatccgctaccatggcagaggtcgctttgggatcatggagaaggtttattgccattattttgtgaagttggtggaagggcccccacctccacctgagccaccaaagacggcagttgcccatgccaaagagtatattcagcagcttcgcagccggaccatcgttcacactctatgatgaggagattcagactccacagtgtatatattttgccatttattttctaaaaataaacaaaaattgaaggcaaa

SEQ ID NO: 317244 - DNA, 336 bp, Homo sapiens
tcggttccgtaccttcgaccccccggaggaggggtaccttccgctggaacctgagtccacctcaggacgaggccagtgcctgaaacgcatccgctaccatggcagaggtcgctttgggatcatggagaaggtttattgccattattttgtgaagttggtggaagggcccccacctccacctgagccaccaaagacggcagttgcccatgccaaagagtatattcagcagcttcgcagccggaccatcgttcacactctatgatgaggagattcagactccacagtgtatatattttgccatttattttctaaaaataaacaaaaattgaaggcaaa

SEQ ID NO: 317245 - DNA, 329 bp, Homo sapiens
cgcgccgttcgtccggccagaggaggagcggctttcattagacctgagtccacctcaggacgaggccagtgcctgaaacgcatccgctaccatggcagaggtcgctttgggatcatggagaaggtttattgccattattttgtgaagttggtggaagggcccccacctccacctgagccaccaaagacggcagttgcccatgccaaagagtatattcagcagcttcgcagccggaccatcgttcacactctatgatgaggagattcagactccacagtgtatatattttgccatttattttctaaaaataaacaaaaattgaaggcaaa

SEQ ID NO: 317246 - DNA, 329 bp, Homo sapiens
  misc_feature (22)..(22): n is a, c, g, or t
ccatcgcgctccaccccgcganaaagaaaacccttcactgaacctgagtccacctcaggacgaggccagtgcctgaaacgcatccgctaccatggcagaggtcgctttgggatcatggagaaggtttattgccattattttgtgaagttggtggaagggcccccacctccacctgagccaccaaagacggcagttgcccatgccaaagagtatattcagcagcttcgcagccggaccatcgttcacactctatgatgaggagattcagactccacagtgtatatattttgccatttattttctaaaaataaacaaaaattgaaggcaaa

SEQ ID NO: 317247 - DNA, 435 bp, Homo sapiens
cgaaatctaccaaaatatagcaaagacaagatgtgatatttggcaaaattgatacgaggaatgtctattgaccaggctttggctcagttggaggggccaaaataattaaagaggttctcttagaagcacaagatatggcagtgagagaccataacgtggaattcaggtccaatttatatatagctgagtccacctcaggacgaggccagtgcctgaaacgcatccgctaccatggcagaggtcgctttgggatcatggagaaggtttattgccattattttggcccccacctccacctgagccaccaaagacggcagttgcccatgccaaagagtatattcagcagcttcgcagccggaccatcgttcattcagactccacagtgtatatattttgccatttattttctaaaaataaacaaaaattgaaggcaaa

SEQ ID NO: 317248 - DNA, 609 bp, Homo sapiens
  misc_feature (21)..(21): n is a, c, g, or t
cattatggccgggggtagcgnaagggcgttttattttggcggcagtactgggacagttgggggcgtgatggatacataacctgaggagccgccccaagctggccttggggaaatctaccactgtcgaagacaaataaaatatagcaaagacaagatgtggtatttggcaaaattgatacgaggaatgtctattgaccaggctttggctcagttggaattcaatgacaaaaaaggggccaaaataattaaagaggttctcttagaagcacaagatatggcagtgagagaccataacgtggaattcaggtccaatttatatatagctgagtccacctcaggacgaggccagtgcctgaaacgcatccgctaccatggcagaggtcgctttgggatcatggagaaggtttattgccattattttgtgaagttggtggaagggcccccacctccacctgagccaccaaagacggcagttgcccatgccaaagagtatattcagcagcttcgcagccggaccatcgttcacactctatgatgaggagattcagactccacagtgtatatattttgccatttattttctaaaaataaacaaaaattgaaggcaaa

SEQ ID NO: 317249 - DNA, 768 bp, Homo sapiens
  misc_feature (738)..(738): n is a, c, g, or t
ggcttccgtagcgggagggcgaaagatggcggcggcagtactgggacagttgggtgcgttatggatacataacctgaggagccgggggaagctggccttgggtgttttacctcaatcatatatccacacaagtgcttctcttgacatttctcgaaaatgggagaagaagaataaaattgtttatcctccacaactgcctggagaacctcggagaccagcagaaatctaccactgtcgaagacaaataaaatatagcaaagacaagatgtggtatttggcaaaattgatacgaggaatgtctattgaccaggctttggctcagttggaattcaatgacaaaaaaggggccaaaataattaaagaggttctcttagaagcacaagatatggcagtgagagaccataacgtggaattcaggtccaatttatatatagctgagtccacctcaggacgaggccagtgcctgaaacgcatccgctaccatggcagaggtcgctttgggatcatggagaaggtttattgccattattttgtgaagttggtggaagggcccccacctccacctgagccaccaaagacggcagttgcccatgccaaagagtatattcagcagcttcgcagccggaccatcgttcacactctatgatgaggagattcagactccacagtgtatatattttgccatttattttctaaaaataaacaaaaattgaaggcaaaaaaaaaaaatggcctcgntggctacagcggtggagctgtgcggcccag

SEQ ID NO: 317250 - DNA, 759 bp, Homo sapiens
ggcttccgtagcgggagggcgaaagatggcggcggcagtactgggacagttgggtgcgttatggatacataacctgaggagccgggggaagctggccttgggtgttttacctcaatcatatatccacacaagtgcttctcttgacatttctcgaaaatgggagaagaagaataaaattgtttatcctccacaactgcctggagaacctcggagaccagcagaaatctaccactgtcgaagacaaataaaatatagcaaagacaagatgtggtatttggcaaaattgatacgaggaatgtctattgaccaggctttggctcagttggaattcaatgacaaaaaaggggccaaaataattaaagaggttctcttagaagcacaagatatggcagtgagagaccataacgtggaattcaggtccaatttatatatagctgagtccacctcaggacgaggccagtgcctgaaacgcatccgctaccatggcagaggtcgctttgggatcatggagaaggtttattgccattattttgtgaagttggtggaagggcccccacctccacctgagccaccaaagacggcagttgcccatgccaaagagtatattcagcagcttcgcagccggaccatcgttcacactctatgatgaggagattcagactccacagtgtatatattttgccatttattttctaaaaataaacaaaaattgaaggcaaataaaaactgatttaaaaaccaaaaacaaaaaaaaaatag

SEQ ID NO: 317251 - DNA, 781 bp, Homo sapiens
ggcttccgtagcgggagggcgaaagatggcggcggcagtactgggacagttgggtgcgttatggatacataacctgaggagccgggggaagctggccttgggtgttttacctcaatcatatatccacacaagtgcttctcttgacatttctcgaaaatgggagaagaagaataaaattgtttatcctccacaactgcctggagaacctcggagaccagcagaaatctaccactgtcgaagacaaataaaatatagcaaagacaagatgtggtatttggcaaaattgatacgaggaatgtctattgaccaggctttggctcagttggaattcaatgacaaaaaaggggccaaaataattaaagaggttctcttagaagcacaagatatggcagtgagagaccataacgtggaattcaggtccaatttatatatagctgagtccacctcaggacgaggccagtgcctgaaacgcatccgctaccatggcagaggtcgctttgggatcatggagaaggtttattgccattattttgtgaagttggtggaagggcccccacctccacctgagccaccaaagacggcagttgcccatgccaaagagtatattcagcagcttcgcagccggaccatcgttcacactctatgatgaggagattcagactccacagtgtatatattttgccatttattttctaaaaataaacaaaaattgaaggcaaacgtggttccccagagcccctcctccctccctctttgcgtgttgtgtctatagttggggata

SEQ ID NO: 317252 - DNA, 341 bp, Homo sapiens
cgatatcgaaatttataacaaaactagagcttcacctgacccccctcacgcattgctgagtccacctcaggacgaggccagtgcctgaaacgcatccgctaccatggcagaggtcgctttgggatcatggagaaggtttattgccattattttgtgaagttggtggaagggcccccacctccacctgagccaccaaagacggcagttgcccatgccaaagagtatattcagcagcttcgcagccggaccatcgttcacactctatgatgaggagattcagactccacagtgtatatattttgccatttattttctaaaaataaacaaaaattgaaggcaaa

SEQ ID NO: 317253 - DNA, 1301 bp, Homo sapiens
ggcttccgtagcgggagggcgaaagatggcggcggcagtactgggacagttgggtgcgttatggatacataacctgaggagccgggggaagctggccttgggtgttttacctcaatcatatatccacacaagtgcttctcttgacatttctcgaaaatgggagaagaagaataaaattgtttatcctccacaactgcctggagaacctcggagaccagcagaaatctaccactgtcgaagacaaataaaatatagcaaagacaagatgtggtatttggcaaaattgatacgaggaatgtctattgaccaggctttggctcagttggaattcaatgacaaaaaaggggccaaaataattaaagaggttctcttagaagcacaagatatggcagtgagagaccataacgtggaattcaggtccaatttatatatagctgagtccacctcaggacgaggccagtgcctgaaacgcatccgctaccatggcagaggtcgctttgggatcatggagaaggtttattgccattattttgtgaagttggtggaagggcccccacctccacctgagccaccaaagacggcagttgcccatgccaaagagtatatttcatgatatgtcaaaaatagtcaataaagtcacactaataagatggatgacttaacatacaatttatttgtttattataagagaaaaaagacgatgacaaccgtacacttccttaatcaagtcaagtacaacaagacggactgatgcgcggcagaatgctcgacaacatccgccaccccctcaccacacaccgacccccacaatctcacaagaacaacacccaacgcccagctatgagataaatatcgtgtggctctctctgtgatttgtttgactctcaaatctcgtaaatcgaccaattgcatgtttgaattcagtccagcgcccctactctcatatcctcacaccgcccccactcattcgattataccagacgcatcctacacctaagattcgctcctacttgcatacacgatctccaccgcatatctgtcgctacgcccctcacgtcatccgttccacacgcataaaacgcacttatcctccaaatctcgttcgccaccggtaagacatatcttcgtctattccgatcaaccagcacaatatcgccgcacctacaatatcccggctaccatttagatctatatgaaaatgtaagcaaatactagtcaccactattcgctcagcatagcaacatcaacaatacagcgtttgccgcaggacagcgtccgcagccatcaggatatcatagtag

SEQ ID NO: 317254 - DNA, 1403 bp, Homo sapiens
ggcttccgtagcgggagggcgaaagatggcggcggcagtactgggacagttgggtgcgttatggatacataacctgaggagccgggggaagctggccttgggtgttttacctcaatcatatatccacacaagtgcttctcttgacatttctcgaaaatgggagaagaagaataaaattgtttatcctccacaactgcctggagaacctcggagaccagcagaaatctaccactgtcgaagacaaataaaatatagcaaagacaagatgtggtatttggcaaaattgatacgaggaatgtctattgaccaggctttggctcagttggaattcaatgacaaaaaaggggccaaaataattaaagaggttctcttagaagcacaagatatggcagtgagagaccataacgtggaattcaggtccaatttatatatagctgagtccacctcaggacgaggccagtgcctgaaacgcatccgctaccatggcagaggtcgctttgggatcatggagaaggtttattgccattattttgtgaagttggtggaagggcccccacctccacctgagccaccaaagacggcagttgcccatgccaaagagtatattcagcagcttcgcagccggaccatcgttcacactctatgatgaggagattcagactccacagtgtatatattttgccatttattttctaaaaataaacaaaaattgaaggcaaaaaaaaaaaaaaaaaaaaaaaaaaaacacaaaaaaaaaaaacaaaaaaaaaacaaacaaaacaaaaaaaaaaaaaaaaaaaacaaaacaacaacaaaaaagagaaaacgaaaccaacaaaaacaacaacaaacaaaaaaaaagaaaaaagagagagggggagaagggcagcgaggagagagaataagagagagagaggagagggcaacaacaacaaagaagacgaaaagcaaacacgctacagacgcacagaaaagaagagccaaacaacgcaaacacagagtagaaaaaagaaagaaaaggagaaaagaggaacgcgcaagacacaacaaaacggcaagcaaaaagaagaaaaaaaagaaaggaaaaggagtaaaggacgaagagaaaagagtagaacagagaaaaggaagaggaagaaggaaagaagagagcacaaagagggaccaagacgagagagagaaacgagagacgcgagaagcagagacgcagcaaagaaagacaaagcgaagaagagaggacaacgagcgagcgaaaggtgcagaaaagagagaaacgaaggagcagggagcaagagggagagggcggaagaccaagagagacaagcgacgaaaagcaggaataaagaacaagacaagaaaagcgggagggggaaggcaaaggcgaacaagagaccaaaaaggaa

SEQ ID NO: 317255 - DNA, 338 bp, Homo sapiens
ctcttgtaacgcccctaacagcctacgcctcgtctctcgactcgaataacacctgagtccacctcaggacgaggccagtgcctgaaacgcatccgctaccatggcagaggtcgctttgggatcatggagaaggtttattgccattattttgtgaagttggtggaagggcccccacctccacctgagccaccaaagacggcagttgcccatgccaaagagtatattcagcagcttcgcagccggaccatcgttcacactctatgatgaggagattcagactccacagtgtatatattttgccatttattttctaaaaataaacaaaaattgaaggcaaa

SEQ ID NO: 317256 - DNA, 341 bp, Homo sapiens
  misc_feature (51)..(51): n is a, c, g, or t
ttattcccatcgtgcccacgagagaaagagtcctcgttggaccccctcagncttactgagtccacctcaggacgaggccagtgcctgaaacgcatccgctaccatggcagaggtcgctttgggatcatggagaaggtttattgccattattttgtgaagttggtggaagggcccccacctccacctgagccaccaaagacggcagttgcccatgccaaagagtatattcagcagcttcgcagccggaccatcgttcacactctatgatgaggagattcagactccacagtgtatatattttgccatttattttctaaaaataaacaaaaattgaaggcaaa

SEQ ID NO: 317257 - DNA, 313 bp, Homo sapiens
  misc_feature (1)..(1): n is a, c, g, or t
nttcccccgtatactgagtcgtatgtgctgagtccacctcaggacgaggccagtgcctgaaacgcatccgctaccatggcagaggtcgctttgggatcatggagaaggtttattgccattattttgtgaagttggtggaagggcccccacctccacctgagccaccaaagacggcagttgcccatgccaaagagtatattcagcagcttcgcagccggaccatcgttcacactctatgatgaggagattcagactccacagtgtatatattttgccatttattttctaaaaataaacaaaaattgaaggcaaa

SEQ ID NO: 317258 - DNA, 795 bp, Homo sapiens
gactgcacgccgctagagcgggctgtgctttgtaatggtttatttaactcgaaggtaaagaggttaaacactcgattaggagaaatgggaccgggccccccccttgggtgcccgactggatatgtcatatgccaaaggggccttttccagttaattggttcatccatcaggggttagtgcacaccagtttgggacttaatggcagtgaattttatatttccgctcggacaagggatttacgaaatctaccactgtcgaagacaaataaaatatagcaaagacaagatgtggtatttggcaaaattgatacgaggaatgtctattgaccaggctttggctcagttggaattcaatgacaaaaaaggggccaaaataattaaagaggttctcttagaagcacaagatatggcagtgagagaccataacgtggaattcaggtccaatttatatatagctgagtccacctcaggacgaggccagtgcctgaaacgcatccgctaccatggcagaggtcgctttgggatcatggagaaggtttattgccattattttgtgaagttggtggaagggcccccacctccacctgagccaccaaagacggcagttgcccatgccaaagagtatattcagcagcttcgcagccggaccatcgttcacactctatgatgaggagattcagactccacagtgtatatattttgccatttattttctaaaaataaacaaaaattgaaggcaaacgatgcggccgaagccccggtttctctgattttttgggccatgctgattccaata

SEQ ID NO: 317259 - DNA, 312 bp, Homo sapiens
tgctccggatgggggcgcctcctcccaggagcttctctgaaggaaatgggggaaaagctggagcagggtccctggcagtgtccctccgggagggcttcctgcacctggctgtggtccagagcactgctagcagtctgcgtgcatcttccacagagttcctctccgccaggtaacactggggaggctaggggtcagggctgtggctggttgaggtgtgtgatgtggggaggctaggggccagggctgtggctggttgaggtgtgtgatgtggggaggctaggggccagggctgtggctggttgaggtgtgtga

SEQ ID NO: 317260 - DNA, 532 bp, Homo sapiens
ccagtacttactgatcattgctgatcaataccagaccacttaccaggcactttgcctctagtgagtatacattgctccagctcctcaaagccttaaaataccgttcgaagtcaagaagctaagttacacagcaatagggttagaatgttttttttcctaagggaaatgaatatatttcacaggaatcagacaaggcttctctagctggtgttgataactcacatattttctttccactgccctttattacaggtgtatactttcaacaaaaattgttgctaagccctgcgctaggtgctggagatgtaaagattaataaaagacagttccaaacctgaaggaacctcacagactattgagaaggagagaagcaaacataactgagtatagttgtgaactgctataactgtacaaattgctgtgggaccacttaaaatatataaatacataccctttacattctgcttggagggtaggagtgtgcttataacatggcgcttttaacattctttgctaaataaaatgtaaagat

SEQ ID NO: 317261 - DNA, 216 bp, Homo sapiens
cagtggctgatcaatttaggaccagtcattatgctactcctgaggacacagaaatgaattatttatgttactagtcttcacgcaacctgaaatacatagaaaataaataagaccaaagtttgaaaaagtgaagacattaagttcattaaggtgctgaaaagtagatctctatctgagacaccctgagggctaaaaagaagaaaaagtgcattctac

SEQ ID NO: 317262 - DNA, 2189 bp, Homo sapiens
  misc_feature (90)..(90): n is a, c, g, or t
  misc_feature (189)..(189): n is a, c, g, or t
gtccctgaggtgaagaaagaggagactttgctggatctggactttgatcctttcaagcccgaggtgacacctgcaggttctgctggagtnacccactcacccatgtctcagacattgccctgggacctatggacgacaagcactgatttggtacagccggcttctggtggttcatttaatggattcacncagccccaggatacttcattattcacaatgcagacagaccagagtatgatctgcaacttggctgaatctgaacaggctccacccacagagccaaaagcagaggagcctctggctgctgtcacacctgccgttggtctggaccttggaatggacactcgggctgaggagccagtggaggaggcagtgatcatacctggagctgatgctgatgcagctgttggaaccttggtgtcagcagctgagggggccccaggagaggaagcagaggcggagaaggccactgtccctgccggggaaggagtaagtttagaggaggccaaaattggaactgaaaccactgagggtgcagagagtgcccaacctgaagcagaggagctcgaagcaacagtgcctcaggagaaggtcattccttcggtggtcatagagcctgcctccaaccatgaagaggaaggagaaaacgaaataactataggtgcagagcccaaggagaccaccgaggacgcggctcctccgggccccaccagcgagacaccggagctggctacggagcagaagcctatccaggaccctcagcccacgccttctgcaccagccatgggggctgctgaccagctagcatctgcaagggaggcctctcaggaattgcctcctggctttctctacaaggtggaaacactgcatgattttgaggcagcaaattctgatgaacttaccttacaaaggggtgatgtggtgctggtggtcccctcagattcagaagctgatcaggatgcaggctggctggtgggagtgaaggaatcagactggcttcagtacagagaccttgccacctacaaaggcctctttccagagaacttcacccgacgcttagattagggcaacaagtactgcaagaaggagctcagttacggggtttttaaaccttcatgaaaacctgaagagttcacttttgttattatgctcttaatgatttacagactgatgccagacaaaccttgggaagatgtatcaatggagcatgtgtgcaaaaaaatgtaagaggaaaaaaagtaaattaaggaaaaaatcctcactcattcccatgttgtcaataacaggtttgtttgtgctttgtccaagctgtggagactcttgtacttgatcccctcccaccaattctaaagtagctttctccagatcagactttaatttctctgcatcaggtgtatcgtattgagtggctgccctgcagaagatgtgatgaattatcctgtagtacaagattatcttattcccctgcccaggtgtgagcacgtgctctcgctccctttcaggtttactatgtttaaaactaaactgctgcaaaagttctcaatgttcttttccaacacatctatatatatatggacacacagtcacgcaagctagttcccatgactcctggatctatgtgtatgcagaaggctacatatacatagttgcttctttcctttccattgtagctctttgcctctcaattgtcattgatacatgcattgctcttattctgtctggcattacaattgcagttttgcctaatggcaaaaccagccatcccattgccaaaagagtcaacagtatctgtgtttgtactgtgcagttttcaggatgagatgacagatagcacgactacactgaggcaccctcagagaaggcagggcctgatttatctagctgtccagccgctgtggctggaggtaggctagttgggatgggcagctaagcagtcttctcttctgcctttatgagattgggtagaaagatggggcatattcatctacccccaaaagaacactataaaaacagctcctctatatttccacctctttctatttatgcaactcatcttcacagattgttctaaagtaaaatagatggtgtatgctgtatccacaaatcatctgtaacaattatgttttcagtgctgtgtcattccaaataaacctttggtaatcttcaacgattaccctaattccttttga

SEQ ID NO: 317263 - DNA, 1909 bp, Homo sapiens
ctcacccttcaagactctgtctcccatcccctatccctcctcccaattcccaccgaaacctcatgcttaccaaactgcctggctattcaaggatccagaaattaattccactaagggtttaggcctcaggaggaacagaaggaggctgtgtggcacagcggaaggcccagacctgagtctggctagtggggaagtatggaagtggcagccccagctttgggctgggggctaaggcaggttgtgcaggacaaggaggttctgttttccaggccctgccggcatcgccacggtttttcttcccccaggagaaggtcattccttcggtggtcatagagcctgcctccaaccatgaagaggaaggagaaaacgaaataactataggtgcagagcccaaggagaccaccgaggacgcggctcctccgggccccaccagcgagacaccggagctggctacggagcagaagcctatccaggaccctcagcccacgccttctgcaccagccatgggggctgctgaccagctagcatctgcaagggaggcctctcaggaattgcctcctggctttctctacaaggtggaaacactgcatgattttgaggcagcaaattctgatgaacttaccttacaaaggggtgatgtggtgctggtggtcccctcagattcagaagctgatcaggatgcaggctggctggtgggagtgaaggaatcagactggcttcagtacagagaccttgccacctacaaaggcctctttccagagaacttcacccgacgcttagattagggcaacaagtactgcaagaaggagctcagttacggggtttttaaaccttcatgaaaacctgaagagttcacttttgttattatgctcttaatgatttacagactgatgccagacaaaccttgggaagatgtatcaatggagcatgtgtgcaaaaaaatgtaagaggaaaaaaagtaaattaaggaaaaaatcctcactcattcccatgttgtcaataacaggtttgtttgtgctttgtccaagctgtggagactcttgtacttgatcccctcccaccaattctaaagtagctttctccagatcagactttaatttctctgcatcaggtgtatcgtattgagtggctgccctgcagaagatgtgatgaattatcctgtagtacaagattatcttattcccctgcccaggtgtgagcacgtgctctcgctccctttcaggtttactatgtttaaaactaaactgctgcaaaagttctcaatgttcttttccaacacatctatatatatatggacacacagtcacgcaagctagttcccatgactcctggatctatgtgtatgcagaaggctacatatacatagttgcttctttcctttccattgtagctctttgcctctcaattgtcattgatacatgcattgctcttattctgtctggcattacaattgcagttttgcctaatggcaaaaccagccatcccattgccaaaagagtcaacagtatctgtgtttgtactgtgcagttttcaggatgagatgacagatagcacgactacactgaggcaccctcagagaaggcagggcctgatttatctagctgtccagccgctgtggctggaggtaggctagttgggatgggcagctaagcagtcttctcttctgcctttatgagattgggtagaaagatggggcatattcatctacccccaaaagaacactataaaaacagctcctctatatttccacctctttctatttatgcaactcatcttcacagattgttctaaagtaaaatagatggtgtatgctgtatccacaaatcatctgtaacaattatgttttcagtgctgtgtcattccaaataaacctttggtaatcttcaacgattaccctaattccttttga

SEQ ID NO: 317264 - DNA, 2008 bp, Homo sapiens
  misc_feature (90)..(90): n is a, c, g, or t
  misc_feature (189)..(189): n is a, c, g, or t
gtccctgaggtgaagaaagaggagactttgctggatctggactttgatcctttcaagcccgaggtgacacctgcaggttctgctggagtnacccactcacccatgtctcagacattgccctgggacctatggacgacaagcactgatttggtacagccggcttctggtggttcatttaatggattcacncagccccaggatacttcattattcacaatgcagacagaccagagtatgatctgcaacttggctgaatctgaacaggctccacccacagagccaaaagcagaggagcctctggctgctgtcacacctgccgttggtctggaccttggaatggacactcgggctgaggagccagtggaggaggcagtgatcatacctggagctgatgctgatgcagctgttggaaccttggtgtcagcagctgagggggccccaggagaggaagcagaggcggagaaggccactgtccctgccggggaaggagtaagtttagaggaggccaaaattggaactgaaaccactgagggtgcagagagtgcccaacctgaagcagaggagctatccaggaccctcagcccacgccttctgcaccagccatgggggctgctgaccagctagcatctgcaagggaggcctctcaggaattgcctcctggctttctctacaaggtggaaacactgcatgattttgaggcagcaaattctgatgaacttaccttacaaaggggtgatgtggtgctggtggtcccctcagattcagaagctgatcaggatgcaggctggctggtgggagtgaaggaatcagactggcttcagtacagagaccttgccacctacaaaggcctctttccagagaacttcacccgacgcttagattagggcaacaagtactgcaagaaggagctcagttacggggtttttaaaccttcatgaaaacctgaagagttcacttttgttattatgctcttaatgatttacagactgatgccagacaaaccttgggaagatgtatcaatggagcatgtgtgcaaaaaaatgtaagaggaaaaaaagtaaattaaggaaaaaatcctcactcattcccatgttgtcaataacaggtttgtttgtgctttgtccaagctgtggagactcttgtacttgatcccctcccaccaattctaaagtagctttctccagatcagactttaatttctctgcatcaggtgtatcgtattgagtggctgccctgcagaagatgtgatgaattatcctgtagtacaagattatcttattcccctgcccaggtgtgagcacgtgctctcgctccctttcaggtttactatgtttaaaactaaactgctgcaaaagttctcaatgttcttttccaacacatctatatatatatggacacacagtcacgcaagctagttcccatgactcctggatctatgtgtatgcagaaggctacatatacatagttgcttctttcctttccattgtagctctttgcctctcaattgtcattgatacatgcattgctcttattctgtctggcattacaattgcagttttgcctaatggcaaaaccagccatcccattgccaaaagagtcaacagtatctgtgtttgtactgtgcagttttcaggatgagatgacagatagcacgactacactgaggcaccctcagagaaggcagggcctgatttatctagctgtccagccgctgtggctggaggtaggctagttgggatgggcagctaagcagtcttctcttctgcctttatgagattgggtagaaagatggggcatattcatctacccccaaaagaacactataaaaacagctcctctatatttccacctctttctatttatgcaactcatcttcacagattgttctaaagtaaaatagatggtgtatgctgtatccacaaatcatctgtaacaattatgttttcagtgctgtgtcattccaaataaacctttggtaatcttcaacgattaccctaattccttttga

SEQ ID NO: 317265 - DNA, 425 bp, Homo sapiens
atccttttctcctctttaagaactcatattataatccagttaatatcaattaactatgctttgtacagtcacaatgtacaaagcattagctatactttatacagtcaataagtcattgcaaatgtttattccttctttttctttttctttttttttttaactaacaacttatttgggataggccttcccattgatcacggcacagcactttacctgtaatgtgacatcctggttcagaaccacaacactaatgtaacacattattaattaattgtggcagtgtggattttccagtagtttgctggaccctgaaagttctgtcattgtttttcaggatgcaggctggctggtgggagtgaaggaatcagactggcttcagtacagagaccttgccacctacaaaggcctctttccagagaacttca

SEQ ID NO: 317266 - DNA, 640 bp, Homo sapiens
gtatttttagtagagacggggtttcgccatattggccaggctggtctcgaactcctgacctcaggtgatccgtctgccttggcctcccaaagtgctggaaatacaggcatgagccactacgcccagcctatactttaaacattgttattcaaaccgtgggccagatacattcatgggtcatgaaatgaacggaatggatcataagcagcactgttttaatggaacagaatgtaacaaactagaaccaaatagaatggactaccatatatctgcagtaacatatagtgaaatttgtatttgcatagttgtgtatatacatgtttactgatcaccaagtaacatacacttcttactgggaagccgggtcaacaaagtttggtatccactgatctaggacagtagtgtctggttgtgttttttcccccttctcaccacttgtgaggaagaaagccccctattagcaacagtgggggacttacacgtggctctggggcagtgcctaaagaacggggataaggaggcaggccccatgtcaaagtggagcaggcaccacctctgcccaggcctgttctgccctggccagggagggatagcctgtaacaatttcagtttgtgcagaacattcaggtatgaaaagaaa

SEQ ID NO: 317267 - DNA, 466 bp, Homo sapiens
agtgtgtcaggcgggagtactgctgtgtggagactgagtgtggcttaaggggatatgcgtggatgccaagtgccaaggaagggcctgcaatggttcactgtatgtgtccacgcggctgggccatggtgcccagacggctggtcaaatgttatcctggatgtttccatgagggtgagtatggatgagataaacatttaaatcagctgactttgggggaagcagactgcccaccacaatgcaggtgggcctcacccaagcagaaaaaggcctccacagagcaaaggctgagctccctaagcagcagtgctgcggctgtggctcctcctaggtctccagcctgctgggccccctgtagattttgggcttcataagtctctatgaacaagccagttccttacaatagatctttctatacgcacaccctattggtttggtctctctggaaaaccctggcacagggtctccg

SEQ ID NO: 317268 - DNA, 4066 bp, Homo sapiens
ccacgcgtccgacgccccccacccgggaggggggagagaggcaaaaagtaagagaggaaaaaaaatagcaggaagatggcgcccaccaagcccagctttcagcaggatccttccaggcgagaacgtttacaagcattgagaaaggagaaatcccgagatgctgctcgctcccgccggggaaaagaaaactttgagttctatgaattggccaagttgttgcctcttcctgcagccattaccagccagctcgacaaggcatccatcattcgacttacaattagctatctgaaaatgagggactttgctaaccagggggaccctccgtggaacttgcgaatggaaggccctccacctaacacatcagtaaaagttataggtgcacagcgaaggagaagccccagtgcactagccattgaagtatttgaagcacatttgggaagccacattttgcagtccctggatggctttgtatttgcactaaatcaggaaggaaaatttttgtacatttccgaaacagtctccatctacctaggcctctcacaagtggagctgacaggcagcagtgtctttgactatgtccaccccggagatcacgtggagatggctgagcagctgggcatgaagctcccccctgggcggggtctcctgtcacagggcactgctgaggacggagccagctcagcatcttcctcctctcagtcggagacccccgagccagtggagtcaaccagccccagtctgctaaccactgacaacactcttgagcgttcctttttcatccgaatgaaatctactctgaccaaacgcggtgtgcacatcaaatcatcaggatataaggtgattcacataacaggccggctacgcctgagagtgtcgctgtcccacgggaggaccgtccccagccaaatcatgggtctcgtggttgttgcgcatgccttgcctccccctacgatcaatgaagtcagaattgactgccatatgttcgtcactcgagtaaatatggacctcaatatcatttactgtgaaaataggattagtgattatatggatctgacccctgtagatatcgtagggaagagatgctaccacttcatccatgctgaagacgtggagggcatcaggcacagtcacttggacttgctgaataagggtcagtgtgtgacaaagtactatcgctggatgcagaagaacggaggatatatttggatacagtccagtgccaccatagctattaatgccaagaatgcaaatgaaaagaatatcatctgggtgaattaccttcttagcaatcctgagtacaaggacacacccatggacatcgcacagctcccccatctgccggagaaaacttccgaatcctcggagacatccgactctgagtcagactctaaagacacctcaggtattacagaggacaacgagaactccaagtccgacgagaaggggaaccagtccgagaacagcgaagacccggagcccgaccggaagaagtcgggcaacgcgtgtgacaacgacatgaactgcaacgacgacggccacagctccagtaacccggacagccgcgacagcgacgacagcttcgagcactcggactttgagaaccccaaggcgggcgaggacggcttcggtgctctgggcgcgatgcagatcaaggtggagcgctacgtggagagcgagtcggacctgcggctgcagaactgcgagtcactcacgtccgacagcgccaaggactcggacagcgcaggcgaggcgggcgcgcaggcctccagcaagcaccagaagcgcaagaaaaggcggaaacggcaaaagggcggcagcgccagccgccggcgcctgtccagcgcgtcgagcccaggcggcctggacgcgggcctggtggagcccccgcggctgctgtcctcccccaacagtgcctcggtgctcaagatcaagacggagatctcagaacccatcaatttcgacaatgacagcagcatctggaactacccgcccaaccgggagatctccaggaacgagtccccctacagcatgaccaagccccccagctctgagcacttcccgtccccgcagggcggcggcggtgggggtggcggtggcggggggctgcacgtggccattcccgactcggtcctcaccccgcccggcgccgacggcgcggccgcccgcaagactcagttcggcgcctcggccaccgcggccctggcccccgtcgcctccgacccgctgtcacccccgctctcggcgtccccgcgggacaagcaccccgggaacggcggcgggggcgggggcgggggcggcggcgcggggggcggcggccccagcgcgtccaactccttgctgtacactggggacctggaggcgctgcagaggttgcaggcgggcaacgtcgtgctcccgctggtgcacagggtgaccgggaccctggccgccaccagcacggccgcgcagagggtctacaccacgggcaccatccgctacgcgcccgccgaggtgaccctggccatgcagagcaacctgctgcccaacgcgcacgctgttaacttcgtggacgttaacagccccggctttggcctcgaccccaagacgcccatggagatgctctaccaccacgtgcaccggctcaacatgtcaggaccgttcggcggcgcagtgagcgcagctagcctgacgcagatgcccgccggcaacgtgttcaccacggccgagggactcttctccacgctgcccttccccgtctacagcaacggcatccacgcggcacagactctggagcgcaaggaggactgaggcgccgcccgtcctgggcccggccaggccccgcttggaggaggcatcgtcggcattttcgtttagacctttaattctagcactttgaattcgagcaggtcagcgtcttctctcgccacgacggtccccattccaccccctctttctttcacctgacttattctttcgtgtaaagatatgtttattttttgccttcagagggtcagacgaccagttgcctgccgttttgtcttcttctaaggtgtgtgttgggttgttttgctttcctttgcatctttattaagatgtctttcatgtgtatatgcctctgccatagaatactcagtcttgtggtcaagagagttctcaagtgacaaccattggggtttcttcataaagatcttgatatgatcaagatggaaagagacaagcataaacaatgtgccctgtttgactaagtcaaatgaaatagggtggtttttgtttctgttcctaattcctttaaaaaatagggggaatagtattttagaattttatgcagaatttaattctctttttacggttaagattttaagattttcttacttgcacataaaaataatttgggttcttaaacttaatttctggcctgtgactagaatgtttaaaaaaaaaaaaagtcggactaaatgttaattactgaaacattaacttaatttctaaaaccatggtgctatcatttattaatctgtaatgtcttcatacaaaatgcagctcctgggctgggttttgggggaaaaaaaaaaaatgtgttctgtcctggtctggagtccgttgctgcagtctccttggttagttaagacaaagccctcattaacgtttgctgcaggacttaaaattttttacctcccaactaacaaacatagcctcacattaaatttaatgggtcagtaaagccccttttaaaggggctgctggaaaactcaatcaaactgatttgaggagcagtttaggtacatactgccttttgtttagctttttgttttccttactcagtctaactgaggctaattttgcaacttcaataacacttcggagtaaaagaaggaaaatatttaacatgtttttggtttttttcattccttgcttaaaacaaaaaggaaggttgtatttggggggactggtttgatttgatggaatttctttccctttggttcttatttctgggttgaaaccaataagttttaaaactaaagaatgggttaataagcttcagacagataactgcaactgaaaactgcacattaagtaaaaaaaaaaa

SEQ ID NO: 317269 - DNA, 842 bp, Homo sapiens
cagtgaataaaagatggatagcttctaactctagaatgaagagttcaggcttaagagtgagagctatcactggaaaatgtccttctcaattcagaactacagcacaattcatgttgcagaccaatgtagtgggacccagtttccacctatgttcacgagtgagatgtatgcaagaaacgttttacatggaaaaagcatgcatgtctcctaacgttcagttcataactgctgcattgtgccatcttcatacactggactctttccttcctacatcgttaatgtgtttgagcacagacactgtgttcacctctccagtcacatcgacgtccaagcagatgttctgtggcaaagttacaaagcatttatgtcactttttaaaattaatcaaattctcccttggaaggagtttagttcctctggctttaaaagatattattgctgaaaaataaactctgtatacttgcttttaaaaatctttgtatgccttttgtaggttcagagtgaggggtgctggaggacttttaaagtgtggtattttaaagatgttcttaattgtaaagagcaaactttacatttgtgaaaaagcatctcaaagttagaacatatatctcctaagactagctgacctccctcccgtaaactggtgatttggagacttcaaaattctgtttatcccatagaaacatgtgtatcctaggatgggaaatctgaggcttctttctctcataatttttaataaagtggaatcactagagaaagtaccggggtttcttaactttttaaattgtttttcgttttcactttaattgcataaaaggggtagaaaaattccatcaaccaaa

SEQ ID NO: 317270 - DNA, 624 bp, Homo sapiens
  misc_feature (37)..(37): n is a, c, g, or t
tagccccacaccaattggggaatagtttttgtttttntttcccccgacgaggctttcagagtcgacgagtgcacagacactgtgttcacctctccagtcacatcgacgtccaagcagatgttctgtggcaaagttacaaagcatttatgtcactttttaaaattaatcaaattctcccttggaaggagtttagttcctctggctttaaaagatattattgctgaaaaataaactctgtatacttgcttttaaaaatctttgtatgccttttgtaggttcagagtgaggggtgctggaggacttttaaagtgtggtattttaaagatgttcttaattgtaaagagcaaactttacatttgtgaaaaagcatctcaaagttagaacatatatctcctaagactagctgacctccctcccgtaaactggtgatttggagacttcaaaattctgtttatcccatagaaacatgtgtatcctaggatgggaaatctgaggcttctttctctcataatttttaataaagtggaatcactagagaaagtaccggggtttcttaactttttaaattgtttttcgttttcactttaattgcataaaaggggtagaaaaattccatcaaccaaa

SEQ ID NO: 317271 - DNA, 4132 bp, Homo sapiens
gcggccgcgggggtgccggccggcgcgggcatggggagggccggcgccgcggccaacggcaccccgcagaacgtccagggcatcacctcctaccagcagcgaataactgcccagcatcctctgcccaaccaatcagaatgtaggaaaatctacagatatgacggaatctactgtgaatctacctaccagaatttacaagcattgagaaaggagaaatcccgagatgctgctcgctcccgccggggaaaagaaaactttgagttctatgaattggccaagttgttgcctcttcctgcagccattaccagccagctcgacaaggcatccatcattcgacttacaattagctatctgaaaatgagggactttgctaaccagggggaccctccgtggaacttgcgaatggaaggccctccacctaacacatcagtaaaagttataggtgcacagcgaaggagaagccccagtgcactagccattgaagtatttgaagcacatttgggaagccacattttgcagtccctggatggctttgtatttgcactaaatcaggaaggaaaatttttgtacatttccgaaacagtctccatctacctaggcctctcacaagtggagctgacaggcagcagtgtctttgactatgtccaccccggagatcacgtggagatggctgagcagctgggcatgaagctcccccctgggcggggtctcctgtcacagggcactgctgaggacggagccagctcagcatcttcctcctctcagtcggagacccccgagccagtggagtcaaccagccccagtctgctaaccactgacaacactcttgagcgttcctttttcatccgaatgaaatctactctgaccaaacgcggtgtgcacatcaaatcatcaggatataaggtgattcacataacaggccggctacgcctgagagtgtcgctgtcccacgggaggaccgtccccagccaaatcatgggtctcgtggttgttgcgcatgccttgcctccccctacgatcaatgaagtcagaattgactgccatatgttcgtcactcgagtaaatatggacctcaatatcatttactgtgaaaataggattagtgattatatggatctgacccctgtagatatcgtagggaagagatgctaccacttcatccatgctgaagacgtggagggcatcaggcacagtcacttggacttgctgaataagggtcagtgtgtgacaaagtactatcgctggatgcagaagaacggaggatatatttggatacagtccagtgccaccatagctattaatgccaagaatgcaaatgaaaagaatatcatctgggtgaattaccttcttagcaatcctgagtacaaggacacacccatggacatcgcacagctcccccatctgccggagaaaacttccgaatcctcggagacatccgactctgagtcagactctaaagacacctcaggtattacagaggacaacgagaactccaagtccgacgagaaggggaaccagtccgagaacagcgaagacccggagcccgaccggaagaagtcgggcaacgcgtgtgacaacgacatgaactgcaacgacgacggccacagctccagtaacccggacagccgcgacagcgacgacagcttcgagcactcggactttgagaaccccaaggcgggcgaggacggcttcggtgctctgggcgcgatgcagatcaaggtggagcgctacgtggagagcgagtcggacctgcggctgcagaactgcgagtcactcacgtccgacagcgccaaggactcggacagcgcaggcgaggcgggcgcgcaggcctccagcaagcaccagaagcgcaagaaaaggcggaaacggcaaaagggcggcagcgccagccgccggcgcctgtccagcgcgtcgagcccaggcggcctggacgcgggcctggtggagcccccgcggctgctgtcctcccccaacagtgcctcggtgctcaagatcaagacggagatctcagaacccatcaatttcgacaatgacagcagcatctggaactacccgcccaaccgggagatctccaggaacgagtccccctacagcatgaccaagccccccagctctgagcacttcccgtccccgcagggcggcggcggtgggggtggcggtggcggggggctgcacgtggccattcccgactcggtcctcaccccgcccggcgccgacggcgcggccgcccgcaagactcagttcggcgcctcggccaccgcggccctggcccccgtcgcctccgacccgctgtcacccccgctctcggcgtccccgcgggacaagcaccccgggaacggcggcgggggcgggggcgggggcggcggcgcggggggcggcggccccagcgcgtccaactccttgctgtacactggggacctggaggcgctgcagaggttgcaggcgggcaacgtcgtgctcccgctggtgcacagggtgaccgggaccctggccgccaccagcacggccgcgcagagggtctacaccacgggcaccatccgctacgcgcccgccgaggtgaccctggccatgcagagcaacctgctgcccaacgcgcacgctgttaacttcgtggacgttaacagccccggctttggcctcgaccccaagacgcccatggagatgctctaccaccacgtgcaccggctcaacatgtcaggaccgttcggcggcgcagtgagcgcagctagcctgacgcagatgcccgccggcaacgtgttcaccacggccgagggactcttctccacgctgcccttccccgtctacagcaacggcatccacgcggcacagactctggagcgcaaggaggactgaggcgccgcccgtcctgggcccggccaggccccgcttggaggaggcatcgtcggcattttcgtttagacctttaattctagcactttgaattcgagcaggtcagcgtcttctctcgccacgacggtccccattccaccccctctttctttcacctgacttattctttcgtgtaaagatatgtttattttttgccttcagagggtcagacgaccagttgcctgccgttttgtcttcttctaaggtgtgtgttgggttgttttgctttcctttgcatctttattaagatgtctttcatgtgtatatgcctctgccatagaatactcagtcttgtggtcaagagagttctcaagtgacaaccattggggtttcttcataaagatcttgatatgatcaagatggaaagagacaagcataaacaatgtgccctgtttgactaagtcaaatgaaatagggtggtttttgtttctgttcctaattcctttaaaaaatagggggaatagtattttagaattttatgcagaatttaattctctttttacggttaagattttaagattttcttacttgcacataaaaataatttgggttcttaaacttaatttctggcctgtgactagaatgtttaaaaaaaaaaaaagtcggactaaatgttaattactgaaacattaacttaatttctaaaaccatggtgctatcatttattaatctgtaatgtcttcatacaaaatgcagctcctgggctgggttttgggggaaaaaaaaaaaatgtgttctgtcctggtctggagtccgttgctgcagtctccttggttagttaagacaaagccctcattaacgtttgctgcaggacttaaaattttttacctcccaactaacaaacatagcctcacattaaatttaatgggtcagtaaagccccttttaaaggggctgctggaaaactcaatcaaactgatttgaggagcagtttaggtacatactgccttttgtttagctttttgttttccttactcagtctaactgaggctaattttgcaacttcaataacacttcggagtaaaagaaggaaaatatttaacatgtttttggtttttttcattccttgcttaaaacaaaaaggaaggttgtatttggggggactggtttgatttgatggaatttctttccctttggttcttatttctgggttgaaaccaataagttttaaaactaaagaatgggttaataagcttcagacagataactgcaactgaaaactgcacattaagtaaaaaaaaaaa

SEQ ID NO: 317272 - DNA, 4042 bp, Homo sapiens
gcggccgcgggggtgccggccggcgcgggcatggggagggccggcgccgcggccaacggcaccccgcagaacgtccagggcatcacctcctaccagcagcgtttacaagcattgagaaaggagaaatcccgagatgctgctcgctcccgccggggaaaagaaaactttgagttctatgaattggccaagttgttgcctcttcctgcagccattaccagccagctcgacaaggcatccatcattcgacttacaattagctatctgaaaatgagggactttgctaaccagggggaccctccgtggaacttgcgaatggaaggccctccacctaacacatcagtaaaagttataggtgcacagcgaaggagaagccccagtgcactagccattgaagtatttgaagcacatttgggaagccacattttgcagtccctggatggctttgtatttgcactaaatcaggaaggaaaatttttgtacatttccgaaacagtctccatctacctaggcctctcacaagtggagctgacaggcagcagtgtctttgactatgtccaccccggagatcacgtggagatggctgagcagctgggcatgaagctcccccctgggcggggtctcctgtcacagggcactgctgaggacggagccagctcagcatcttcctcctctcagtcggagacccccgagccagtggagtcaaccagccccagtctgctaaccactgacaacactcttgagcgttcctttttcatccgaatgaaatctactctgaccaaacgcggtgtgcacatcaaatcatcaggatataaggtgattcacataacaggccggctacgcctgagagtgtcgctgtcccacgggaggaccgtccccagccaaatcatgggtctcgtggttgttgcgcatgccttgcctccccctacgatcaatgaagtcagaattgactgccatatgttcgtcactcgagtaaatatggacctcaatatcatttactgtgaaaataggattagtgattatatggatctgacccctgtagatatcgtagggaagagatgctaccacttcatccatgctgaagacgtggagggcatcaggcacagtcacttggacttgctgaataagggtcagtgtgtgacaaagtactatcgctggatgcagaagaacggaggatatatttggatacagtccagtgccaccatagctattaatgccaagaatgcaaatgaaaagaatatcatctgggtgaattaccttcttagcaatcctgagtacaaggacacacccatggacatcgcacagctcccccatctgccggagaaaacttccgaatcctcggagacatccgactctgagtcagactctaaagacacctcaggtattacagaggacaacgagaactccaagtccgacgagaaggggaaccagtccgagaacagcgaagacccggagcccgaccggaagaagtcgggcaacgcgtgtgacaacgacatgaactgcaacgacgacggccacagctccagtaacccggacagccgcgacagcgacgacagcttcgagcactcggactttgagaaccccaaggcgggcgaggacggcttcggtgctctgggcgcgatgcagatcaaggtggagcgctacgtggagagcgagtcggacctgcggctgcagaactgcgagtcactcacgtccgacagcgccaaggactcggacagcgcaggcgaggcgggcgcgcaggcctccagcaagcaccagaagcgcaagaaaaggcggaaacggcaaaagggcggcagcgccagccgccggcgcctgtccagcgcgtcgagcccaggcggcctggacgcgggcctggtggagcccccgcggctgctgtcctcccccaacagtgcctcggtgctcaagatcaagacggagatctcagaacccatcaatttcgacaatgacagcagcatctggaactacccgcccaaccgggagatctccaggaacgagtccccctacagcatgaccaagccccccagctctgagcacttcccgtccccgcagggcggcggcggtgggggtggcggtggcggggggctgcacgtggccattcccgactcggtcctcaccccgcccggcgccgacggcgcggccgcccgcaagactcagttcggcgcctcggccaccgcggccctggcccccgtcgcctccgacccgctgtcacccccgctctcggcgtccccgcgggacaagcaccccgggaacggcggcgggggcgggggcgggggcggcggcgcggggggcggcggccccagcgcgtccaactccttgctgtacactggggacctggaggcgctgcagaggttgcaggcgggcaacgtcgtgctcccgctggtgcacagggtgaccgggaccctggccgccaccagcacggccgcgcagagggtctacaccacgggcaccatccgctacgcgcccgccgaggtgaccctggccatgcagagcaacctgctgcccaacgcgcacgctgttaacttcgtggacgttaacagccccggctttggcctcgaccccaagacgcccatggagatgctctaccaccacgtgcaccggctcaacatgtcaggaccgttcggcggcgcagtgagcgcagctagcctgacgcagatgcccgccggcaacgtgttcaccacggccgagggactcttctccacgctgcccttccccgtctacagcaacggcatccacgcggcacagactctggagcgcaaggaggactgaggcgccgcccgtcctgggcccggccaggccccgcttggaggaggcatcgtcggcattttcgtttagacctttaattctagcactttgaattcgagcaggtcagcgtcttctctcgccacgacggtccccattccaccccctctttctttcacctgacttattctttcgtgtaaagatatgtttattttttgccttcagagggtcagacgaccagttgcctgccgttttgtcttcttctaaggtgtgtgttgggttgttttgctttcctttgcatctttattaagatgtctttcatgtgtatatgcctctgccatagaatactcagtcttgtggtcaagagagttctcaagtgacaaccattggggtttcttcataaagatcttgatatgatcaagatggaaagagacaagcataaacaatgtgccctgtttgactaagtcaaatgaaatagggtggtttttgtttctgttcctaattcctttaaaaaatagggggaatagtattttagaattttatgcagaatttaattctctttttacggttaagattttaagattttcttacttgcacataaaaataatttgggttcttaaacttaatttctggcctgtgactagaatgtttaaaaaaaaaaaaagtcggactaaatgttaattactgaaacattaacttaatttctaaaaccatggtgctatcatttattaatctgtaatgtcttcatacaaaatgcagctcctgggctgggttttgggggaaaaaaaaaaaatgtgttctgtcctggtctggagtccgttgctgcagtctccttggttagttaagacaaagccctcattaacgtttgctgcaggacttaaaattttttacctcccaactaacaaacatagcctcacattaaatttaatgggtcagtaaagccccttttaaaggggctgctggaaaactcaatcaaactgatttgaggagcagtttaggtacatactgccttttgtttagctttttgttttccttactcagtctaactgaggctaattttgcaacttcaataacacttcggagtaaaagaaggaaaatatttaacatgtttttggtttttttcattccttgcttaaaacaaaaaggaaggttgtatttggggggactggtttgatttgatggaatttctttccctttggttcttatttctgggttgaaaccaataagttttaaaactaaagaatgggttaataagcttcagacagataactgcaactgaaaactgcacattaagtaaaaaaaaaaa

SEQ ID NO: 317273 - DNA, 3535 bp, Homo sapiens
acattaatttttcttttttattttccgcaaagtaaacattttctaaatgaggtaaattgattactactgctcttagcacccatcagtcatttatttttagtgaactcaaggattgcacctgagctgtagctgtgaggggctgtgtcaagatctaaatcgtgtgtgtctgtatttttgtattcctcagtggagtcaaccagccccagtctgctaaccactgacaacactcttgagcgttcctttttcatccgaatgaaatctactctgaccaaacgcggtgtgcacatcaaatcatcaggatataaggtgattcacataacaggccggctacgcctgagagtgtcgctgtcccacgggaggaccgtccccagccaaatcatgggtctcgtggttgttgcgcatgccttgcctccccctacgatcaatgaagtcagaattgactgccatatgttcgtcactcgagtaaatatggacctcaatatcatttactgtgaaaataggattagtgattatatggatctgacccctgtagatatcgtagggaagagatgctaccacttcatccatgctgaagacgtggagggcatcaggcacagtcacttggacttgctgaataagggtcagtgtgtgacaaagtactatcgctggatgcagaagaacggaggatatatttggatacagtccagtgccaccatagctattaatgccaagaatgcaaatgaaaagaatatcatctgggtgaattaccttcttagcaatcctgagtacaaggacacacccatggacatcgcacagctcccccatctgccggagaaaacttccgaatcctcggagacatccgactctgagtcagactctaaagacacctcaggtattacagaggacaacgagaactccaagtccgacgagaaggggaaccagtccgagaacagcgaagacccggagcccgaccggaagaagtcgggcaacgcgtgtgacaacgacatgaactgcaacgacgacggccacagctccagtaacccggacagccgcgacagcgacgacagcttcgagcactcggactttgagaaccccaaggcgggcgaggacggcttcggtgctctgggcgcgatgcagatcaaggtggagcgctacgtggagagcgagtcggacctgcggctgcagaactgcgagtcactcacgtccgacagcgccaaggactcggacagcgcaggcgaggcgggcgcgcaggcctccagcaagcaccagaagcgcaagaaaaggcggaaacggcaaaagggcggcagcgccagccgccggcgcctgtccagcgcgtcgagcccaggcggcctggacgcgggcctggtggagcccccgcggctgctgtcctcccccaacagtgcctcggtgctcaagatcaagacggagatctcagaacccatcaatttcgacaatgacagcagcatctggaactacccgcccaaccgggagatctccaggaacgagtccccctacagcatgaccaagccccccagctctgagcacttcccgtccccgcagggcggcggcggtgggggtggcggtggcggggggctgcacgtggccattcccgactcggtcctcaccccgcccggcgccgacggcgcggccgcccgcaagactcagttcggcgcctcggccaccgcggccctggcccccgtcgcctccgacccgctgtcacccccgctctcggcgtccccgcgggacaagcaccccgggaacggcggcgggggcgggggcgggggcggcggcgcggggggcggcggccccagcgcgtccaactccttgctgtacactggggacctggaggcgctgcagaggttgcaggcgggcaacgtcgtgctcccgctggtgcacagggtgaccgggaccctggccgccaccagcacggccgcgcagagggtctacaccacgggcaccatccgctacgcgcccgccgaggtgaccctggccatgcagagcaacctgctgcccaacgcgcacgctgttaacttcgtggacgttaacagccccggctttggcctcgaccccaagacgcccatggagatgctctaccaccacgtgcaccggctcaacatgtcaggaccgttcggcggcgcagtgagcgcagctagcctgacgcagatgcccgccggcaacgtgttcaccacggccgagggactcttctccacgctgcccttccccgtctacagcaacggcatccacgcggcacagactctggagcgcaaggaggactgaggcgccgcccgtcctgggcccggccaggccccgcttggaggaggcatcgtcggcattttcgtttagacctttaattctagcactttgaattcgagcaggtcagcgtcttctctcgccacgacggtccccattccaccccctctttctttcacctgacttattctttcgtgtaaagatatgtttattttttgccttcagagggtcagacgaccagttgcctgccgttttgtcttcttctaaggtgtgtgttgggttgttttgctttcctttgcatctttattaagatgtctttcatgtgtatatgcctctgccatagaatactcagtcttgtggtcaagagagttctcaagtgacaaccattggggtttcttcataaagatcttgatatgatcaagatggaaagagacaagcataaacaatgtgccctgtttgactaagtcaaatgaaatagggtggtttttgtttctgttcctaattcctttaaaaaatagggggaatagtattttagaattttatgcagaatttaattctctttttacggttaagattttaagattttcttacttgcacataaaaataatttgggttcttaaacttaatttctggcctgtgactagaatgtttaaaaaaaaaaaaagtcggactaaatgttaattactgaaacattaacttaatttctaaaaccatggtgctatcatttattaatctgtaatgtcttcatacaaaatgcagctcctgggctgggttttgggggaaaaaaaaaaaatgtgttctgtcctggtctggagtccgttgctgcagtctccttggttagttaagacaaagccctcattaacgtttgctgcaggacttaaaattttttacctcccaactaacaaacatagcctcacattaaatttaatgggtcagtaaagccccttttaaaggggctgctggaaaactcaatcaaactgatttgaggagcagtttaggtacatactgccttttgtttagctttttgttttccttactcagtctaactgaggctaattttgcaacttcaataacacttcggagtaaaagaaggaaaatatttaacatgtttttggtttttttcattccttgcttaaaacaaaaaggaaggttgtatttggggggactggtttgatttgatggaatttctttccctttggttcttatttctgggttgaaaccaataagttttaaaactaaagaatgggttaataagcttcagacagataactgcaactgaaaactgcacattaagtaaaaaaaaaaa

SEQ ID NO: 317274 - DNA, 1224 bp, Homo sapiens
gcggccgcgggggtgccggccggcgcgggcatggggagggccggcgccgcggccaacggcaccccgcagaacgtccagggcatcacctcctaccagcagcgaataactgcccagcatcctctgcccaaccaatcagaatgtaggaaaatctacagatatgacggaatctactgtgaatctacctaccagaatttacaagcattgagaaaggagaaatcccgagatgctgctcgctcccgccggggaaaagaaaactttgagttctatgaattggccaagttgttgcctcttcctgcagccattaccagccagctcgacaaggcatccatcattcgacttacaattagctatctgaaaatgagggactttgctaaccagggggaccctccgtggaacttgcgaatggaaggccctccacctaacacatcagtaaaagttataggtgcacagcgaaggagaagccccagtgcactagccattgaagtatttgaagcacatttgggaagccacattttgcagtccctggatggctttgtatttgcactaaatcaggaaggaaaatttttgtacatttccgaaacagtctccatctacctaggcctctcacaagtggagctgacaggcagcagtgtctttgactatgtccaccccggagatcacgtggagatggctgagcagctgggcatgaagctcccccctgggcggggtctcctgtcacagggcactgctgaggacggagccagctcagcatcttcctcctctcagtcggagacccccgagccagtggtttgcttcccaccagcgagtgatcagtttcttctgtaggacccctgtcaggaagaacatgcctggatcctacttcagagagaactcagccagggcaaggggctcctgtggctttttgggtgggtgtgagttcatagaggggaaaatcaatactgtaccaggatttagacaatttagcaaaatgcacgaggcagtactttggatgatgaataactacagctgcatggctaacccattggttgtgtaaagtatgggttatcatgttttgtctaaattttcaggcaaaatctagcctgttttgtggcattaggatcatcattatagtagtatgatttttatgctattatacttacgctatgtcccgaatgtttttaaggccagcaaaatggaaacagtagagtacttgcctgaatgcaaataaacttcagtttcaactta

SEQ ID NO: 317275 - DNA, 1163 bp, Homo sapiens
gcggccgcgggggtgccggccggcgcgggcatggggagggccggcgccgcggccaacggcaccccgcagaacgtccagggcatcacctcctaccagcagcgaataactgcccagcatcctctgcccaaccaatcagaatgtaggaaaatctacagatatgacggaatctactgtgaatctacctaccagaatttacaagcattgagaaaggagaaatcccgagatgctgctcgctcccgccggggaaaagaaaactttgagttctatgaattggccaagttgttgcctcttcctgcagccattaccagccagctcgacaaggcatccatcattcgacttacaattagctatctgaaaatgagggactttgctaaccagggggaccctccgtggaacttgcgaatggaaggccctccacctaacacatcagtaaaagttataggtgcacagcgaaggagaagccccagtgcactagccattgaagtatttgaagcacatttgggaagccacattttgcagtccctggatggctttgtatttgcactaaatcaggaaggaaaatttttgtacatttccgaaacagtctccatctacctaggcctctcacaagcacagacactgtgttcacctctccagtcacatcgacgtccaagcagatgttctgtggcaaagttacaaagcatttatgtcactttttaaaattaatcaaattctcccttggaaggagtttagttcctctggctttaaaagatattattgctgaaaaataaactctgtatacttgcttttaaaaatctttgtatgccttttgtaggttcagagtgaggggtgctggaggacttttaaagtgtggtattttaaagatgttcttaattgtaaagagcaaactttacatttgtgaaaaagcatctcaaagttagaacatatatctcctaagactagctgacctccctcccgtaaactggtgatttggagacttcaaaattctgtttatcccatagaaacatgtgtatcctaggatgggaaatctgaggcttctttctctcataatttttaataaagtggaatcactagagaaagtaccggggtttcttaactttttaaattgtttttcgttttcactttaattgcataaaaggggtagaaaaattccatcaaccaaa

SEQ ID NO: 317276 - DNA, 1451 bp, Homo sapiens
gcggccgcgggggtgccggccggcgcgggcatggggagggccggcgccgcggccaacggcaccccgcagaacgtccagggcatcacctcctaccagcagcgaataactgcccagcatcctctgcccaaccaatcagaatgtaggaaaatctacagatatgacggaatctactgtgaatctacctaccagaatttacaagcattgagaaaggagaaatcccgagatgctgctcgctcccgccggggaaaagaaaactttgagttctatgaattggccaagttgttgcctcttcctgcagccattaccagccagctcgacaaggcatccatcattcgacttacaattagctatctgaaaatgagggactttgctaaccagggggaccctccgtggaacttgcgaatggaaggccctccacctaacacatcagtaaaagttataggtgcacagcgaaggagaagccccagtgcactagccattgaagtatttgaagcacatttgggaagccacattttgcagtccctggatggctttgtatttgcactaaatcaggaaggaaaatttttgtacatttccgaaacagtctccatctacctaggcctctcacaagtggagctgacaggcagcagtgtctttgactatgtccaccccggagatcacgtggagatggctgagcagctgggcatgaagctcccccctgggcggggtctcctgtcacagggcactgctgaggacggagccagctcagcatcttcctcctctcagtcggagacccccgagccagtggagtcaaccagccccagtctgctaaccactgacaacactcttgagcgttcctttttcatccgaatgaaatctactctgaccaaacgcggtgtgcacatcaaatcatcaggatataaggtgattcacataacaggccggctacgcctgagagtgtcgctgtcccacgggaggaccgtccccagccaaatcatgggtctcgtggttgttgcgcatgccttgcctccccctacgatcaatgaagtcagaattgactgccatatgttcgtcactcgagtaaatatggacctcaatatcatttactgtgaaaataggattagtgattatatggatctgacccctgtagatatcgtagggaagagatgctaccacttcatccatgctgaagacgtggagggcatcaggcacagtcacttggactcttgaagaaacacaattcctcaggaacagtgagcgagggcagttcatttctccccattaagcaaaggtctccaacaaatatgtttgatgcctttctttccgatttacttttatctcattttccgtacccagaataatttgagagtgctgaaaataaaccactccaccattcactattgtgctattctcctaatttttctggtatcttgccaactaataaacagagaaggtatgctttcaaattctga

SEQ ID NO: 317277 - DNA, 815 bp, Homo sapiens
gcggccgcgggggtgccggccggcgcgggcatggggagggccggcgccgcggccaacggcaccccgcagaacgtccagggcatcacctcctaccagcagcgaataactgcccagcatcctctgcccaaccaatcagaatgtaggaaaatctacagatatgacggaatctactgtgaatctacctaccagaatttacaagcattgagaaaggagaaatcccgagatgctgctcgctcccgccggggaaaagaaaactttgagttctatgaattggccaagttgttgcctcttcctgcagccattaccagccagctcgacaaggcatccatcattcgacttacaattagctatctgaaaatgagggactttgctaaccagggggaccctccgtggaacttgcgaatggaaggccctccacctaacacatcagtaaaagttataggtgcacagcgaaggagaagccccagtgcactagccattgaagtatttgaagcacatttgggaagccacattttgcagtccctggatggctttgtatttgcactaaatcaggaaggaaaatttttgtacatttccgaaacagtctccatctacctaggcctctcacaagtaagtaaaacaattttagattcttggcagcgattatgaagccttcttcagcctcatgtttttccttcttcaaggaatattctgtttagcatgaattatcaaatgtattatttaatggctttacctgactgttctctcaaagtcagtgagaaacctgtgtgtcagtgttgaacattcagaataaacttgtgctcaaaaactttagt

SEQ ID NO: 317278 - DNA, 269 bp, Homo sapiens
tgcattccagttgactgtagagaatctctagtcatgtctatctgtttttgatgcctctacagaataactgcccagcatcctctgcccaaccaatcagaatgtaggaaaatctacagatatgacggaatctactgtgaatctacctaccagaagtatgttgaaatctttgtgagtcttccttctggctcgtacatcagtgcttgtggttgccagctattcaaaaatatccttgtattgaaaccttctttttatctaatttagtgggggag

SEQ ID NO: 317279 - DNA, 421 bp, Homo sapiens
tggaagaagccatggatatatttttggaataatacaggctagagatccagacttcacaaatgaatatattgttttgaggacactgtcatagaccatgtgtgcagagggagatgccttctcattttggaatcttaattaaggtctaaattcagaaacctgaggctgacaaaaaaaaaagaactttgtcttcctcagttattatttggaaaacatcatgcatcatgctatctctctgggatttgatttacagcttgaagaaacacaattcctcaggaacagtgagcgagggcagttcatttctccccattaagcaaaggtctccaacaaatatgtttgatgcctttctttccgatttacttttatctcattttccgtacccagaataatttgagagtgctgaaaataaaccactccaccattc

SEQ ID NO: 317280 - DNA, 516 bp, Homo sapiens
tgattactactgctcttagcacccatcagtcatttatttttagtgaactcaaggattgcacctgagctgtagctgtgaggggctgtgtcaagatctaaatcgtgtgtgtctgtatttttgtattcctcagtggagtcaaccagccccagtctgctaaccactgacaacactcttgagcgttcctttttcatccgaatgaaatctactctgaccaaacgcggtgtgcacatcaaatcatcaggatataaggtaagccggttccgggaggggagacattgctgtctcaggccagtcctaggtaatttgcattgaattttccagctgctttaggtccatataatgaatacatgtgatcttgaggagcccataggattcccagtcatcttcctgtctcaaggcaggagcttctttacacctctccttctcacttcagacattgctggtgcactaaaaaccccaatatagtgtcttttcttaacacattgattaaaaatatgccaagtgcttcagcacctg

SEQ ID NO: 317281 - DNA, 770 bp, Homo sapiens
cgcggccgcagctccccggcggaggcaagaggtggttggggggggaccatggctgacgttttcccgggcaacgactccacggcgtctcaggacgtggccaaccgcttcgcccgcaaaggggcgctgaggcagaagaacgtgcacgaggtgaaggaccacaaattcatcgcgcgcttcttcaagcagcccaccttctgcagccactgcaccgacttcatctgggggtttgggaaacaaggcttccagtgccaagttgccgagcaaacagtggcagcttgcctctgaaggccaccaaaaaggaccaaaatgtttgcatggaaatggcaaccaagaaacccctaatattaagaacctaccttgaaatctgccaattaatgaatggaagcttcatcagattttcaaatggcttttataaaattatataatggaggtgaaagtgaaaggtctacactataactcctattacatgagctaaatgtgtaagccttaccatttgatgtgctcttctaggcttaacagtaaggaccattttggagttaaaattgtgtggattagttctgtgttaaacatgtcttcatctcatttatgtattgtattaaactctttggggaaacagataaaaaggacattttaggctttacaaacacgctacacaccataaaatgtttgtttcagcccattgcttactccaaagcaatggccttttgcttgaagataatctcaataatagaaaacagttaccaaaggaactaggttttgggtggacgact

SEQ ID NO: 317282 - DNA, 454 bp, Homo sapiens
cgcggccgcagctccccggcggaggcaagaggtggttggggggggaccatggctgacgttttcccgggcaacgactccacggcgtctcaggacgtggccaaccgcttcgcccgcaaaggggcgctgaggcagaagaacgtgcacgaggtgaaggaccacaaattcatcgcgcgcttcttcaagcagcccaccttctgcagccactgcaccgacttcatctgggggtttgggaaacaaggcttccagtgccaaggtaagctaccacttttggttttattttcaagcacaacatgaaataagcattccaaacaagaacattatttccagtcatattttctttccaataaaaaaatgttatttagataattttgaaatatgagggctgtaaatttgggccttaaaaaataattggggcctactaatctgcatatagagctgcctttttctcattgga

SEQ ID NO: 317283 - DNA, 3942 bp, Homo sapiens
  misc_feature (3942)..(3942): n is a, c, g, or t
cgcggccgcagctccccggcggaggcaagaggtggttggggggggaccatggctgacgttttcccgggcaacgactccacggcgtctcaggacgtggccaaccgcttcgcccgcaaaggggcgctgaggcagaagaacgtgcacgaggtgaaggaccacaaattcatcgcgcgcttcttcaagcagcccaccttctgcagccactgcaccgacttcatctgggggtttgggaaacaaggcttccagtgccaagtttgctgttttgtggtccacaagaggtgccatgaatttgttactttttcttgtccgggtgcggataagggacccgacactgatgaccccaggagcaagcacaagttcaaaatccacacttacggaagccccaccttctgcgatcactgtgggtcactgctctatggacttatccatcaagggatgaaatgtgacacctgcgatatgaacgttcacaagcaatgcgtcatcaatgtccccagcctctgcggaatggatcacactgagaagagggggcggatttacctaaaggctgaggttgctgatgaaaagctccatgtcacagtacgagatgcaaaaaatctaatccctatggatccaaacgggctttcagatccttatgtgaagctgaaacttattcctgatcccaagaatgaaagcaagcaaaaaaccaaaaccatccgctccacactaaatccgcagtggaatgagtcctttacattcaaattgaaaccttcagacaaagaccgacgactgtctgtagaaatctgggactgggatcgaacaacaaggaatgacttcatgggatccctttcctttggagtttcggagctgatgaagatgccggccagtggatggtacaagttgcttaaccaagaagaaggtgagtactacaacgtacccattccggaaggggacgaggaaggaaacatggaactcaggcagaaattcgagaaagccaaacttggccctgctggcaacaaagtcatcagtccctctgaagacaggaaacaaccttccaacaaccttgaccgagtgaaactcacggacttcaatttcctcatggtgttgggaaaggggagttttggaaaggtgatgcttgccgacaggaagggcacagaagaactgtatgcaatcaaaatcctgaagaaggatgtggtgattcaggatgatgacgtggagtgcaccatggtagaaaagcgagtcttggccctgcttgacaaacccccgttcttgacgcagctgcactcctgcttccagacagtggatcggctgtacttcgtcatggaatatgtcaacggtggggacctcatgtaccacattcagcaagtaggaaaatttaaggaaccacaagcagtattctatgcggcagagatttccatcggattgttctttcttcataaaagaggaatcatttatagggatctgaagttagataacgtcatgttggattcagaaggacatatcaaaattgctgactttgggatgtgcaaggaacacatgatggatggagtcacgaccaggaccttctgtgggactccagattatatcgccccagagataatcgcttatcagccgtatggaaaatctgtggactggtgggcctatggcgtcctgttgtatgaaatgcttgccgggcagcctccatttgatggtgaagatgaagacgagctatttcagtctatcatggagcacaacgtttcctatccaaaatccttgtccaaggaggctgtttctatctgcaaaggactgatgaccaaacacccagccaagcggctgggctgtgggcctgagggggagagggacgtgagagagcatgccttcttccggaggatcgactgggaaaaactggagaacagggagatccagccaccattcaagcccaaagtgtgtggcaaaggagcagagaactttgacaagttcttcacacgaggacagcccgtcttaacaccacctgatcagctggttattgctaacatagaccagtctgattttgaagggttctcgtatgtcaacccccagtttgtgcaccccatcttacagagtgcagtatgaaactcaccagcgagaacaaacacctccccagcccccagccctccccgcagtgggaagtgaatccttaaccctaaaattttaaggccacggccttgtgtctgattccatatggaggcctgaaaattgtagggttattagtccaaatgtgatcaactgttcagggtctctctcttacaaccaagaacattatcttagtggaagatggtacgtcatgctcagtgtccagtttaattctgtagaagttacgtctggctctaggttaacccttcctagaaagcaagcagactgttgccccattttgggtacaatttgatatactttccataccctccatctgtggatttttcagcattggaatcccccaaccagagatgttaaagtgagcctgtcccaggaaacatctccacccaagacgtctttggaatccaagaacaggaagccaagagagtgagcagggagggattgggggtgggggaggcctcaaaataccgactgcgtccattctctgcctccatggaaacagcccctagaatctgaaaggccgggataaacctaatcactgttcccaaacattgacaaatcctaacccaaccatggtccagcagttaccagtttaaacaaaaaaacctcagatgagtgttgggtgaatctgtcatctggtaccctccttggttgataactgtcttgatacttttcattctttgtaagaggccaaatcgtctaaggacgttgctgaacaagcgtgtgaaatcatttcagatcaaggataagccagtgtgtacatatgttcattttaatctctgggagattatttttccatccagggtgccatcagtaatcatgccactactcaccagtgttgttcgccaacacccacccccacacacaccaacattttgctgcctaccttgttatccttctcaagaagctgaagtgtacgccctctccccttttgtgcttatttatttaataggctgcagtgtcgcttatgaaagtacgatgtacagtaacttaatggaagtgctgactctagcatcagcctctaccgattgattttcctcccttctctagccctggatgtccacttagggataaaaagaatatggttttggttcccatttctagttcacgttgaatgacaggcctggagctgtagaatcaggaaacccggatgcctaacagctcaaagatgttttgttaatagaaggattttaatacgttttgcaaatgcatcatgcaatgaattttgcatgtttataataaaccttaataacaagtgaatctatattattgatataatcgtatcaagtataaagagagtattataataattttataagacacaattgtgctctatttgtgcaggttcttgtttctaatcctcttttctaattaagttttagctgaatcccttgcttctgtgctttccctccctgcacatgggcactgtatcagatagattactttttaaatgtagataaaatttcaaaaatgaatggctagtttacgtgatagattaggctcttactacatatgtgtgtgtatatatatgtatttgattctacctgcaaacaaatttttattggtgaggactatttttgagctgacactccctcttagtttcttcatgtcacctttcgtcctggttcctccgccactcttcctcttggggacaacaggaagtgtctgattccagtctgcctagtacgttggtacacacgtggcattgcgcagcacctgggctgacctttgtgtgtgcgtgtgtgtgtgtttccttcttcccttcagcctgtgactgttgctgactccaggggtgggagggatggggagactcccctcttgctgtgtgtactggacacgcaggaagcatgctgn

SEQ ID NO: 317284 - DNA, 2529 bp, Homo sapiens
cgcggccgcagctccccggcggaggcaagaggtggttggggggggaccatggctgacgttttcccgggcaacgactccacggcgtctcaggacgtggccaaccgcttcgcccgcaaaggggcgctgaggcagaagaacgtgcacgaggtgaaggaccacaaattcatcgcgcgcttcttcaagcagcccaccttctgcagccactgcaccgacttcatctgggggtttgggaaacaaggcttccagtgccaagtttgctgttttgtggtccacaagaggtgccatgaatttgttactttttcttgtccgggtgcggataagggacccgacactgatgaccccaggagcaagcacaagttcaaaatccacacttacggaagccccaccttctgcgatcactgtgggtcactgctctatggacttatccatcaagggatgaaatgtgacacctgcgatatgaacgttcacaagcaatgcgtcatcaatgtccccagcctctgcggaatggatcacactgagaagagggggcggatttacctaaaggctgaggttgctgatgaaaagctccatgtcacagtacgagatgcaaaaaatctaatccctatggatccaaacgggctttcagatccttatgtgaagctgaaacttattcctgatcccaagaatgaaagcaagcaaaaaaccaaaaccatccgctccacactaaatccgcagtggaatgagtcctttacattcaaattgaaaccttcagacaaagaccgacgactgtctgtagaaatctgggactgggatcgaacaacaaggaatgacttcatgggatccctttcctttggagtttcggagctgatgaagatgccggccagtggatggtacaagttgcttaaccaagaagaaggtgagtactacaacgtacccattccggaaggggacgaggaaggaaacatggaactcaggcagaaattcgagaaagccaaacttggccctgctggcaacaaagtcatcagtccctctgaagacaggaaacaaccttccaacaaccttgaccgagtgaaactcacggacttcaatttcctcatggtgttgggaaaggggagttttggaaaggtgatgcttgccgacaggaagggcacagaagaactgtatgcaatcaaaatcctgaagaaggatgtggtgattcaggatgatgacgtggagtgcaccatggtagaaaagcgagtcttggccctgcttgacaaacccccgttcttgacgcagctgcactcctgcttccagacagtggatcggctgtacttcgtcatggaatatgtcaacggtggggacctcatgtaccacattcagcaagtaggaaaatttaaggaaccacaagcagtattctatgcggcagagatttccatcggattgttctttcttcataaaagaggaatcatttatagggatctgaagttagataacgtcatgttggattcagaaggacatatcaaaattgctgactttgggatgtgcaaggaacacatgatggatggagtcacgaccaggaccttctgtgggactccagattatatcgccccagagataatcgcttatcagccgtatggaaaatctgtggactggtgggcctatggcgtcctgttgtatgaaatgcttgccgggcagcctccatttgatggtgaagatgaagacgagctatttcagtctatcatggagcacaacgtttcctatccaaaatccttgtccaaggaggctgtttctatctgcaaaggactgatgaccaaacacccagccaagcggctgggctgtgggcctgagggggagagggacgtgagagagcatgccttcttccggaggatcgactgggaaaaactggagaacagggagatccagccaccattcaagcccaaagtgccctgtgagatgggtactatggtccccagtttgcagtggaggaaacagtcacagagaggctgagtaacttgccagaagacacacagctgatagatggtgaaaccaggacgagtctttgtcctcacctactgcaccatcgctccatctcagcaactgccctgacgctgatgctgtgggccctaattgttgattgcggccagcaagtgcctttcatgtttatatctctagaggtaaactgagagcctttaagaagtcagcctgctcactcaccacctgccactttgcagagcctccaagggcgtcctgtttctaagggccgggcggactgtgccttccagctctgccaccatcttggccagcatcaggcagctccccattgtgcctctgcccggggactgcagagagctgctttatgccacagtcagtttcagaagcatcgccctgttggtttcgctcaaatgtgtctcctctgacaggtgccccatgagcaggccaggggacccacctggggtggcacagttgccaactgggtggcacacagccttattcttagagcagcaacttcctcaccatgtgtgcctctgtgtcctctaccccaagaataaaactgctgttggtgagcccact

SEQ ID NO: 317285 - DNA, 3754 bp, Homo sapiens
  misc_feature (3754)..(3754): n is a, c, g, or t
aattatgccacccacagcaccgacctcatctgggggtttggggagacaagggttccagtgccaagtttgctgttttgtggtccacaagaggtgccatgaatttgttactttttcttgtccgggtgcggataagggacccgacactgatgaccccaggagcaagcacaagttcaaaatccacacttacggaagccccaccttctgcgatcactgtgggtcactgctctatggacttatccatcaagggatgaaatgtgacacctgcgatatgaacgttcacaagcaatgcgtcatcaatgtccccagcctctgcggaatggatcacactgagaagagggggcggatttacctaaaggctgaggttgctgatgaaaagctccatgtcacagtacgagatgcaaaaaatctaatccctatggatccaaacgggctttcagatccttatgtgaagctgaaacttattcctgatcccaagaatgaaagcaagcaaaaaaccaaaaccatccgctccacactaaatccgcagtggaatgagtcctttacattcaaattgaaaccttcagacaaagaccgacgactgtctgtagaaatctgggactgggatcgaacaacaaggaatgacttcatgggatccctttcctttggagtttcggagctgatgaagatgccggccagtggatggtacaagttgcttaaccaagaagaaggtgagtactacaacgtacccattccggaaggggacgaggaaggaaacatggaactcaggcagaaattcgagaaagccaaacttggccctgctggcaacaaagtcatcagtccctctgaagacaggaaacaaccttccaacaaccttgaccgagtgaaactcacggacttcaatttcctcatggtgttgggaaaggggagttttggaaaggtgatgcttgccgacaggaagggcacagaagaactgtatgcaatcaaaatcctgaagaaggatgtggtgattcaggatgatgacgtggagtgcaccatggtagaaaagcgagtcttggccctgcttgacaaacccccgttcttgacgcagctgcactcctgcttccagacagtggatcggctgtacttcgtcatggaatatgtcaacggtggggacctcatgtaccacattcagcaagtaggaaaatttaaggaaccacaagcagtattctatgcggcagagatttccatcggattgttctttcttcataaaagaggaatcatttatagggatctgaagttagataacgtcatgttggattcagaaggacatatcaaaattgctgactttgggatgtgcaaggaacacatgatggatggagtcacgaccaggaccttctgtgggactccagattatatcgccccagagataatcgcttatcagccgtatggaaaatctgtggactggtgggcctatggcgtcctgttgtatgaaatgcttgccgggcagcctccatttgatggtgaagatgaagacgagctatttcagtctatcatggagcacaacgtttcctatccaaaatccttgtccaaggaggctgtttctatctgcaaaggactgatgaccaaacacccagccaagcggctgggctgtgggcctgagggggagagggacgtgagagagcatgccttcttccggaggatcgactgggaaaaactggagaacagggagatccagccaccattcaagcccaaagtgtgtggcaaaggagcagagaactttgacaagttcttcacacgaggacagcccgtcttaacaccacctgatcagctggttattgctaacatagaccagtctgattttgaagggttctcgtatgtcaacccccagtttgtgcaccccatcttacagagtgcagtatgaaactcaccagcgagaacaaacacctccccagcccccagccctccccgcagtgggaagtgaatccttaaccctaaaattttaaggccacggccttgtgtctgattccatatggaggcctgaaaattgtagggttattagtccaaatgtgatcaactgttcagggtctctctcttacaaccaagaacattatcttagtggaagatggtacgtcatgctcagtgtccagtttaattctgtagaagttacgtctggctctaggttaacccttcctagaaagcaagcagactgttgccccattttgggtacaatttgatatactttccataccctccatctgtggatttttcagcattggaatcccccaaccagagatgttaaagtgagcctgtcccaggaaacatctccacccaagacgtctttggaatccaagaacaggaagccaagagagtgagcagggagggattgggggtgggggaggcctcaaaataccgactgcgtccattctctgcctccatggaaacagcccctagaatctgaaaggccgggataaacctaatcactgttcccaaacattgacaaatcctaacccaaccatggtccagcagttaccagtttaaacaaaaaaacctcagatgagtgttgggtgaatctgtcatctggtaccctccttggttgataactgtcttgatacttttcattctttgtaagaggccaaatcgtctaaggacgttgctgaacaagcgtgtgaaatcatttcagatcaaggataagccagtgtgtacatatgttcattttaatctctgggagattatttttccatccagggtgccatcagtaatcatgccactactcaccagtgttgttcgccaacacccacccccacacacaccaacattttgctgcctaccttgttatccttctcaagaagctgaagtgtacgccctctccccttttgtgcttatttatttaataggctgcagtgtcgcttatgaaagtacgatgtacagtaacttaatggaagtgctgactctagcatcagcctctaccgattgattttcctcccttctctagccctggatgtccacttagggataaaaagaatatggttttggttcccatttctagttcacgttgaatgacaggcctggagctgtagaatcaggaaacccggatgcctaacagctcaaagatgttttgttaatagaaggattttaatacgttttgcaaatgcatcatgcaatgaattttgcatgtttataataaaccttaataacaagtgaatctatattattgatataatcgtatcaagtataaagagagtattataataattttataagacacaattgtgctctatttgtgcaggttcttgtttctaatcctcttttctaattaagttttagctgaatcccttgcttctgtgctttccctccctgcacatgggcactgtatcagatagattactttttaaatgtagataaaatttcaaaaatgaatggctagtttacgtgatagattaggctcttactacatatgtgtgtgtatatatatgtatttgattctacctgcaaacaaatttttattggtgaggactatttttgagctgacactccctcttagtttcttcatgtcacctttcgtcctggttcctccgccactcttcctcttggggacaacaggaagtgtctgattccagtctgcctagtacgttggtacacacgtggcattgcgcagcacctgggctgacctttgtgtgtgcgtgtgtgtgtgtttccttcttcccttcagcctgtgactgttgctgactccaggggtgggagggatggggagactcccctcttgctgtgtgtactggacacgcaggaagcatgctgn

SEQ ID NO: 317286 - DNA, 3083 bp, Homo sapiens
  misc_feature (3083)..(3083): n is a, c, g, or t
cagcacgggcgttccccacagggttcctcacagtaatgtctgagacttagctttgctgctggagaaatattgacccactctttgtgcttcattgtcgtggcttcctgaaagccaaacttggccctgctggcaacaaagtcatcagtccctctgaagacaggaaacaaccttccaacaaccttgaccgagtgaaactcacggacttcaatttcctcatggtgttgggaaaggggagttttggaaaggtgatgcttgccgacaggaagggcacagaagaactgtatgcaatcaaaatcctgaagaaggatgtggtgattcaggatgatgacgtggagtgcaccatggtagaaaagcgagtcttggccctgcttgacaaacccccgttcttgacgcagctgcactcctgcttccagacagtggatcggctgtacttcgtcatggaatatgtcaacggtggggacctcatgtaccacattcagcaagtaggaaaatttaaggaaccacaagcagtattctatgcggcagagatttccatcggattgttctttcttcataaaagaggaatcatttatagggatctgaagttagataacgtcatgttggattcagaaggacatatcaaaattgctgactttgggatgtgcaaggaacacatgatggatggagtcacgaccaggaccttctgtgggactccagattatatcgccccagagataatcgcttatcagccgtatggaaaatctgtggactggtgggcctatggcgtcctgttgtatgaaatgcttgccgggcagcctccatttgatggtgaagatgaagacgagctatttcagtctatcatggagcacaacgtttcctatccaaaatccttgtccaaggaggctgtttctatctgcaaaggactgatgaccaaacacccagccaagcggctgggctgtgggcctgagggggagagggacgtgagagagcatgccttcttccggaggatcgactgggaaaaactggagaacagggagatccagccaccattcaagcccaaagtgtgtggcaaaggagcagagaactttgacaagttcttcacacgaggacagcccgtcttaacaccacctgatcagctggttattgctaacatagaccagtctgattttgaagggttctcgtatgtcaacccccagtttgtgcaccccatcttacagagtgcagtatgaaactcaccagcgagaacaaacacctccccagcccccagccctccccgcagtgggaagtgaatccttaaccctaaaattttaaggccacggccttgtgtctgattccatatggaggcctgaaaattgtagggttattagtccaaatgtgatcaactgttcagggtctctctcttacaaccaagaacattatcttagtggaagatggtacgtcatgctcagtgtccagtttaattctgtagaagttacgtctggctctaggttaacccttcctagaaagcaagcagactgttgccccattttgggtacaatttgatatactttccataccctccatctgtggatttttcagcattggaatcccccaaccagagatgttaaagtgagcctgtcccaggaaacatctccacccaagacgtctttggaatccaagaacaggaagccaagagagtgagcagggagggattgggggtgggggaggcctcaaaataccgactgcgtccattctctgcctccatggaaacagcccctagaatctgaaaggccgggataaacctaatcactgttcccaaacattgacaaatcctaacccaaccatggtccagcagttaccagtttaaacaaaaaaacctcagatgagtgttgggtgaatctgtcatctggtaccctccttggttgataactgtcttgatacttttcattctttgtaagaggccaaatcgtctaaggacgttgctgaacaagcgtgtgaaatcatttcagatcaaggataagccagtgtgtacatatgttcattttaatctctgggagattatttttccatccagggtgccatcagtaatcatgccactactcaccagtgttgttcgccaacacccacccccacacacaccaacattttgctgcctaccttgttatccttctcaagaagctgaagtgtacgccctctccccttttgtgcttatttatttaataggctgcagtgtcgcttatgaaagtacgatgtacagtaacttaatggaagtgctgactctagcatcagcctctaccgattgattttcctcccttctctagccctggatgtccacttagggataaaaagaatatggttttggttcccatttctagttcacgttgaatgacaggcctggagctgtagaatcaggaaacccggatgcctaacagctcaaagatgttttgttaatagaaggattttaatacgttttgcaaatgcatcatgcaatgaattttgcatgtttataataaaccttaataacaagtgaatctatattattgatataatcgtatcaagtataaagagagtattataataattttataagacacaattgtgctctatttgtgcaggttcttgtttctaatcctcttttctaattaagttttagctgaatcccttgcttctgtgctttccctccctgcacatgggcactgtatcagatagattactttttaaatgtagataaaatttcaaaaatgaatggctagtttacgtgatagattaggctcttactacatatgtgtgtgtatatatatgtatttgattctacctgcaaacaaatttttattggtgaggactatttttgagctgacactccctcttagtttcttcatgtcacctttcgtcctggttcctccgccactcttcctcttggggacaacaggaagtgtctgattccagtctgcctagtacgttggtacacacgtggcattgcgcagcacctgggctgacctttgtgtgtgcgtgtgtgtgtgtttccttcttcccttcagcctgtgactgttgctgactccaggggtgggagggatggggagactcccctcttgctgtgtgtactggacacgcaggaagcatgctgn

SEQ ID NO: 317287 - DNA, 1025 bp, Homo sapiens
cgcggccgcagctccccggcggaggcaagaggtggttggggggggaccatggctgacgttttcccgggcaacgactccacggcgtctcaggacgtggccaaccgcttcgcccgcaaaggggcgctgaggcagaagaacgtgcacgaggtgaaggaccacaaattcatcgcgcgcttcttcaagcagcccaccttctgcagccactgcaccgacttcatctgggggtttgggaaacaaggcttccagtgccaagtttgctgttttgtggtccacaagaggtgccatgaatttgttactttttcttgtccgggtgcggataagggacccgacactgatgaccccaggagcaagcacaagttcaaaatccacacttacggaagccccaccttctgcgatcactgtgggtcactgctctatggacttatccatcaagggatgaaatgtgacacctgcgatatgaacgttcacaagcaatgcgtcatcaatgtccccagcctctgcggaatggatcacactgagaagagggggcggatttacctaaaggctgaggttgctgatgaaaagctccatgtcacagtacgagatgcaaaaaatctaatccctatggatccaaacgggctttcagatccttatgtgaagctgaaacttattcctgatcccaagaatgaaagcaagcaaaaaaccaaaaccatccgctccacactaaatccgcagtggaatgagtcctttacattcaaattgaaaccttcagacaaagaccgacgactgtctgtagaaatctgggactgggatcgaacaacaaggaatgacttcatgggatccctttcctttggagtttcggagctgatgaagatgccggccagtggatggtacaagttgcttaaccaagaagaaggtgagtactacaacgtacccattccggaaggggacgaggaaggaaacattgggaactttcagggcaggaaaatttcggagggtggaggggatttaaccaaaaagtggcccccgggaaaaccaaccctttt

SEQ ID NO: 317288 - DNA, 905 bp, Homo sapiens
cgcggccgcagctccccggcggaggcaagaggtggttggggggggaccatggctgacgttttcccgggcaacgactccacggcgtctcaggacgtggccaaccgcttcgcccgcaaaggggcgctgaggcagaagaacgtgcacgaggtgaaggaccacaaattcatcgcgcgcttcttcaagcagcccaccttctgcagccactgcaccgacttcatctgggggtttgggaaacaaggcttccagtgccaagtttgctgttttgtggtccacaagaggtgccatgaatttgttactttttcttgtccgggtgcggataagggacccgacactgatgaccccaggagcaagcacaagttcaaaatccacacttacggaagccccaccttctgcgatcactgtgggtcactgctctatggacttatccatcaagggatgaaatgtgacacctgcgatatgaacgttcacaagcaatgcgtcatcaatgtccccagcctctgcggaatggatcacactgagaagagggggcggatttacctaaaggctgaggttgctgatgaaaagctccatgtcacagtacgagatgcaaaaaatctaatccctatggatccaaacgggctttcagatccttatgtgaagctgaaacttattcctgatcccaagaatgaaagcaagcaaaaaaccaaaaccatccgctccacactaaatccgcagtggaatgagtcctttacattcaaattgaaaccttcagacaaagaccgacgactgtctgtagaaatctgggactgggatcgaacaacaaggaatgacttcatgggatccctttcctttggagtttcggagctgatgaagatgccggccagtggatggtatggaagccgcttaggttgagtatgtctcaaagc

SEQ ID NO: 317289 - DNA, 746 bp, Homo sapiens
acaatatgtataaataaaaaggtgcatgtatctgtgtaactactatttgtctatctatcaatagagagaaaagaatgagattcttttcaaagatgctttataatatttagaggaattcaagtacaaagatgaaagtcagggtttggggcaggttcaaatgtctatgccaggcatagctccttttcaatttgtatttcttcccttgcttcattatctgtttccacccctaccctgcagctgaggatgcagacctggggtactggacaggaccaccttcttgagccccatccctgatgtcacaccacctctgtgacggatggatccttctagagagagtttcaggactgagtgccagcattcttcagctgtctcaggcaggggaggaacctgaggagccagaaagaaccttccttaccgaatgttatgccatggtgttgatcacgagcagtcactgggtcaggggctgttgacgcagaaagagtgcattcgagggaggaacagcacgggcgttccccacagggttcctcacagtaatgtctgagacttagctttgctgctggagaaatattgacccactctttgtgcttcattgtcgtggcttcctggtgagtaaacttcctgtttttctgggcaatgagttcagctttttataaaggtcagagttctaaacaaacaaacaaaatacaggccagaggacctgagcaaaacgaagcatttctcttgggaggctggtcagaggccgcagg

SEQ ID NO: 317290 - DNA, 493 bp, Homo sapiens
gttaatttgttccgtgaaggtcagatgaaggttgtggagattttaagaggaatgctcttttctaccataccagcagagtgcacatttttcacttctgttttgctaaaactacccccagccaagcaatccaatggattctgagcatcttctatgtgtagggcgttgcactgtgatatggtttggctctgtgtccccacccaaatcccatcttgaactgtactcccataattcccaagtgttgagggagggacctggtgggagataattgaatcatgggggcggtttcctccatactgttctcatggtattgaataagtttcacgagatctgatggttttatcggggtttttgcttttgtgtctttctcattctctctttgcctgctgccatccatgtaagacgggacttgttcctcctccttgccttcgccatgattgtgaggcttccccagccacgtggaactgtaagtccaattaaacctttcttttgtaaa

SEQ ID NO: 317291 - DNA, 1288 bp, Homo sapiens
gcacgagagcttttctacatgatataagcaggtattgcatattttcatatatctgggggaaaataaaggaagactccaaataaattgtaaaatacagaaacaaaaacaaaaaaaagtgcaagtgatttttctaccagacagcgaagcacccctttgcttcccatgcgacttcaagaaggtttcctatactatacatatatatacgttctggttggcaagccctgctgatcagagaaagtctctgcatgttctagtgttagtaactaatttttatatagttaatgtaggataaagtagagtgcattaagacacaatattgtaatccctactctaggcacttgcctttaaactatgtttttcagcccttcagaagggttctactactgtcctatacaatcaagtaactgaaattcttgggaagacactttgctcctcatctttctccccgaaacaatgttgttttgttttgttttttttccttaatttgcacgaaaacaaaaattccatatcaatgtgccttgccctggatagcgattatttgtggaattgttgcacatgctcctctattgaaaggggtttttccctagtcaagcatttggagacactttttgtaaatgtgacttttatgtcagccatcgtcagtttcaacatctagaactaaatagaaagctagttgttccgcagataggagtagtctttattgtcctgtacggtcggtggcagtgctattctgagatctgtagatgcttagaatatcagtattttggatgttgctgcattttacaatttatttggagtcttcctttattttcccccagatatatgaaaatatgcaatacctgcttatatcatgtagaaaagcttagcaattattaatttttcttttatttttttttatttgaccaaagtcggtgctgcacttgacgcagtgtgttttaggtgtttgtctttgtacttttttgtgatttttgaatgcacgtgcgcaggaagggctcctcttagagaagcagtcaaactgtgaagcactaagctgaccctgcttcaagcaattttgtttttacaactgttcctttcacaagcaagccttaaaaaaaaaaaagacaacttcctttttcttcagctcccacaccccatttttcttagcagactgcagtcaatccacattcaataaaaagtatataatgcccatttttatatgcacgtttttaaacttccaagttctgaaaattgtttactggttatctctatttaaggaaaaaaaaataaaataaaacattttggattttca

SEQ ID NO: 317292 - DNA, 3198 bp, Homo sapiens
ataaccctgatgttttcttttcctgcagcaagtccgcatgcaacaccatcgactcttcatttcccgacatcacccattatccagcagcctgggccttacttctcacacccagccatccgctatcaccctcaggagacgctgaaagaatttgtccaacttgtctgccctgatgctggtcagcaggctggacaggtggggttcctcaatcccaatgggagcagccaaggcaaggtgcacaacccattccttcccaccccaatgttgccaccgccaccgccaccaccgatggccaggcctgtgcctctgccggtgccagacacaaagcctccaaccacgtcaacagaaggaggtgcagcctcccccacgtcaccaacctactcgacacccagcacctcccccgcaaaccgattcgtcagtgttggaccacgggatccaagctttgtaaatatccctcaacagacacagtcctggtacctgggataaaagttgcagcgtcccaccatccaccagacagaccacctgaccccttctcaactctgtaacatggacgcaacctcaacccagcgcagttacaacttcactatcagcggaaggggagaaaaaccgattcaaatcaacttgtacatggaaacagcaagcattatggtcaaacagcaaaggccataaccttttgggatttttttttttttaaaatactttagggactgttgtaatttctcatatggtgctggaaatggttgggctttgtaacatttgaagtgtttccatggtagcgtgagcattaggtgacgtggctagcggaggactacccttgctcactgacttcctgttgtaacacactttccttacggagcctggctgtttcacagtatttcatgaatttacccacacaggtgtgatcctccttgagcattgaggaggcacatggagaactaaatcttttgtagtagctgagatctgcaatatataacgggacagtcaaagggcaatgtttttctgtaacatattggaaaaagaaaatgcagttatattccttttttatttgttcctttagtttgttttggttcagcagtcagcagttaagtatataacatggcccgcaaggacaatgaatccactcacattgcagaacaattccgaaaatggcaaactactactactactgttcagttttttaaaagttttgaaatgctgcacttacatttaaaaaaacaacaacaacattttttcaacaatttcaacaatgacacaaaaattcacatggaaatggggaagatggtctgttttgacagaaactgacaggaatcaatcaaaacaatcgaattttgaattgagtaaagtgcaatttcattggatagctaaatatctttgtaagatagagattgttgaaaattctatttttgtttttctagtcctttcaccccaggactctaaattattggggtaaaaaacagccttgcaagaaaaaggggagctatttttgctttttatgttttttattgttaaacttgtatccctttaaaaactgaaggaaattaaaaaaaaaaaacaaaaaaacaaatctaatggtgcttttaccacaatatgttaactacattaaatgctaattaattattttctgttatcaaagcacatgactaaaatgaaatcatggtatctgttaattttataagctagaagtcactataatggattacgccaattctaaaaaattttacacctatctggcatcataggatttatcagttatcagacacctcattgtaccagagattgtccagaagttttaaagacctttgcatccctgaactgggctatgggaaataataatagtaataataataataataataatgatgaaaccaatactgacacaaatgctggtgcccattcagatcaagggtacttgttagggaaaaaaaaaaaagtttgcacccccaaacgtcctgtatcttatgaaaaaaaaaacaaaaaacaaaaacaaaaaaaaaacacaaaaaaccacagaaacaaaaacaaaaaaaagtgcaagtgatttttctaccagacagcgaagcacccctttgcttcccatgcgacttcaagaaggtttcctatactatacatatatatacgttctggttggcaagccctgctgatcagagaaagtctctgcatgttctagtgttagtaactaatttttatatagttaatgtaggataaagtagagtgcattaagacacaatattgtaatccctactctaggcacttgcctttaaactatgtttttcagcccttcagaagggttctactactgtcctatacaatcaagtaactgaaattcttgggaagacactttgctcctcatctttctccccgaaacaatgttgttttgttttgttttttttccttaatttgcacgaaaacaaaaattccatatcaatgtgccttgccctggatagcgattatttgtggaattgttgcacatgctcctctattgaaaggggtttttccctagtcaagcatttggagacactttttgtaaatgtgacttttatgtcagccatcgtcagtttcaacatctagaactaaatagaaagctagttgttccgcagataggagtagtctttattgtcctgtacggtcggtggcagtgctattctgagatctgtagatgcttagaatatcagtattttggatgttgctgcattttacaatttatttggagtcttcctttattttcccccagatatatgaaaatatgcaatacctgcttatatcatgtagaaaagcttagcaattattaatttttcttttatttttttttatttgaccaaagtcggtgctgcacttgacgcagtgtgttttaggtgtttgtctttgtacttttttgtgatttttgaatgcacgtgcgcaggaagggctcctcttagagaagcagtcaaactgtgaagcactaagctgaccctgcttcaagcaattttgtttttacaactgttcctttcacaagcaagccttaaaaaaaaaaaagacaacttcctttttcttcagctcccacaccccatttttcttagcagactgcagtcaatccacattcaataaaaagtatataatgcccatttttatatgcacgtttttaaacttccaagttctgaaaattgtttactggttatctctatttaaggaaaaaaaaataaaataaaacattttggattttca

SEQ ID NO: 317293 - DNA, 4729 bp, Homo sapiens
ggccgcggaggctcgggacccggctggccgcgcggcgccgcagccgccccctcccccacaccccctcccccccgcggcggcggcgcgagcgggcggcggctgtgcggtgcggtgcagagcggaggcggaggcgggcgcgcgggcagctcgcgggcacccggccgggccggcgcgggagcgggaaagggtgcgctatgcctttaacacccgcgtacagtaggcatgtatagtggagtgtagggaaactctaggcggggttaaagttcagctcatggagcggcaatagcgctggctggctggctgcagttgagccgacttggaaatgtgaacgcaagaagcaggcttgatttttttttctccccccttctctctctctctctctctctctcttcctctctccctctttctcctctctcacccacactcacgcacacctccaaaccgcacacccagacgcacacgcataccccagcgcccggcagttatgtattctccgctctgtctcacccaggatgaatttcatcctttcatcgaagcacttctgccccacgtccgagcctttgcctacacatggttcaacctgcaggcccgaaaacgaaaatacttcaaaaaacatgaaaagcgtatgtcaaaagaagaagagagagccgtgaaggatgaattgctaagtgaaaaaccagaggtcaagcagaagtgggcatctcgacttctggcaaagttgcggaaagatatccgacccgaatatcgagaggattttgttcttacagttacagggaaaaaacctccatgttgtgttctttccaacccagaccagaaaggcaagatgcgaagaattgactgcctccgccaggcagataaagtctggaggttggaccttgttatggtgattttgtttaaaggtattccgctggaaagtactgatggcgagcgccttgtaaagtccccacaatgctctaatccagggctctgtgtccaaccccatcacataggggtttctgttaaggaactcgatttatatttggcatactttgtgcatgcagcagattcaagtcaatctgaaagtcccagccagccaagtgacgctgacattaaggaccagccagaaaatggacatttgggcttccaggacagttttgtcacatcaggtgtttttagtgtcactgagctagtaagagtgtcacagacaccaatagctgcaggaactggcccaaatttttctctctcagatttggaaagttcttcatactacagcatgagtccaggagcaatgaggaggtctttacccagcacatcctctacgagctccacaaagcgcctcaagtctgtggaggatgaaatggacagtcctggtgaggagccattttatacaggccaagggcgctccccaggaagtggcagtcagtcaagtggatggcatgaagtggagccaggaatgccatctccaaccacactgaagaagtcggagaagtctggtttcagcagcccctccccttcacagacctcctccctgggaacggcgttcacacagcatcaccgacctgtcattacaggacccagagcaagtccgcatgcaacaccatcgactcttcatttcccgacatcacccattatccagcagcctgggccttacttctcacacccagccatccgctatcaccctcaggagacgctgaaagaatttgtccaacttgtctgccctgatgctggtcagcaggctggacaggtggggttcctcaatcccaatgggagcagccaaggcaaggtgcacaacccattccttcccaccccaatgttgccaccgccaccgccaccaccgatggccaggcctgtgcctctgccggtgccagacacaaagcctccaaccacgtcaacagaaggaggtgcagcctcccccacgtcaccaacctactcgacacccagcacctcccccgcaaaccgattcgtcagtgttggaccacgggatccaagctttgtaaatatccctcaacagacacagtcctggtacctgggataaaagttgcagcgtcccaccatccaccagacagaccacctgaccccttctcaactctgtaacatggacgcaacctcaacccagcgcagttacaacttcactatcagcggaaggggagaaaaaccgattcaaatcaacttgtacatggaaacagcaagcattatggtcaaacagcaaaggccataaccttttgggatttttttttttttaaaatactttagggactgttgtaatttctcatatggtgctggaaatggttgggctttgtaacatttgaagtgtttccatggtagcgtgagcattaggtgacgtggctagcggaggactacccttgctcactgacttcctgttgtaacacactttccttacggagcctggctgtttcacagtatttcatgaatttacccacacaggtgtgatcctccttgagcattgaggaggcacatggagaactaaatcttttgtagtagctgagatctgcaatatataacgggacagtcaaagggcaatgtttttctgtaacatattggaaaaagaaaatgcagttatattccttttttatttgttcctttagtttgttttggttcagcagtcagcagttaagtatataacatggcccgcaaggacaatgaatccactcacattgcagaacaattccgaaaatggcaaactactactactactgttcagttttttaaaagttttgaaatgctgcacttacatttaaaaaaacaacaacaacattttttcaacaatttcaacaatgacacaaaaattcacatggaaatggggaagatggtctgttttgacagaaactgacaggaatcaatcaaaacaatcgaattttgaattgagtaaagtgcaatttcattggatagctaaatatctttgtaagatagagattgttgaaaattctatttttgtttttctagtcctttcaccccaggactctaaattattggggtaaaaaacagccttgcaagaaaaaggggagctatttttgctttttatgttttttattgttaaacttgtatccctttaaaaactgaaggaaattaaaaaaaaaaaacaaaaaaacaaatctaatggtgcttttaccacaatatgttaactacattaaatgctaattaattattttctgttatcaaagcacatgactaaaatgaaatcatggtatctgttaattttataagctagaagtcactataatggattacgccaattctaaaaaattttacacctatctggcatcataggatttatcagttatcagacacctcattgtaccagagattgtccagaagttttaaagacctttgcatccctgaactgggctatgggaaataataatagtaataataataataataataatgatgaaaccaatactgacacaaatgctggtgcccattcagatcaagggtacttgttagggaaaaaaaaaaaagtttgcacccccaaacgtcctgtatcttatgaaaaaaaaaacaaaaaacaaaaacaaaaaaaaaacacaaaaaaccacagaaacaaaaacaaaaaaaagtgcaagtgatttttctaccagacagcgaagcacccctttgcttcccatgcgacttcaagaaggtttcctatactatacatatatatacgttctggttggcaagccctgctgatcagagaaagtctctgcatgttctagtgttagtaactaatttttatatagttaatgtaggataaagtagagtgcattaagacacaatattgtaatccctactctaggcacttgcctttaaactatgtttttcagcccttcagaagggttctactactgtcctatacaatcaagtaactgaaattcttgggaagacactttgctcctcatctttctccccgaaacaatgttgttttgttttgttttttttccttaatttgcacgaaaacaaaaattccatatcaatgtgccttgccctggatagcgattatttgtggaattgttgcacatgctcctctattgaaaggggtttttccctagtcaagcatttggagacactttttgtaaatgtgacttttatgtcagccatcgtcagtttcaacatctagaactaaatagaaagctagttgttccgcagataggagtagtctttattgtcctgtacggtcggtggcagtgctattctgagatctgtagatgcttagaatatcagtattttggatgttgctgcattttacaatttatttggagtcttcctttattttcccccagatatatgaaaatatgcaatacctgcttatatcatgtagaaaagcttagcaattattaatttttcttttatttttttttatttgaccaaagtcggtgctgcacttgacgcagtgtgttttaggtgtttgtctttgtacttttttgtgatttttgaatgcacgtgcgcaggaagggctcctcttagagaagcagtcaaactgtgaagcactaagctgaccctgcttcaagcaattttgtttttacaactgttcctttcacaagcaagccttaaaaaaaaaaaagacaacttcctttttcttcagctcccacaccccatttttcttagcagactgcagtcaatccacattcaataaaaagtatataatgcccatttttatatgcacgtttttaaacttccaagttctgaaaattgtttactggttatctctatttaaggaaaaaaaaataaaataaaacattttggattttca

SEQ ID NO: 317294 - DNA, 4905 bp, Homo sapiens
ggccgcggaggctcgggacccggctggccgcgcggcgccgcagccgccccctcccccacaccccctcccccccgcggcggcggcgcgagcgggcggcggctgtgcggtgcggtgcagagcggaggcggaggcgggcgcgcgggcagctcgcgggcacccggccgggccggcgcgggagcgggaaagggtgcgctatgcctttaacacccgcgtacagtaggcatgtatagtggagtgtagggaaactctaggcggggttaaagttcagctcatggagcggcaatagcgctggctggctggctgcagttgagccgacttggaaatgtgaacgcaagaagcaggcttgatttttttttctccccccttctctctctctctctctctctctcttcctctctccctctttctcctctctcacccacactcacgcacacctccaaaccgcacacccagacgcacacgcataccccagcgcccggcagttatgtattctccgctctgtctcacccaggatgaatttcatcctttcatcgaagcacttctgccccacgtccgagcctttgcctacacatggttcaacctgcaggcccgaaaacgaaaatacttcaaaaaacatgaaaagcgtatgtcaaaagaagaagagagagccgtgaaggatgaattgctaagtgaaaaaccagaggtcaagcagaagtgggcatctcgacttctggcaaagttgcggaaagatatccgacccgaatatcgagaggattttgttcttacagttacagggaaaaaacctccatgttgtgttctttccaacccagaccagaaaggcaagatgcgaagaattgactgcctccgccaggcagataaagtctggaggttggaccttgttatggtgattttgtttaaaggtattccgctggaaagtactgatggcgagcgccttgtaaagtccccacaatgctctaatccagggctctgtgtccaaccccatcacataggggtttctgttaaggaactcgatttatatttggcatactttgtgcatgcagcagattcaagtcaatctgaaagtcccagccagccaagtgacgctgacattaaggaccagccagaaaatggacatttgggcttccaggacagttttgtcacatcaggtgtttttagtgtcactgagctagtaagagtgtcacagacaccaatagctgcaggaactggcccaaatttttctctctcagatttggaaagttcttcatactacagcatgagtccaggagcaatgaggaggtctttacccagcacatcctctacgagctccacaaagcgcctcaagtctgtggaggatgaaatggacagtcctggtgaggagccattttatacaggccaagggcgctccccaggaagtggcagtcagtcaagtggatggcatgaagtggagccaggaatgccatctccaaccacactgaagaagtcggagaagtctggtttcagcagcccctccccttcacagacctcctccctgggaacggcgttcacacagcatcaccgacctgtcattacaggacccagagcaagtccgcatgcaacaccatcgactcttcatttcccgacatcacccattatccagcagcctgggccttacttctcacacccagccatccgctatcaccctcaggagacgctgaaagaatttgtccaacttgtctgccctgatgctggtcagcaggctggacaggtggggttcctcaatcccaatgggagcagccaaggcaaggtgcacaacccattccttcccaccccaatgttgccaccgccaccgccaccaccgatggccaggcctgtgcctctgccggtgccagacacaaagcctccaaccacgtcaacagaaggaggtgcagcctcccccacgtcaccaacctactcgacacccagcacctcccccgcaaaccgattcgtcagtgttggaccacgggatccaagctttgtaaatatccctcaacagacacagtcctggtacctgggataaaagttgcagcgtcccaccatccaccagacagaccacctgaccccttctcaactctgtaacatggacgcaacctcaacccagcgcagttacaacttcactatcagcggaaggggagaaaaaccgattcaaatcaacttgtacatggaaacagcaagcattatggtcaaacagcaaaggccataaccttttgggatttttttttttttaaaatactttagggactgttgtaatttctcatatggtgctggaaatggttgggctttgtaacatttgaagtgtttccatggtagcgtgagcattaggtgacgtggctagcggaggactacccttgctcactgacttcctgttgtaacacactttccttacggagcctggctgtttcacagtatttcatgaatttacccacacaggtgtgatcctccttgagcattgaggaggcacatggagaactaaatcttttgtagtagctgagatctgcaatatataacgggacagtcaaagggcaatgtttttctgtaacatattggaaaaagaaaatgcagttatattccttttttatttgttcctttagtttgttttggttcagcagtcagcagttaagtatataacatggcccgcaaggacaatgaatccactcacattgcagaacaattccgaaaatggcaaactactactactactgttcagttttttaaaagttttgaaatgctgcacttacatttaaaaaaacaacaacaacattttttcaacaatttcaacaatgacacaaaaattcacatggaaatggggaagatggtctgttttgacagaaactgacaggaatcaatcaaaacaatcgaattttgaattgagtaaagtgcaatttcattggatagctaaatatctttgtaagatagagattgttgaaaattctatttttgtttttctagtcctttcaccccaggactctaaattattggggtaaaaaacagccttgcaagaaaaaggggagctatttttgctttttatgttttttattgttaaacttgtatccctttaaaaactgaaggaaattaaaaaaaaaaaacaaaaaaacaaatctaatggtgcttttaccacaatatgttaactacattaaatgctaattaattattttctgttatcaaagcacatgactaaaatgaaatcatggtatctgttaattttataagctagaagtcactataatggattacgccaattctaaaaaattttacacctatctggcatcataggatttatcagttatcagacacctcattgtaccagagattgtccagaagttttaaagacctttgcatccctgaactgggctatgggaaataataatagtaataataataataataataatgatgaaaccaatactgacacaaatgctggtgcccattcagatcaagggtacttgttagggaaaaaaaaaaaagtttgcacccccaaacgtcctgtatcttatgaaaaaaaaaacaaaaaacaaaaacaaaaaaaaaacacaaaaaaccacagaaacaaaaacaaaaaaaagtgcaagtgatttttctaccagacagcgaagcacccctttgcttcccatgcgacttcaagaaggtttcctatactatacatatatatacgttctggttggcaagccctgctgatcagagaaagtctctgcatgttctagtgttagtaactaatttttatatagttaatgtaggataaagtagagtgcattaagacacaatattgtaatccctactctaggcacttgcctttaaactatgtttttcagcccttcagaagggttctactactgtcctatacaatcaagtaactgaaattcttgggaagacactttgctcctcatctttctccccgaaacaatgttgttttgttttgttttttttccttaatttgcacgaaaacaaaaattccatatcaatgtgccttgccctggatagcgattatttgtggaattgttgcacatgctcctctattgaaaggggtttttccctagtcaagcatttggagacactttttgtaaatgtgacttttatgtcagccatcgtcagtttcaacatctagaactaaatagaaagctagttgttccgcagataggagtagtctttattgtcctgtacggtcggtggcagtgctattctgagatctgtagatgcttagaatatcagtattttggatgttgctgcattttacaatttatttggagtcttcctttattttcccccagatatatgaaaatatgcaatacctgcttatatcatgtagaaaagcttagcaattattaatttttcttttatttttttttatttgaccaaagtcggtgctgcacttgacgcagtgtgttttaggtgtttgtctttgtacttttttgtgatttttgaatgcacgtgcgcaggaagggctcctcttagagaagcagtcaaactgtgaagcactaagctgaccctgcttcaagcaattttgtttttacaactgttcctttcacaagcaagccttaaaaaaaaaaaagacaacttcctttttcttcagctcccacaccccatttttcttagcagactgcagtcaatccacattcaataaaaagtatataatgcccatttttatatgcacgtttttaaacttccaagttctgaaaattgtttactggttatctctatttaaggaaaaaaaaataaaataaaacattttggattttcatatgtgtctgataagtggttgaatagtcgtttggcgctgttgtatggtgtgattgtcagtgtatggtgtcacttcctatagccagccagcatactttgccttcccctatagcacttagctgggcattactttattatgacatatgtgcactaaaaaatgaaaaaaaggaaaaaaag

SEQ ID NO: 317295 - DNA, 4626 bp, Homo sapiens
ggccgcggaggctcgggacccggctggccgcgcggcgccgcagccgccgaggcgggcgcgcgggcagctcgcgggcacccggccgggccggcgcgggagcgggaaagggtgcgctatgcctttaacacccgcgtacagtaggcatgtatagtggagtgtagggaaactctaggcggggttaaagttcagctcatggagcggcaatagcgctggctggctggctgcagttgagccgacttggaaatgtgaacgcaagaagcaggcttgatttttttttctccccccttctctctctctctctctctctctcttcctctctccctctttctcctctctcacccacactcacgcacacctccaaaccgcacacccagacgcacacgcataccccagcgcccggcagttatgtattctccgctctgtctcacccaggatgaatttcatcctttcatcgaagcacttctgccccacgtccgagcctttgcctacacatggttcaacctgcaggcccgaaaacgaaaatacttcaaaaaacatgaaaagcgtatgtcaaaagaagaagagagagccgtgaaggatgaattgctaagtgaaaaaccagaggtcaagcagaagtgggcatctcgacttctggcaaagttgcggaaagatatccgacccgaatatcgagaggattttgttcttacagttacagggaaaaaacctccatgttgtgttctttccaacccagaccagaaaggcaagatgcgaagaattgactgcctccgccaggcagataaagtctggaggttggaccttgttatggtgattttgtttaaaggtattccgctggaaagtactgatggcgagcgccttgtaaagtccccacaatgctctaatccagggctctgtgtccaaccccatcacataggggtttctgttaaggaactcgatttatatttggcatactttgtgcatgcagcagattcaagtcaatctgaaagtcccagccagccaagtgacgctgacattaaggaccagccagaaaatggacatttgggcttccaggacagttttgtcacatcaggtgtttttagtgtcactgagctagtaagagtgtcacagacaccaatagctgcaggaactggcccaaatttttctctctcagatttggaaagttcttcatactacagcatgagtccaggagcaatgaggaggtctttacccagcacatcctctacgagctccacaaagcgcctcaagtctgtggaggatgaaatggacagtcctggtgaggagccattttatacaggccaagggcgctccccaggaagtggcagtcagtcaagtggatggcatgaagtggagccaggaatgccatctccaaccacactgaagaagtcggagaagtctggtttcagcagcccctccccttcacagacctcctccctgggaacggcgttcacacagcatcaccgacctgtcattacaggacccagagcaagtccgcatgcaacaccatcgactcttcatttcccgacatcacccattatccagcagcctgggccttacttctcacacccagccatccgctatcaccctcaggagacgctgaaagaatttgtccaacttgtctgccctgatgctggtcagcaggctggacaggtggggttcctcaatcccaatgggagcagccaaggcaaggtgcacaacccattccttcccaccccaatgttgccaccgccaccgccaccaccgatggccaggcctgtgcctctgccggtgccagacacaaagcctccaaccacgtcaacagaaggaggtgcagcctcccccacgtcaccaaggtgccacatgacaggacgagtattatgggaaacattgatctcactccgatggtgtggacctgagcagtcctggtacctgggataaaagttgcagcgtcccaccatccaccagacagaccacctgaccccttctcaactctgtaacatggacgcaacctcaacccagcgcagttacaacttcactatcagcggaaggggagaaaaaccgattcaaatcaacttgtacatggaaacagcaagcattatggtcaaacagcaaaggccataaccttttgggatttttttttttttaaaatactttagggactgttgtaatttctcatatggtgctggaaatggttgggctttgtaacatttgaagtgtttccatggtagcgtgagcattaggtgacgtggctagcggaggactacccttgctcactgacttcctgttgtaacacactttccttacggagcctggctgtttcacagtatttcatgaatttacccacacaggtgtgatcctccttgagcattgaggaggcacatggagaactaaatcttttgtagtagctgagatctgcaatatataacgggacagtcaaagggcaatgtttttctgtaacatattggaaaaagaaaatgcagttatattccttttttatttgttcctttagtttgttttggttcagcagtcagcagttaagtatataacatggcccgcaaggacaatgaatccactcacattgcagaacaattccgaaaatggcaaactactactactactgttcagttttttaaaagttttgaaatgctgcacttacatttaaaaaaacaacaacaacattttttcaacaatttcaacaatgacacaaaaattcacatggaaatggggaagatggtctgttttgacagaaactgacaggaatcaatcaaaacaatcgaattttgaattgagtaaagtgcaatttcattggatagctaaatatctttgtaagatagagattgttgaaaattctatttttgtttttctagtcctttcaccccaggactctaaattattggggtaaaaaacagccttgcaagaaaaaggggagctatttttgctttttatgttttttattgttaaacttgtatccctttaaaaactgaaggaaattaaaaaaaaaaaacaaaaaaacaaatctaatggtgcttttaccacaatatgttaactacattaaatgctaattaattattttctgttatcaaagcacatgactaaaatgaaatcatggtatctgttaattttataagctagaagtcactataatggattacgccaattctaaaaaattttacacctatctggcatcataggatttatcagttatcagacacctcattgtaccagagattgtccagaagttttaaagacctttgcatccctgaactgggctatgggaaataataatagtaataataataataataataatgatgaaaccaatactgacacaaatgctggtgcccattcagatcaagggtacttgttagggaaaaaaaaaaaagtttgcacccccaaacgtcctgtatcttatgaaaaaaaaaacaaaaaacaaaaacaaaaaaaaaacacaaaaaaccacagaaacaaaaacaaaaaaaagtgcaagtgatttttctaccagacagcgaagcacccctttgcttcccatgcgacttcaagaaggtttcctatactatacatatatatacgttctggttggcaagccctgctgatcagagaaagtctctgcatgttctagtgttagtaactaatttttatatagttaatgtaggataaagtagagtgcattaagacacaatattgtaatccctactctaggcacttgcctttaaactatgtttttcagcccttcagaagggttctactactgtcctatacaatcaagtaactgaaattcttgggaagacactttgctcctcatctttctccccgaaacaatgttgttttgttttgttttttttccttaatttgcacgaaaacaaaaattccatatcaatgtgccttgccctggatagcgattatttgtggaattgttgcacatgctcctctattgaaaggggtttttccctagtcaagcatttggagacactttttgtaaatgtgacttttatgtcagccatcgtcagtttcaacatctagaactaaatagaaagctagttgttccgcagataggagtagtctttattgtcctgtacggtcggtggcagtgctattctgagatctgtagatgcttagaatatcagtattttggatgttgctgcattttacaatttatttggagtcttcctttattttcccccagatatatgaaaatatgcaatacctgcttatatcatgtagaaaagcttagcaattattaatttttcttttatttttttttatttgaccaaagtcggtgctgcacttgacgcagtgtgttttaggtgtttgtctttgtacttttttgtgatttttgaatgcacgtgcgcaggaagggctcctcttagagaagcagtcaaactgtgaagcactaagctgaccctgcttcaagcaattttgtttttacaactgttcctttcacaagcaagccttaaaaaaaaaaaagacaacttcctttttcttcagctcccacaccccatttttcttagcagactgcagtcaatccacattcaataaaaagtatataatgcccatttttatatgcacgtttttaaacttccaagttctgaaaattgtttactggttatctctatttaaggaaaaaaaaataaaataaaacattttggattttca

SEQ ID NO: 317296 - DNA, 4789 bp, Homo sapiens
ggccgcggaggctcgggacccggctggccgcgcggcgccgcagccgccgaggcgggcgcgcgggcagctcgcgggcacccggccgggccggcgcgggagcgggaaagggtgcgctatgcctttaacacccgcgtacagtaggcatgtatagtggagtgtagggaaactctaggcggggttaaagttcagctcatggagcggcaatagcgctggctggctggctgcagttgagccgacttggaaatgtgaacgcaagaagcaggcttgatttttttttctccccccttctctctctctctctctctctctcttcctctctccctctttctcctctctcacccacactcacgcacacctccaaaccgcacacccagacgcacacgcataccccagcgcccggcagttatgtattctccgctctgtctcacccaggatgaatttcatcctttcatcgaagcacttctgccccacgtccgagcctttgcctacacatggttcaacctgcaggcccgaaaacgaaaatacttcaaaaaacatgaaaagcgtatgtcaaaagaagaagagagagccgtgaaggatgaattgctaagtgaaaaaccagaggtcaagcagaagtgggcatctcgacttctggcaaagttgcggaaagatatccgacccgaatatcgagaggattttgttcttacagttacagggaaaaaacctccatgttgtgttctttccaacccagaccagaaaggcaagatgcgaagaattgactgcctccgccaggcagataaagtctggaggttggaccttgttatggtgattttgtttaaaggtattccgctggaaagtactgatggcgagcgccttgtaaagtccccacaatgctctaatccagggctctgtgtccaaccccatcacataggggtttctgttaaggaactcgatttatatttggcatactttgtgcatgcagcaggtaagtgcgatggtgagaattcctcccactttcttgtgtgtgtttctttcctgatggcctccgcgttatgccggattcttcctgagctccccaagttgcaggccacgtacatgaagccagtgtggtttcaaagattgagagaggtgccaccttcattcaggtgaaaaagcatagctttgagcgaattctcactaagttcagctcttttgattcaagtcaatctgaaagtcccagccagccaagtgacgctgacattaaggaccagccagaaaatgtgtcactgagctagtaagagtgtcacagacaccaatagctgcaggaactggcccaaatttttctctctcagatttggaaagttcttcatactacagcatgagtccaggagcaatgaggaggtctttacccagcacatcctctacgagctccacaaagcgcctcaagtctgtggaggatgaaatggacagtcctggtgaggagccattttatacaggccaagggcgctccccaggaagtggcagtcagtcaagtggatggcatgaagtggagccaggaatgccatctccaaccacactgaagaagtcggagaagtctggtttcagcagcccctccccttcacagacctcctccctgggaacggcgttcacacagcatcaccgacctgtcattacaggacccagagcaagtccgcatgcaacaccatcgactcttcatttcccgacatcacccattatccagcagcctgggccttacttctcacacccagccatccgctatcaccctcaggagacgctgaaagaatttgtccaacttgtctgccctgatgctggtcagcaggctggacaggtggggttcctcaatcccaatgggagcagccaaggcaaggtgcacaacccattccttcccaccccaatgttgccaccgccaccgccaccaccgatggccaggcctgtgcctctgccggtgccagacacaaagcctccaaccacgtcaacagaaggaggtgcagcctcccccacgtcaccaaggtgccacatgacaggacgagtattatgggaaacattgatctcactccgatggtgtggacctgagcagtcctggtacctgggataaaagttgcagcgtcccaccatccaccagacagaccacctgaccccttctcaactctgtaacatggacgcaacctcaacccagcgcagttacaacttcactatcagcggaaggggagaaaaaccgattcaaatcaacttgtacatggaaacagcaagcattatggtcaaacagcaaaggccataaccttttgggatttttttttttttaaaatactttagggactgttgtaatttctcatatggtgctggaaatggttgggctttgtaacatttgaagtgtttccatggtagcgtgagcattaggtgacgtggctagcggaggactacccttgctcactgacttcctgttgtaacacactttccttacggagcctggctgtttcacagtatttcatgaatttacccacacaggtgtgatcctccttgagcattgaggaggcacatggagaactaaatcttttgtagtagctgagatctgcaatatataacgggacagtcaaagggcaatgtttttctgtaacatattggaaaaagaaaatgcagttatattccttttttatttgttcctttagtttgttttggttcagcagtcagcagttaagtatataacatggcccgcaaggacaatgaatccactcacattgcagaacaattccgaaaatggcaaactactactactactgttcagttttttaaaagttttgaaatgctgcacttacatttaaaaaaacaacaacaacattttttcaacaatttcaacaatgacacaaaaattcacatggaaatggggaagatggtctgttttgacagaaactgacaggaatcaatcaaaacaatcgaattttgaattgagtaaagtgcaatttcattggatagctaaatatctttgtaagatagagattgttgaaaattctatttttgtttttctagtcctttcaccccaggactctaaattattggggtaaaaaacagccttgcaagaaaaaggggagctatttttgctttttatgttttttattgttaaacttgtatccctttaaaaactgaaggaaattaaaaaaaaaaaacaaaaaaacaaatctaatggtgcttttaccacaatatgttaactacattaaatgctaattaattattttctgttatcaaagcacatgactaaaatgaaatcatggtatctgttaattttataagctagaagtcactataatggattacgccaattctaaaaaattttacacctatctggcatcataggatttatcagttatcagacacctcattgtaccagagattgtccagaagttttaaagacctttgcatccctgaactgggctatgggaaataataatagtaataataataataataataatgatgaaaccaatactgacacaaatgctggtgcccattcagatcaagggtacttgttagggaaaaaaaaaaaagtttgcacccccaaacgtcctgtatcttatgaaaaaaaaaacaaaaaacaaaaacaaaaaaaaaacacaaaaaaccacagaaacaaaaacaaaaaaaagtgcaagtgatttttctaccagacagcgaagcacccctttgcttcccatgcgacttcaagaaggtttcctatactatacatatatatacgttctggttggcaagccctgctgatcagagaaagtctctgcatgttctagtgttagtaactaatttttatatagttaatgtaggataaagtagagtgcattaagacacaatattgtaatccctactctaggcacttgcctttaaactatgtttttcagcccttcagaagggttctactactgtcctatacaatcaagtaactgaaattcttgggaagacactttgctcctcatctttctccccgaaacaatgttgttttgttttgttttttttccttaatttgcacgaaaacaaaaattccatatcaatgtgccttgccctggatagcgattatttgtggaattgttgcacatgctcctctattgaaaggggtttttccctagtcaagcatttggagacactttttgtaaatgtgacttttatgtcagccatcgtcagtttcaacatctagaactaaatagaaagctagttgttccgcagataggagtagtctttattgtcctgtacggtcggtggcagtgctattctgagatctgtagatgcttagaatatcagtattttggatgttgctgcattttacaatttatttggagtcttcctttattttcccccagatatatgaaaatatgcaatacctgcttatatcatgtagaaaagcttagcaattattaatttttcttttatttttttttatttgaccaaagtcggtgctgcacttgacgcagtgtgttttaggtgtttgtctttgtacttttttgtgatttttgaatgcacgtgcgcaggaagggctcctcttagagaagcagtcaaactgtgaagcactaagctgaccctgcttcaagcaattttgtttttacaactgttcctttcacaagcaagccttaaaaaaaaaaaagacaacttcctttttcttcagctcccacaccccatttttcttagcagactgcagtcaatccacattcaataaaaagtatataatgcccatttttatatgcacgtttttaaacttccaagttctgaaaattgtttactggttatctctatttaaggaaaaaaaaataaaataaaacattttggattttca

SEQ ID NO: 317297 - DNA, 4256 bp, Homo sapiens
tgggcatctgatccaggacaactcgcccaggagcccggcgggtttcagctgccaccacgaaagatgaatttcatcctttcatcgaagcacttctgccccacgtccgagcctttgcctacacatggttcaacctgcaggcccgaaaacgaaaatacttcaaaaaacatgaaaagcgtatgtcaaaagaagaagagagagccgtgaaggatgaattgctaagtgaaaaaccagaggtcaagcagaagtgggcatctcgacttctggcaaagttgcggaaagatatccgacccgaatatcgagaggattttgttcttacagttacagggaaaaaacctccatgttgtgttctttccaacccagaccagaaaggcaagatgcgaagaattgactgcctccgccaggcagataaagtctggaggttggaccttgttatggtgattttgtttaaaggtattccgctggaaagtactgatggcgagcgccttgtaaagtccccacaatgctctaatccagggctctgtgtccaaccccatcacataggggtttctgttaaggaactcgatttatatttggcatactttgtgcatgcagcagattcaagtcaatctgaaagtcccagccagccaagtgacgctgacattaaggaccagccagaaaatggacatttgggcttccaggacagttttgtcacatcaggtgtttttagtgtcactgagctagtaagagtgtcacagacaccaatagctgcaggaactggcccaaatttttctctctcagatttggaaagttcttcatactacagcatgagtccaggagcaatgaggaggtctttacccagcacatcctctacgagctccacaaagcgcctcaagtctgtggaggatgaaatggacagtcctggtgaggagccattttatacaggccaagggcgctccccaggaagtggcagtcagtcaagtggatggcatgaagtggagccaggaatgccatctccaaccacactgaagaagtcggagaagtctggtttcagcagcccctccccttcacagacctcctccctgggaacggcgttcacacagcatcaccgacctgtcattacaggacccagagcaagtccgcatgcaacaccatcgactcttcatttcccgacatcacccattatccagcagcctgggccttacttctcacacccagccatccgctatcaccctcaggagacgctgaaagaatttgtccaacttgtctgccctgatgctggtcagcaggctggacaggtggggttcctcaatcccaatgggagcagccaaggcaaggtgcacaacccattccttcccaccccaatgttgccaccgccaccgccaccaccgatggccaggcctgtgcctctgccggtgccagacacaaagcctccaaccacgtcaacagaaggaggtgcagcctcccccacgtcaccaaggtgccacatgacaggacgagtattatgggaaacattgatctcactccgatggtgtggacctgagcagtcctggtacctgggataaaagttgcagcgtcccaccatccaccagacagaccacctgaccccttctcaactctgtaacatggacgcaacctcaacccagcgcagttacaacttcactatcagcggaaggggagaaaaaccgattcaaatcaacttgtacatggaaacagcaagcattatggtcaaacagcaaaggccataaccttttgggatttttttttttttaaaatactttagggactgttgtaatttctcatatggtgctggaaatggttgggctttgtaacatttgaagtgtttccatggtagcgtgagcattaggtgacgtggctagcggaggactacccttgctcactgacttcctgttgtaacacactttccttacggagcctggctgtttcacagtatttcatgaatttacccacacaggtgtgatcctccttgagcattgaggaggcacatggagaactaaatcttttgtagtagctgagatctgcaatatataacgggacagtcaaagggcaatgtttttctgtaacatattggaaaaagaaaatgcagttatattccttttttatttgttcctttagtttgttttggttcagcagtcagcagttaagtatataacatggcccgcaaggacaatgaatccactcacattgcagaacaattccgaaaatggcaaactactactactactgttcagttttttaaaagttttgaaatgctgcacttacatttaaaaaaacaacaacaacattttttcaacaatttcaacaatgacacaaaaattcacatggaaatggggaagatggtctgttttgacagaaactgacaggaatcaatcaaaacaatcgaattttgaattgagtaaagtgcaatttcattggatagctaaatatctttgtaagatagagattgttgaaaattctatttttgtttttctagtcctttcaccccaggactctaaattattggggtaaaaaacagccttgcaagaaaaaggggagctatttttgctttttatgttttttattgttaaacttgtatccctttaaaaactgaaggaaattaaaaaaaaaaaacaaaaaaacaaatctaatggtgcttttaccacaatatgttaactacattaaatgctaattaattattttctgttatcaaagcacatgactaaaatgaaatcatggtatctgttaattttataagctagaagtcactataatggattacgccaattctaaaaaattttacacctatctggcatcataggatttatcagttatcagacacctcattgtaccagagattgtccagaagttttaaagacctttgcatccctgaactgggctatgggaaataataatagtaataataataataataataatgatgaaaccaatactgacacaaatgctggtgcccattcagatcaagggtacttgttagggaaaaaaaaaaaagtttgcacccccaaacgtcctgtatcttatgaaaaaaaaaacaaaaaacaaaaacaaaaaaaaaacacaaaaaaccacagaaacaaaaacaaaaaaaagtgcaagtgatttttctaccagacagcgaagcacccctttgcttcccatgcgacttcaagaaggtttcctatactatacatatatatacgttctggttggcaagccctgctgatcagagaaagtctctgcatgttctagtgttagtaactaatttttatatagttaatgtaggataaagtagagtgcattaagacacaatattgtaatccctactctaggcacttgcctttaaactatgtttttcagcccttcagaagggttctactactgtcctatacaatcaagtaactgaaattcttgggaagacactttgctcctcatctttctccccgaaacaatgttgttttgttttgttttttttccttaatttgcacgaaaacaaaaattccatatcaatgtgccttgccctggatagcgattatttgtggaattgttgcacatgctcctctattgaaaggggtttttccctagtcaagcatttggagacactttttgtaaatgtgacttttatgtcagccatcgtcagtttcaacatctagaactaaatagaaagctagttgttccgcagataggagtagtctttattgtcctgtacggtcggtggcagtgctattctgagatctgtagatgcttagaatatcagtattttggatgttgctgcattttacaatttatttggagtcttcctttattttcccccagatatatgaaaatatgcaatacctgcttatatcatgtagaaaagcttagcaattattaatttttcttttatttttttttatttgaccaaagtcggtgctgcacttgacgcagtgtgttttaggtgtttgtctttgtacttttttgtgatttttgaatgcacgtgcgcaggaagggctcctcttagagaagcagtcaaactgtgaagcactaagctgaccctgcttcaagcaattttgtttttacaactgttcctttcacaagcaagccttaaaaaaaaaaaagacaacttcctttttcttcagctcccacaccccatttttcttagcagactgcagtcaatccacattcaataaaaagtatataatgcccatttttatatgcacgtttttaaacttccaagttctgaaaattgtttactggttatctctatttaaggaaaaaaaaataaaataaaacattttggattttca

SEQ ID NO: 317298 - DNA, 4435 bp, Homo sapiens
agttgtggacgatagcagcaatgggaagcagtatttgagaagaaatcagactctcttcttccagtcttttgcaagtaggtgacacaagaggatgaatttcatcctttcatcgaagcacttctgccccacgtccgagcctttgcctacacatggttcaacctgcaggcccgaaaacgaaaatacttcaaaaaacatgaaaagcgtatgtcaaaagaagaagagagagccgtgaaggatgaattgctaagtgaaaaaccagaggtcaagcagaagtgggcatctcgacttctggcaaagttgcggaaagatatccgacccgaatatcgagaggattttgttcttacagttacagggttgactgcctccgccaggcagataaagtctggaggttggaccttgttatggtgattttgtttaaaggtattccgctggaaagtactgatggcgagcgccttgtaaagtccccacaatgctctaatccagggctctgtgtccaaccccatcacataggggtttctgttaaggaactcgatttatatttggcatactttgtgcatgcagcaggtaagtgcgatggtgagaattcctcccactttcttgtgtgtgtttctttcctgatggcctccgcgttatgccggattcttcctgagctccccaagttgcaggccacgtacatgaagccagtgtggtttcaaagattgagagaggtgccaccttcattcaggtgaaaaagcatagctttgagcgaattctcactaagttcagctcttttgattcaagtcaatctgaaagtcccagccagccaagtgacgctgacattaaggaccagccagaaaatggacatttgggcttccaggacagttttgtcacatcaggtgtttttagtgtcactgagctagtaagagtgtcacagacaccaatagctgcaggaactggcccaaatttttctctctcagatttggaaagttcttcatactacagcatgagtccaggagcaatgaggaggtctttacccagcacatcctctacgagctccacaaagcgcctcaagtctgtggaggatgaaatggacagtcctggtgaggagccattttatacaggccaagggcgctccccaggaagtggcagtcagtcaagtggatggcatgaagtggagccaggaatgccatctccaaccacactgaagaagtcggagaagtctggtttcagcagcccctccccttcacagacctcctccctgggaacggcgttcacacagcatcaccgacctgtcattacaggacccagagcaagtccgcatgcaacaccatcgactcttcatttcccgacatcacccattatccagcagcctgggccttacttctcacacccagccatccgctatcaccctcaggagacgctgaaagaatttgtccaacttgtctgccctgatgctggtcagcaggctggacaggtggggttcctcaatcccaatgggagcagccaaggcaaggtgcacaacccattccttcccaccccaatgttgccaccgccaccgccaccaccgatggccaggcctgtgcctctgccggtgccagacacaaagcctccaaccacgtcaacagaaggaggtgcagcctcccccacgtcaccaaggtgccacatgacaggacgagtattatgggaaacattgatctcactccgatggtgtggacctgagcagtcctggtacctgggataaaagttgcagcgtcccaccatccaccagacagaccacctgaccccttctcaactctgtaacatggacgcaacctcaacccagcgcagttacaacttcactatcagcggaaggggagaaaaaccgattcaaatcaacttgtacatggaaacagcaagcattatggtcaaacagcaaaggccataaccttttgggatttttttttttttaaaatactttagggactgttgtaatttctcatatggtgctggaaatggttgggctttgtaacatttgaagtgtttccatggtagcgtgagcattaggtgacgtggctagcggaggactacccttgctcactgacttcctgttgtaacacactttccttacggagcctggctgtttcacagtatttcatgaatttacccacacaggtgtgatcctccttgagcattgaggaggcacatggagaactaaatcttttgtagtagctgagatctgcaatatataacgggacagtcaaagggcaatgtttttctgtaacatattggaaaaagaaaatgcagttatattccttttttatttgttcctttagtttgttttggttcagcagtcagcagttaagtatataacatggcccgcaaggacaatgaatccactcacattgcagaacaattccgaaaatggcaaactactactactactgttcagttttttaaaagttttgaaatgctgcacttacatttaaaaaaacaacaacaacattttttcaacaatttcaacaatgacacaaaaattcacatggaaatggggaagatggtctgttttgacagaaactgacaggaatcaatcaaaacaatcgaattttgaattgagtaaagtgcaatttcattggatagctaaatatctttgtaagatagagattgttgaaaattctatttttgtttttctagtcctttcaccccaggactctaaattattggggtaaaaaacagccttgcaagaaaaaggggagctatttttgctttttatgttttttattgttaaacttgtatccctttaaaaactgaaggaaattaaaaaaaaaaaacaaaaaaacaaatctaatggtgcttttaccacaatatgttaactacattaaatgctaattaattattttctgttatcaaagcacatgactaaaatgaaatcatggtatctgttaattttataagctagaagtcactataatggattacgccaattctaaaaaattttacacctatctggcatcataggatttatcagttatcagacacctcattgtaccagagattgtccagaagttttaaagacctttgcatccctgaactgggctatgggaaataataatagtaataataataataataataatgatgaaaccaatactgacacaaatgctggtgcccattcagatcaagggtacttgttagggaaaaaaaaaaaagtttgcacccccaaacgtcctgtatcttatgaaaaaaaaaacaaaaaacaaaaacaaaaaaaaaacacaaaaaaccacagaaacaaaaacaaaaaaaagtgcaagtgatttttctaccagacagcgaagcacccctttgcttcccatgcgacttcaagaaggtttcctatactatacatatatatacgttctggttggcaagccctgctgatcagagaaagtctctgcatgttctagtgttagtaactaatttttatatagttaatgtaggataaagtagagtgcattaagacacaatattgtaatccctactctaggcacttgcctttaaactatgtttttcagcccttcagaagggttctactactgtcctatacaatcaagtaactgaaattcttgggaagacactttgctcctcatctttctccccgaaacaatgttgttttgttttgttttttttccttaatttgcacgaaaacaaaaattccatatcaatgtgccttgccctggatagcgattatttgtggaattgttgcacatgctcctctattgaaaggggtttttccctagtcaagcatttggagacactttttgtaaatgtgacttttatgtcagccatcgtcagtttcaacatctagaactaaatagaaagctagttgttccgcagataggagtagtctttattgtcctgtacggtcggtggcagtgctattctgagatctgtagatgcttagaatatcagtattttggatgttgctgcattttacaatttatttggagtcttcctttattttcccccagatatatgaaaatatgcaatacctgcttatatcatgtagaaaagcttagcaattattaatttttcttttatttttttttatttgaccaaagtcggtgctgcacttgacgcagtgtgttttaggtgtttgtctttgtacttttttgtgatttttgaatgcacgtgcgcaggaagggctcctcttagagaagcagtcaaactgtgaagcactaagctgaccctgcttcaagcaattttgtttttacaactgttcctttcacaagcaagccttaaaaaaaaaaaagacaacttcctttttcttcagctcccacaccccatttttcttagcagactgcagtcaatccacattcaataaaaagtatataatgcccatttttatatgcacgtttttaaacttccaagttctgaaaattgtttactggttatctctatttaaggaaaaaaaaataaaataaaacattttggattttca

SEQ ID NO: 317299 - DNA, 1931 bp, Homo sapiens
acctaaaactgaaaatatgctgtgagaaatagaccacccaaataatatagggggttgtggggtgtggcaccgttaaggcatctaaaccaaaattccacctggctttggcttattaaacacttttacactatttttgtttttctagtcctttcaccccaggactctaaattattggggtaaaaaacagccttgcaagaaaaaggggagctatttttgctttttatgttttttattgttaaacttgtatccctttaaaaactgaaggaaattaaaaaaaaaaaacaaaaaaacaaatctaatggtgcttttaccacaatatgttaactacattaaatgctaattaattattttctgttatcaaagcacatgactaaaatgaaatcatggtatctgttaattttataagctagaagtcactataatggattacgccaattctaaaaaattttacacctatctggcatcataggatttatcagttatcagacacctcattgtaccagagattgtccagaagttttaaagacctttgcatccctgaactgggctatgggaaataataatagtaataataataataataataatgatgaaaccaatactgacacaaatgctggtgcccattcagatcaagggtacttgttagggaaaaaaaaaaaagtttgcacccccaaacgtcctgtatcttatgaaaaaaaaaacaaaaaacaaaaacaaaaaaaaaacacaaaaaaccacagaaacaaaaacaaaaaaaagtgcaagtgatttttctaccagacagcgaagcacccctttgcttcccatgcgacttcaagaaggtttcctatactatacatatatatacgttctggttggcaagccctgctgatcagagaaagtctctgcatgttctagtgttagtaactaatttttatatagttaatgtaggataaagtagagtgcattaagacacaatattgtaatccctactctaggcacttgcctttaaactatgtttttcagcccttcagaagggttctactactgtcctatacaatcaagtaactgaaattcttgggaagacactttgctcctcatctttctccccgaaacaatgttgttttgttttgttttttttccttaatttgcacgaaaacaaaaattccatatcaatgtgccttgccctggatagcgattatttgtggaattgttgcacatgctcctctattgaaaggggtttttccctagtcaagcatttggagacactttttgtaaatgtgacttttatgtcagccatcgtcagtttcaacatctagaactaaatagaaagctagttgttccgcagataggagtagtctttattgtcctgtacggtcggtggcagtgctattctgagatctgtagatgcttagaatatcagtattttggatgttgctgcattttacaatttatttggagtcttcctttattttcccccagatatatgaaaatatgcaatacctgcttatatcatgtagaaaagcttagcaattattaatttttcttttatttttttttatttgaccaaagtcggtgctgcacttgacgcagtgtgttttaggtgtttgtctttgtacttttttgtgatttttgaatgcacgtgcgcaggaagggctcctcttagagaagcagtcaaactgtgaagcactaagctgaccctgcttcaagcaattttgtttttacaactgttcctttcacaagcaagccttaaaaaaaaaaaagacaacttcctttttcttcagctcccacaccccatttttcttagcagactgcagtcaatccacattcaataaaaagtatataatgcccatttttatatgcacgtttttaaacttccaagttctgaaaattgtttactggttatctctatttaaggaaaaaaaaataaaataaaacattttggattttca

SEQ ID NO: 317300 - DNA, 2784 bp, Homo sapiens
ggccgcggaggctcgggacccggctggccgcgcggcgccgcagccgccgaggcgggcgcgcgggcagctcgcgggcacccggccgggccggcgcgggagcgggaaagggtgcgctatgcctttaacacccgcgtacagtaggcatgtatagtggagtgtagggaaactctaggcggggttaaagttcagctcatggagcggcaatagcgctggctggctggctgcagttgagccgacttggaaatgtgaacgcaagaagcaggcttgatttttttttctccccccttctctctctctctctctctctctcttcctctctccctctttctcctctctcacccacactcacgcacacctccaaaccgcacacccagacgcacacgcataccccagcgcccggcagttatgtattctccgctctgtctcacccaggatgaatttcatcctttcatcgaagcacttctgccccacgtccgagcctttgcctacacatggttcaacctgcaggcccgaaaacgaaaatacttcaaaaaacatgaaaagcgtatgtcaaaagaagaagagagagccgtgaaggatgaattgctaagtgaaaaaccagaggtcaagcagaagtgggcatctcgacttctggcaaagttgcggaaagatatccgacccgaatatcgagaggattttgttcttacagttacagggaaaaaacctccatgttgtgttctttccaacccagaccagaaaggcaagatgcgaagaattgactgcctccgccaggcagataaagtctggaggttggaccttgttatggtgattttgtttaaaggtattccgctggaaagtactgatggcgagcgccttgtaaagtccccacaatgctctaatccagggctctgtgtccaaccccatcacataggggtttctgttaaggaactcgatttatatttggcatactttgtgcatgcagcagattcaagtcaatctgaaagtcccagccagccaagtgacgctgacattaaggaccagccagaaaatggacatttgggcttccaggacagttttgtcacatcaggtgtttttagtgtcactgagctagtaagagtgtcacagacaccaatagctgcaggaactggcccaaatttttctctctcagatttggaaagttcttcatactacagcatgagtccaggagcaatgaggaggtctttacccagcacatcctctacgagctccacaaagcgcctcaagtctgtggaggatgaaatggacagtcctggtgaggagccattttatacaggccaagggcgctccccaggaagtggcagtcagtcaagtggatggcatgaagtggagccaggaatgccatctccaaccacactgaagaagtcggagaagtctggtttcagcagcccctccccttcacagacctcctccctgggaacggcgttcacacagcatcaccgacctgtcattacaggacccagagcaagtccgcatgcaacaccatcgactcttcatttcccgacatcacccattatccagcagcctgggccttacttctcacacccagccatccgctatcaccctcaggagacgctgaaagaatttgtccaacttgtctgccctgatgctggtcagcaggctggacaggtggggttcctcaatcccaatgggagcagccaaggcaaggtgcacaacccattccttcccaccccaatgttgccaccgccaccgccaccaccgatggccaggcctgtgcctctgccggtgccagacacaaagcctccaaccacgtcaacagaaggaggtgcagcctcccccacgtcaccaaggtgccacatgacaggacgagtattatgggaaacattgatctcactccgatggtgtggacctgagcagtcctggtacctgggataaaagttgcagcgtcccaccatccaccagacagaccacctgaccccttctcaactctgtaacatggacgcaacctcaacccagcgcagttacaacttcactatcagcggaaggggagaaaaaccgattcaaatcaacttgtacatggaaacagcaagcattatggtcaaacagcaaaggccataaccttttgggatttttttttttttaaaatactttagggactgttgtaatttctcatatggtgctggaaatggttgggctttgtaacatttgaagtgtttccatggtagcgtgagcattaggtgacgtggctagcggaggactacccttgctcactgacttcctgttgtaacacactttccttacggagcctggctgtttcacagtatttcatgaatttacccacacaggtgtgatcctccttgagcattgaggaggcacatggagaactaaatcttttgtagtagctgagatctgcaatatataacgggacagtcaaagggcaatgtttttctgtaacatattggaaaaagaaaatgcagttatattccttttttatttgttcctttagtttgttttggttcagcagtcagcagttaagtatataacatggcccgcaaggacaatgaatccactcacattgcagaacaattccgaaaatggcaaactactactactactgttcagttttttaaaagttttgaaatgctgcacttacatttaaaaaaacaacaacaacattttttcaacaatttcaacaatgacacccagcacctcccccgcaaaccgattcgtcagtgttggaccacgggatccaagctttgtaaatatccctcaacagacacagtcctggtacctgagataaaagttgca

SEQ ID NO: 317301 - DNA, 1501 bp, Homo sapiens
ggccgcggaggctcgggacccggctggccgcgcggcgccgcagccgccgaggcgggcgcgcgggcagctcgcgggcacccggccgggccggcgcgggagcgggaaagggtgcgctatgcctttaacacccgcgtacagtaggcatgtatagtggagtgtagggaaactctaggcggggttaaagttcagctcatggagcggcaatagcgctggctggctggctgcagttgagccgacttggaaatgtgaacgcaagaagcaggcttgatttttttttctccccccttctctctctctctctctctctctcttcctctctccctctttctcctctctcacccacactcacgcacacctccaaaccgcacacccagacgcacacgcataccccagcgcccggcagttatgtattctccgctctgtctcacccaggatgaatttcatcctttcatcgaagcacttctgccccacgtccgagcctttgcctacacatggttcaacctgcaggcccgaaaacgaaaatacttcaaaaaacatgaaaagcgtatgtcaaaagaagaagagagagccgtgaaggatgaattgctaagtgaaaaaccagaggtcaagcagaagtgggcatctcgacttctggcaaagttgcggaaagatatccgacccgaatatcgagaggattttgttcttacagttacagggaaaaaacctccatgttgtgttctttccaacccagaccagaaaggcaagatgcgaagaattgactgcctccgccaggcagataaagtctggaggttggaccttgttatggtgattttgtttaaaggtattccgctggaaagtactgatggcgagcgccttgtaaagtccccacaatgctctaatccagggctctgtgtccaaccccatcacataggggtttctgttaaggaactcgatttatatttggcatactttgtgcatgcagcagattcaagtcaatctgaaagtcccagccagccaagtgacgctgacattaaggaccagccagaaaatgatggtaagtttagcttgggactctagctgctgctttcagagtccacagcagccagcaggccgactaagtgtgaggatttgggggcctaccctataagtagcccacagtaggaacaactccaaagactcggaaaaactcaagtagattacttttaatagggcagcttcttgttctcgggatcaccccagcagcctcaggacccccggccctaaacactattagggtgcccatgagaacctgaattcccaagaacgttgattacccaattaaactatgagaagtggggttaatttaccaaatcagatttttttttaatagcattaagtgaggagtcatggctttttcatttcattttagttctttaatgtgcaaatgccccatgatcatcttcactagtgatttaagatcattcattcacaagcagttttaagccttttgggagctcaacactttgccaattcctttaagaaa

SEQ ID NO: 317302 - DNA, 1297 bp, Homo sapiens
ggccgcggaggctcgggacccggctggccgcgcggcgccgcagccgccgaggcgggcgcgcgggcagctcgcgggcacccggccgggccggcgcgggagcgggaaagggtgcgctatgcctttaacacccgcgtacagtaggcatgtatagtggagtgtagggaaactctaggcggggttaaagttcagctcatggagcggcaatagcgctggctggctggctgcagttgagccgacttggaaatgtgaacgcaagaagcaggcttgatttttttttctccccccttctctctctctctctctctctctcttcctctctccctctttctcctctctcacccacactcacgcacacctccaaaccgcacacccagacgcacacgcataccccagcgcccggcagttatgtattctccgctctgtctcacccaggatgaatttcatcctttcatcgaagcacttctgccccacgtccgagcctttgcctacacatggttcaacctgcaggcccgaaaacgaaaatacttcaaaaaacatgaaaagcgtatgtcaaaagaagaagagagagccgtgaaggatgaattgctaagtgaaaaaccagaggtcaagcagaagtgggcatctcgacttctggcaaagttgcggaaagatatccgacccgaatatcgagaggattttgttcttacagttacagggaaaaaacctccatgttgtgttctttccaacccagaccagaaaggcaagatgcgaagaattgactgcctccgccaggcagataaagtctggaggttggaccttgttatggtgattttgtttaaaggtattccgctggaaagtactgatggcgagcgccttgtaaagtccccacaatgctctaatccagggctctgtgtccaaccccatcacataggggtttctgttaaggaactcgatttatatttggcatactttgtgcatgcagcaggaggagttggaagatgaggagtaacacaacactttagatatacatgttaaaaacttataacaaatcatagatcatactaaaggattaccgaagtttagaacatggctgagggtatagatgtcagattttcttacacaatagtgggtcttttgtttcagagttcactcttggcaagcaactccctaccactgcgttaatttcctgtcgatctttcattcagcaacagacctagagatggggagcagacactgccccccccacccaggctttttaagactgtgctttgtgtagattaaaaagacgaaggaaaaaagaataaactttttccaaaca

SEQ ID NO: 317303 - DNA, 748 bp, Homo sapiens
agacccaggcccctcccctgagcccctctcccctcaaaccacccctttgctacatgctaccaggtactgaggctgcacctgggactcctcttaagttggtccttgttgggtggtcagggtgaggcacagggggtgggaggcaaacccttccaagattctctggggcagaaagaatcaggtccaaatgccttagcaagacttcacaatctggctctgaagcaccattccgggcccatcactgcctcccttccctttccctcttttcttttacccctctctcgccctctgtccctcctccctccctctctttgccttgtcttccttcgtaaatctaaagcccctccccattcctaggaacatacccaagagaactgaaaacaggtgttcacacaaagcttgcacacaagcgtccactattcataatagtccacaaggggaaaaacccgacagtggatgcactgataaaataccgtatagccatacagtgggatcttagccataaaaaagaatggcggactgatacatgctgctgcagggacaaaccttgaaaacatcatgctaagtgaaacaaacctgacaggccgggtgcagtggcttacgcctgtaatcccaacactctgggaagccgaggtgggcggatcacttgaggtcagtggttcgagaccagcctgggcaacatggtgaaaccctgtctctactaaaaatacaaaaatcagttggcacggtggcgggtgcctgtaatcccagc

SEQ ID NO: 317304 - DNA, 467 bp, Homo sapiens
gtaagtcaccgtgaactattattattttttaatccttgtccatattgaccttgttatccgaagtgattcaacagagccacattctccatcagaccttcttcccatgtctccaagtgtgtatgcggtgttgagagaaaacctgagtcccacaacaattgaaactgcaatgaagtctccttattctgctgaatgacaggataaactctgacgcaccaagaaaggaagcaaatgaaaaagtttaaagactgttctttgcccaataaccacattttatttcttcagctttgtaaataccaggttctaggaaatgtttgacatctgaagctctcttcacactcccgtggcactcctcaattgggagtgttgtgactgaaatgcttgaaaccaaagcttcagataaacttgcaagataagacaactttaagaaaccagtgttaataacaatattaacagaagacacgcatgcc

SEQ ID NO: 317305 - DNA, 482 bp, Homo sapiens
attttaaggtacgttcaccattctgtttctttaatgaaagtgtatacaatccataaaaatcttcatctatagcactaaatctttgggcaccatcatgtagaatatcctacagttgtcactcacagacttgcagccacctgacttcatgccctccgaagtgattcaacagagccacattctccatcagaccttcttcccatgtctccaagtgtgtatgcggtgttgagagaaaacctgagtcccacaacaattgaaactgcagtatgttccctttattttccattgctggtcaaaggtgtttccaacgatgcaaaggtggtgtgtgaatcaaaggggctgaaatactgcctgggtagggagaaaacacatttattggaacaaattcatgagcataacacaaaaggtgtctggatggtcctgcgtgttgctgatattatgcgtattgaaagcagacaccttcagttacttaaactgctttacgt

SEQ ID NO: 317306 - DNA, 3379 bp, Homo sapiens
aaatgaaaagaccactgaagtgggaagggaaacacctgggctattatcgggctccgtggctaacttattgagtcctcttggtcacctcactgggtctcttcagatatgaaagaggatttagcattagatgggaccaagacttcctccaactctgtgattctagaacaggctgatgtcacaaagggagaagaacgcaccgtagcaaccaggggcaaggctactcaaggagagtaggaggaggctaggtcaggaagggcaagcactggtggcctacccaggacttggcccaaccctctgggtcaggtcaccctcgtcggagtgagcggaccccgctggaattggagcccagtaaggtctatgagtttggtgttttgatcctggctacccatcccttccatcccaggggtggttcaccaggctgagtggagccttatactagggagagaggaagctgaagaactgggctccaggtaagtaactctgcagaggatctcagattgtctaaggaaaccactgaagaaaatgtatgccccgcccctcccctttttcctggcactgctgagccacctgcagttgcgagagccgctgggagggataagagggaagaggacgcccggtgaaggggctccagcctggcagtttctgcgtgttagcatttctagaatagagtgggtgggaactgacccaagtaaagtcccagagactcgaacactgacgcacaggaaagcctcaagtgggaggagaaatgcaaatcccctactgatgatggcgtcagcggctttctcctagggactgtgaggggcgcttctgactttggacttgagcactgcctgggacctgtgctgagagagcgctagcatgtctcagtggaatcaagtccaacagttagaaatcaagtttttggagcaggtggatcaattctatgatgacaactttcccatggaaattcggcatctgttggcccaatggattgaaaatcaagactgggaggcagcttctaacaatgaaaccatggcaacgattcttcttcaaaacttgttaatacaactggatgaacagttaggtcgtgtttccaaagagaaaaacctactcttgatacacaatctaaaaagaattaggaaggtccttcagggaaaatttcatggaaatccaatgcatgtagctgtggttatttcaaactgtttaagggaagagaggagaatattggctgcagccaacatgcctgtccaggggcctctagagaaatccttacaaagttcttcagtttcagaaagacagaggaatgtggagcacaaagtggctgccattaaaaacagtgtgcagatgacagaacaagataccaaatacttagaagatctgcaagacgaatttgactacaggtataaaacaattcagacaatggatcagagtgacaagaatagtgccatggtgaatcaggaagttttgacactgcaggaaatgcttaacagcctcgatttcaagagaaaggaggctctcagtaaaatgacccaaatcatccatgagacagacctgttaatgaacaccatgctcatagaagagctgcaagactggaagcggcggcagcaaatcgcctgcatcgggggtccactccacaatgggctcgaccagcttcagaactgctttacactattggcagaaagtcttttccaactgagaaggcaattggagaaactagaggagcaatctaccaaaatgacatatgaaggtgatcccattccaatgcaaagaactcacatgctagaaagagtcaccttcttgatctacaaccttttcaagaactcatttgtggttgagcgacagccatgtatgccaacccaccctcagaggccgttggtacttaaaaccctaattcagttcactgtaaaactaaggctactaataaaattgccagaactaaactatcaggtaaaggttaaggcatcaattgacaagaatgtttcaactctaagcaaccgaagatttgtactttgtggaactaatgtcaaagccatgtctattgaagaatcttccaatgggagtctctcagtagaatttcgacatttgcaaccaaaggaaatgaagtccagtgctggaggtaaaggaaatgagggctgtcacatggtgactgaagaacttcattccataacgtttgaaacacagatctgcctctatggcctgaccatagatttggagaccagctcattgcctgtggtgatgatttccaatgtcagtcagttacctaatgcttgggcatccatcatttggtacaacgtgtcaaccaacgattcccagaacttggttttctttaataatcctccacctgccacattgagtcaactactggaggtgatgagctggcagttttcatcgtacgttggtcgtggtcttaactcagatcaactccatatgctggcagagaagcttacagtccaatctagctacagtgatggtcacctcacctgggccaagttctgcaaggaacatttacctggtaaatcatttaccttttggacatggcttgaagcaatattggatctaattaagaaacacattcttcccctttggattgatgggtatgtcatgggctttgttagcaaagagaaggaacggctgttgctaaaggataaaatgcctggcacctttttattaagattcagtgaaagccatctcggaggaataactttcacctgggtggaccattctgaaagtggggaagtgagattccactctgtagaaccctacaataaaggccggttgtctgctctgccattcgctgacatcctgcgagactacaaagttattatggctgaaaacattcctgaaaaccctctgaagtacctatatcctgacattcccaaagacaaagccttcggtaaacactacagctctcagccttgcgaagtttcaagaccaacagaaaggggtgacaaaggttatgttccttctgtttttatccccatctcaacaatccgaagtgattcaacagagccacattctccatcagaccttcttcccatgtctccaagtgtgtatgcggtgttgagagaaaacctgagtcccacaacaattgaaactgcaatgaagtctccttattctgctgaatgacaggataaactctgacgcaccaagaaaggaagcaaatgaaaaagtttaaagactgttctttgcccaataaccacattttatttcttcagctttgtaaataccaggttctaggaaatgtttgacatctgaagctctcttcacactcccgtggcactcctcaattgggagtgttgtgactgaaatgcttgaaaccaaagcttcagataaacttgcaagataagacaactttaagaaaccagtgttaataacaatattaacagaagacacgcatgcc

SEQ ID NO: 317307 - DNA, 2992 bp, Homo sapiens
aaatgaaaagaccactgaagtgggaagggaaacacctgggctattatcgggctccgtggctaacttattgagtcctcttggtcacctcactgggtctcttcagatatgaaagaggatttagcattagatgggaccaagacttcctccaactctgtgattctagaacaggctgatgtcacaaagggagaagaacgcaccgtagcaaccaggggcaaggctactcaaggagagtaggaggaggctaggtcaggaagggcaagcactggtggcctacccaggacttggcccaaccctctgggtcaggtcaccctcgtcggagtgagcggaccccgctggaattggagcccagtaaggtctatgagtttggtgttttgatcctggctacccatcccttccatcccaggggtggttcaccaggctgagtggagccttatactagggagagaggaagctgaagaactgggctccagcatgtctcagtggaatcaagtccaacagttagaaatcaagtttttggagcaggtggatcaattctatgatgacaactttcccatggaaattcggcatctgttggcccaatggattgaaaatcaagactgggaggcagcttctaacaatgaaaccatggcaacgattcttcttcaaaacttgttaatacaactggatgaacagttaggtcgtgtttccaaagagaaaaacctactcttgatacacaatctaaaaagaattaggaaggtccttcagggaaaatttcatggaaatccaatgcatgtagctgtggttatttcaaactgtttaagggaagagaggagaatattggctgcagccaacatgcctgtccaggggcctctagagaaatccttacaaagttcttcagtttcagaaagacagaggaatgtggagcacaaagtggctgccattaaaaacagtgtgcagatgacagaacaagataccaaatacttagaagatctgcaagacgaatttgactacaggtataaaacaattcagacaatggatcagagtgacaagaatagtgccatggtgaatcaggaagttttgacactgcaggaaatgcttaacagcctcgatttcaagagaaaggaggctctcagtaaaatgacccaaatcatccatgagacagacctgttaatgaacaccatgctcatagaagagctgcaagactggaagcggcggcagcaaatcgcctgcatcgggggtccactccacaatgggctcgaccagcttcagaactgctttacactattggcagaaagtcttttccaactgagaaggcaattggagaaactagaggagcaatctaccaaaatgacatatgaaggtgatcccattccaatgcaaagaactcacatgctagaaagagtcaccttcttgatctacaaccttttcaagaactcatttgtggttgagcgacagccatgtatgccaacccaccctcagaggccgttggtacttaaaaccctaattcagttcactgtaaaactaaggctactaataaaattgccagaactaaactatcaggtaaaggttaaggcatcaattgacaagaatgtttcaactctaagcaaccgaagatttgtactttgtggaactaatgtcaaagccatgtctattgaagaatcttccaatgggagtctctcagtagaatttcgacatttgcaaccaaaggaaatgaagtccagtgctggaggtaaaggaaatgagggctgtcacatggtgactgaagaacttcattccataacgtttgaaacacagatctgcctctatggcctgaccatagatttggagaccagctcattgcctgtggtgatgatttccaatgtcagtcagttacctaatgcttgggcatccatcatttggtacaacgtgtcaaccaacgattcccagaacttggttttctttaataatcctccacctgccacattgagtcaactactggaggtgatgagctggcagttttcatcgtacgttggtcgtggtcttaactcagatcaactccatatgctggcagagaagcttacagtccaatctagctacagtgatggtcacctcacctgggccaagttctgcaaggaacatttacctggtaaatcatttaccttttggacatggcttgaagcaatattggatctaattaagaaacacattcttcccctttggattgatgggtatgtcatgggctttgttagcaaagagaaggaacggctgttgctaaaggataaaatgcctggcacctttttattaagattcagtgaaagccatctcggaggaataactttcacctgggtggaccattctgaaagtggggaagtgagattccactctgtagaaccctacaataaaggccggttgtctgctctgccattcgctgacatcctgcgagactacaaagttattatggctgaaaacattcctgaaaaccctctgaagtacctatatcctgacattcccaaagacaaagccttcggtaaacactacagctctcagccttgcgaagtttcaagaccaacagaaaggggtgacaaaggttatgttccttctgtttttatccccatctcaacaatccgaagtgattcaacagagccacattctccatcagaccttcttcccatgtctccaagtgtgtatgcggtgttgagagaaaacctgagtcccacaacaattgaaactgcaatgaagtctccttattctgctgaatgacaggataaactctgacgcaccaagaaaggaagcaaatgaaaaagtttaaagactgttctttgcccaataaccacattttatttcttcagctttgtaaataccaggttctaggaaatgtttgacatctgaagctctcttcacactcccgtggcactcctcaattgggagtgttgtgactgaaatgcttgaaaccaaagcttcagataaacttgcaagataagacaactttaagaaaccagtgttaataacaatattaacagaagacacgcatgcc

SEQ ID NO: 317308 - DNA, 2630 bp, Homo sapiens
aaatgaaaagaccactgaagtgggaagggaaacacctgggctattatcgggctccgtggctaacttattgagtcctcttggtcacctcactgggtctcttcagatatgaaagaggatttagcattagatgggaccaagacttcctccaactctgtgattctagaacaggctgatgtcacaaagggagaagaacgcaccgtagcaaccaggggcaaggctactcaaggagagtaggaggaggctaggtcaggaagggcaagcactggtggcctacccaggacttggcccaaccctctgggtcaggtcaccctcgtcggagtgagcggaccccgctggaattggagcccagtaaggtctatgagtttggtgttttgatcctggctacccatcccttccatcccaggggtggttcaccaggctgagtggagccttatactagggagagaggaagctgaagaactgggctccaggtaagtaactctgcagaggatctcagattgtctaaggaaaccactgaagaaaatgtatgccccgcccctcccctttttcctggcactgctgagccacctgcagttgcgagagccgctgggagggataagagggaagaggacgcccggtgaaggggctccagcctggcagtttctgcgtgttagcatttctagaatagagtgggtgggaactgacccaagtaaagtcccagagactcgaacactgacgcacaggaaagcctcaagtgggaggagaaatgcaaatcccctactgatgatggcgtcagcggctttctcctagggactgtgaggggcgcttctgactttggacttgagcactgcctgggacctgtgctgagagagcgctagcatgtctcagtggaatcaagtccaacagttagaaatcaagtttttggagcaggtggatcaattctatgatgacaactttcccatggaaattcggcatctgttggcccaatggattgaaaatcaagactgggaggcagcttctaacaatgaaaccatggcaacgattcttcttcaaaacttgttaatacaactggatgaacagttaggtcgtgtttccaaagagaaaaacctactcttgatacacaatctaaaaagaattaggaaggtccttcagggaaaatttcatggaaatccaatgcatgtagctgtggttatttcaaactgtttaagggaagagaggagaatattgtgtttcaactctaagcaaccgaagatttgtactttgtggaactaatgtcaaagccatgtctattgaagaatcttccaatgggagtctctcagtagaatttcgacatttgcaaccaaaggaaatgaagtccagtgctggaggtaaaggaaatgagggctgtcacatggtgactgaagaacttcattccataacgtttgaaacacagatctgcctctatggcctgaccatagatttggagaccagctcattgcctgtggtgatgatttccaatgtcagtcagttacctaatgcttgggcatccatcatttggtacaacgtgtcaaccaacgattcccagaacttggttttctttaataatcctccacctgccacattgagtcaactactggaggtgatgagctggcagttttcatcgtacgttggtcgtggtcttaactcagatcaactccatatgctggcagagaagcttacagtccaatctagctacagtgatggtcacctcacctgggccaagttctgcaaggaacatttacctggtaaatcatttaccttttggacatggcttgaagcaatattggatctaattaagaaacacattcttcccctttggattgatgggtatgtcatgggctttgttagcaaagagaaggaacggctgttgctaaaggataaaatgcctggcacctttttattaagattcagtgaaagccatctcggaggaataactttcacctgggtggaccattctgaaagtggggaagtgagattccactctgtagaaccctacaataaaggccggttgtctgctctgccattcgctgacatcctgcgagactacaaagttattatggctgaaaacattcctgaaaaccctctgaagtacctatatcctgacattcccaaagacaaagccttcggtaaacactacagctctcagccttgcgaagtttcaagaccaacagaaaggggtgacaaaggttatgttccttctgtttttatccccatctcaacaatccgaagtgattcaacagagccacattctccatcagaccttcttcccatgtctccaagtgtgtatgcggtgttgagagaaaacctgagtcccacaacaattgaaactgcaatgaagtctccttattctgctgaatgacaggataaactctgacgcaccaagaaaggaagcaaatgaaaaagtttaaagactgttctttgcccaataaccacattttatttcttcagctttgtaaataccaggttctaggaaatgtttgacatctgaagctctcttcacactcccgtggcactcctcaattgggagtgttgtgactgaaatgcttgaaaccaaagcttcagataaacttgcaagataagacaactttaagaaaccagtgttaataacaatattaacagaagacacgcatgcc

SEQ ID NO: 317309 - DNA, 2940 bp, Homo sapiens
aaatgaaaagaccactgaagtgggaagggaaacacctgggctattatcgggctccgtggctaacttattgagtcctcttggtcacctcactgggtctcttcagatatgaaagaggatttagcattagatgggaccaagacttcctccaactctgtgattctagaacaggctgatgtcacaaagggagaagaacgcaccgtagcaaccaggggcaaggctactcaaggagagtaggaggaggctaggtcaggaagggcaagcactggtggcctacccaggacttggcccaaccctctgggtcaggtcaccctcgtcggagtgagcggaccccgctggaattggagcccagtaaggtctatgagtttggtgttttgatcctggctacccatcccttccatcccaggggtggttcaccaggctgagtggagccttatactagggagagaggaagctgaagaactgggctccaggtggatcaattctatgatgacaactttcccatggaaattcggcatctgttggcccaatggattgaaaatcaagactgggaggcagcttctaacaatgaaaccatggcaacgattcttcttcaaaacttgttaatacaactggatgaacagttaggtcgtgtttccaaagagaaaaacctactcttgatacacaatctaaaaagaattaggaaggtccttcagggaaaatttcatggaaatccaatgcatgtagctgtggttatttcaaactgtttaagggaagagaggagaatattggctgcagccaacatgcctgtccaggggcctctagagaaatccttacaaagttcttcagtttcagaaagacagaggaatgtggagcacaaagtggctgccattaaaaacagtgtgcagatgacagaacaagataccaaatacttagaagatctgcaagacgaatttgactacaggtataaaacaattcagacaatggatcagagtgacaagaatagtgccatggtgaatcaggaagttttgacactgcaggaaatgcttaacagcctcgatttcaagagaaaggaggctctcagtaaaatgacccaaatcatccatgagacagacctgttaatgaacaccatgctcatagaagagctgcaagactggaagcggcggcagcaaatcgcctgcatcgggggtccactccacaatgggctcgaccagcttcagaactgctttacactattggcagaaagtcttttccaactgagaaggcaattggagaaactagaggagcaatctaccaaaatgacatatgaaggtgatcccattccaatgcaaagaactcacatgctagaaagagtcaccttcttgatctacaaccttttcaagaactcatttgtggttgagcgacagccatgtatgccaacccaccctcagaggccgttggtacttaaaaccctaattcagttcactgtaaaactaaggctactaataaaattgccagaactaaactatcaggtaaaggttaaggcatcaattgacaagaatgtttcaactctaagcaaccgaagatttgtactttgtggaactaatgtcaaagccatgtctattgaagaatcttccaatgggagtctctcagtagaatttcgacatttgcaaccaaaggaaatgaagtccagtgctggaggtaaaggaaatgagggctgtcacatggtgactgaagaacttcattccataacgtttgaaacacagatctgcctctatggcctgaccatagatttggagaccagctcattgcctgtggtgatgatttccaatgtcagtcagttacctaatgcttgggcatccatcatttggtacaacgtgtcaaccaacgattcccagaacttggttttctttaataatcctccacctgccacattgagtcaactactggaggtgatgagctggcagttttcatcgtacgttggtcgtggtcttaactcagatcaactccatatgctggcagagaagcttacagtccaatctagctacagtgatggtcacctcacctgggccaagttctgcaaggaacatttacctggtaaatcatttaccttttggacatggcttgaagcaatattggatctaattaagaaacacattcttcccctttggattgatgggtatgtcatgggctttgttagcaaagagaaggaacggctgttgctaaaggataaaatgcctggcacctttttattaagattcagtgaaagccatctcggaggaataactttcacctgggtggaccattctgaaagtggggaagtgagattccactctgtagaaccctacaataaaggccggttgtctgctctgccattcgctgacatcctgcgagactacaaagttattatggctgaaaacattcctgaaaaccctctgaagtacctatatcctgacattcccaaagacaaagccttcggtaaacactacagctctcagccttgcgaagtttcaagaccaacagaaaggggtgacaaaggttatgttccttctgtttttatccccatctcaacaatccgaagtgattcaacagagccacattctccatcagaccttcttcccatgtctccaagtgtgtatgcggtgttgagagaaaacctgagtcccacaacaattgaaactgcaatgaagtctccttattctgctgaatgacaggataaactctgacgcaccaagaaaggaagcaaatgaaaaagtttaaagactgttctttgcccaataaccacattttatttcttcagctttgtaaataccaggttctaggaaatgtttgacatctgaagctctcttcacactcccgtggcactcctcaattgggagtgttgtgactgaaatgcttgaaaccaaagcttcagataaacttgcaagataagacaactttaagaaaccagtgttaataacaatattaacagaagacacgcatgcc

SEQ ID NO: 317310 - DNA, 1579 bp, Homo sapiens
aattttcaaacattaaaataaggaaaaacttgtctaaatttcaactgaaaaaaaactatgccagaatttttaaagccagaaattatcttgttttgaagacttaaaatcattctgtttggggaaatgaagattttccaaactgtatataacttttaaaacaataagagggaatgttcaataatagagactgtttgggggtatttactttattaatttattaataaatatattaatttatatagaaacaagtcttctattagatagtgagtatgcatttgtgaggtaacaatttatttctctcttccttagggctgtcacatggtgactgaagaacttcattccataacgtttgaaacacagatctgcctctatggcctgaccatagatttggagaccagctcattgcctgtggtgatgatttccaatgtcagtcagttacctaatgcttgggcatccatcatttggtacaacgtgtcaaccaacgattcccagaacttggttttctttaataatcctccacctgccacattgagtcaactactggaggtgatgagctggcagttttcatcgtacgttggtcgtggtcttaactcagatcaactccatatgctggcagagaagcttacagtccaatctagctacagtgatggtcacctcacctgggccaagttctgcaaggaacatttacctggtaaatcatttaccttttggacatggcttgaagcaatattggatctaattaagaaacacattcttcccctttggattgatgggtatgtcatgggctttgttagcaaagagaaggaacggctgttgctaaaggataaaatgcctggcacctttttattaagattcagtgaaagccatctcggaggaataactttcacctgggtggaccattctgaaagtggggaagtgagattccactctgtagaaccctacaataaaggccggttgtctgctctgccattcgctgacatcctgcgagactacaaagttattatggctgaaaacattcctgaaaaccctctgaagtacctatatcctgacattcccaaagacaaagccttcggtaaacactacagctctcagccttgcgaagtttcaagaccaacagaaaggggtgacaaaggttatgttccttctgtttttatccccatctcaacaatccgaagtgattcaacagagccacattctccatcagaccttcttcccatgtctccaagtgtgtatgcggtgttgagagaaaacctgagtcccacaacaattgaaactgcaatgaagtctccttattctgctgaatgacaggataaactctgacgcaccaagaaaggaagcaaatgaaaaagtttaaagactgttctttgcccaataaccacattttatttcttcagctttgtaaataccaggttctaggaaatgtttgacatctgaagctctcttcacactcccgtggcactcctcaattgggagtgttgtgactgaaatgcttgaaaccaaagcttcagataaacttgcaagataagacaactttaagaaaccagtgttaataacaatattaacagaagacacgcatgcc

SEQ ID NO: 317311 - DNA, 3211 bp, Homo sapiens
aaatgaaaagaccactgaagtgggaagggaaacacctgggctattatcgggctccgtggctaacttattgagtcctcttggtcacctcactgggtctcttcagatatgaaagaggatttagcattagatgggaccaagacttcctccaactctgtgattctagaacaggctgatgtcacaaagggagaagaacgcaccgtagcaaccaggggcaaggctactcaaggagagtaggaggaggctaggtcaggaagggcaagcactggtggcctacccaggacttggcccaaccctctgggtcaggtcaccctcgtcggagtgagcggaccccgctggaattggagcccagtaaggtctatgagtttggtgttttgatcctggctacccatcccttccatcccaggggtggttcaccaggctgagtggagccttatactagggagagaggaagctgaagaactgggctccaggtaagtaactctgcagaggatctcagattgtctaaggaaaccactgaagaaaatgtatgccccgcccctcccctttttcctggcactgctgagccacctgcagttgcgagagccgctgggagggataagagggaagaggacgcccggtgaaggggctccagcctggcagtttctgcgtgttagcatttctagaatagagtgggtgggaactgacccaagtaaagtcccagagactcgaacactgacgcacaggaaagcctcaagtgggaggagaaatgcaaatcccctactgatgatggcgtcagcggctttctcctagggactgtgaggggcgcttctgactttggacttgagcactgcctgggacctgtgctgagagagcgctagcatgtctcagtggaatcaagtccaacagttagaaatcaagtttttggagcaggtggatcaattctatgatgacaactttcccatggaaattcggcatctgttggcccaatggattgaaaatcaagactgggaggcagcttctaacaatgaaaccatggcaacgattcttcttcaaaacttgttaatacaactggatgaacagttaggtcgtgtttccaaagagaaaaacctactcttgatacacaatctaaaaagaattaggaaggtccttcagggaaaatttcatggaaatccaatgcatgtagctgtggttatttcaaactgtttaagggaagagaggagaatattggctgcagccaacatgcctgtccaggggcctctagagaaatccttacaaagttcttcagtttcagaaagacagaggaatgtggagcacaaagtggctgccattaaaaacagtgtgcagatgacagaacaagataccaaatacttagaagatctgcaagacgaatttgactacaggtataaaacaattcagacaatggatcagagtgacaagaatagtgccatggtgaatcaggaagttttgacactgcaggaaatgcttaacagcctcgatttcaagagaaaggaggctctcagtaaaatgacccaaatcatccatgagacagacctgttaatgaacaccatgctcatagaagagctgcaagactggaagcggcggcagcaaatcgcctgcatcgggggtccactccacaatgggctcgaccagcttcagaactgctttacactattggcagaaagtcttttccaactgagaaggcaattggagaaactagaggagcaatctaccaaaatgacatatgaaggtgatcccattccaatgcaaagaactcacatgctagaaagagtcaccttcttgatctacaaccttttcaagaactcatttgtggttgagcgacagccatgtatgccaacccaccctcagaggccgttggtacttaaaaccctaattcagttcactgtaaaactaaggctactaataaaattgccagaactaaactatcaggtaaaggttaaggcatcaattgacaagaatgtttcaactctaagcaaccgaagatttgtactttgtggaactaatgtcaaagccatgtctattgaagaatcttccaatgggagtctctcagtagaatttcgacatttgcaaccaaaggaaatgaagtccagtgctggaggtaaaggaaatgagggctgtcacatggtgactgaagaacttcattccataacgtttgaaacacagatctgcctctatggcctgaccatagatttggagaccagctcattgcctgtggtgatgatttccaatgtcagtcagttacctaatgcttgggcatccatcatttggtacaacgtgtcaaccaacgattcccagaacttggttttctttaataatcctccacctgccacattgagtcaactactggaggtgatgagctggcagttttcatcgtacgttggtcgtggtcttaactcagatcaactccatatgctggcagagaagcttacagtccaatctagctacagtgatggtcacctcacctgggccaagttctgcaaggaacatttacctggtaaatcatttaccttttggacatggcttgaagcaatattggatctaattaagaaacacattcttcccctttggattgatgggtatgtcatgggctttgttagcaaagagaaggaacggctgttgctaaaggataaaatgcctggcacctttttattaagattcagtgaaagccatctcggaggaataactttcacctgggtggaccattctgaaagtggggaagtgagattccactctgtagaaccctacaataaaggccggttgtctgctctgccattcgctgacatcctgcgagactacaaagttattatggctgaaaacattcctgaaaaccctctgaagtacctatatcctgacattcccaaagacaaagccttcggtaaacactacagctctcagccttgcgaagtttcaagaccaacagaaaggggtgacaaaggttatgttccttctgtttttatccccatctcaacaatgtgagtaatgttagtcacatgtgaaatatttttataaaaagctttcctataggagatttaaaggtagagcagagtacacataactgagaacaaagcattgtaatgtgcaatgtcccatttcctttaatacataaggctagccttcagggcacacttaccacaatctattgtgcctaaaattataaaattccccttttatatgccatatatgccacagtaagttgagtgttctgatatgaaat

SEQ ID NO: 317312 - DNA, 1360 bp, Homo sapiens
aaatgaaaagaccactgaagtgggaagggaaacacctgggctattatcgggctccgtggctaacttattgagtcctcttggtcacctcactgggtctcttcagatatgaaagaggatttagcattagatgggaccaagacttcctccaactctgtgattctagaacaggctgatgtcacaaagggagaagaacgcaccgtagcaaccaggggcaaggctactcaaggagagtaggaggaggctaggtcaggaagggcaagcactggtggcctacccaggacttggcccaaccctctgggtcaggtcaccctcgtcggagtgagcggaccccgctggaattggagcccagtaaggtctatgagtttggtgttttgatcctggctacccatcccttccatcccaggggtggttcaccaggctgagtggagccttatactagggagagaggaagctgaagaactgggctccaggtaagtaactctgcagaggatctcagattgtctaaggaaaccactgaagaaaatgtatgccccgcccctcccctttttcctggcactgctgagccacctgcagttgcgagagccgctgggagggataagagggaagaggacgcccggtgaaggggctccagcctggcagtttctgcgtgttagcatttctagaatagagtgggtgggaactgacccaagtaaagtcccagagactcgaacactgacgcacaggaaagcctcaagtgggaggagaaatgcaaatcccctactgatgatggcgtcagcggctttctcctagggactgtgaggggcgcttctgactttggacttgagcactgcctgggacctgtgctgagagagcgctagcatgtctcagtggaatcaagtccaacagttagaaatcaagtttttggagcaggtggatcaattctatgatgacaactttcccatggaaattcggcatctgttggcccaatggattgaaaatcaagactgggaggcagcttctaacaatgaaaccatggcaacgattcttcttcaaaacttgttaatacaactggatgaacagttaggtcgtgtttccaaagagaaaaacctactcttgatacacaatctaaaaagaattaggaaggtccttcagggaaaatttcatggaaatccaatgcatgtagctgtggttatttcaaactgtttaagggaagagaggagaatattggctgcagccaacatgcctgtccaggtaatattttctgaccttgtgatcttgttatcaccttgaactcaatttttctgaaacagaaattattatctttggtagggtacagtggctcacacctgtaatcctaacactttgggaggcaaaggtggga

SEQ ID NO: 317313 - DNA, 764 bp, Homo sapiens
ggttttaggaggtatagtaaatgtcaaatacgtttgccttcaagttgctccaagtctaaatgttgaggggacaagagatagggaaagagcttgttgataatagaaattcacatagacagctgtgggcaggatgtggggtgtttggcagagtgggagtgaaaactttttggagcaggtagaacaggagttcattttagagcaaggaaggctgtagtttaggggcacagaaagaaggctgctcccttcattagggttgaattatgaaaaaaaaccttagtgaaatttttgtatccttggatatattggaattcagtcataacattgactaattctaaggaaagaagaaaatatgtactagggctatgaacaatattttaaaactctaattctacaccttcttttatagcatgtctcagtggaatcaagtccaacagttagaaatcaagtttttggagcaggtggatcaattctatgatgacaactttcccatggaaattcggcatctgttggcccaatggattgaaaatcaagactggtaggatcaaacatattttccctagaagttgatgcacaaatgtctgatgctctatccatgtgaatttattttatggtccactttttactcagtagatgcattcttttcaggtaaagaactttctcaaggatttgaaagccttcccaaagaaggggaataattgtcctttctggttccattcattgtaaatgaaaagttaatggttccagtgcttcttttctctgtaaac

SEQ ID NO: 317314 - DNA, 2368 bp, Homo sapiens
atagtgaaaatgttagaggataagattttaaatacttcttgatttaaattaaaatactataagaaatgtatgtatatttggatttgaagattttttttccccagatttataatgaatttggaacttacaagaacaatgaggatgatggtgcaatcagagtcatttagatagatggtgagccttttctgtccatgctatgattaagtcctctgtttaaacccaaatgcaatctgagtgacacatgaataaaattaattagattaattttgaaataagagaatatgcaaaattaaccaaaaaacccccagaaaacactggtcatctccttctctaatgaataaggaaataagatcataaatagtcccatctcaacatgcatatgcaattgaaaaaactgccctcacaggcaatcctggcacaatcctaggctcataaaatttctctatcttttcttgtaaataagtctccagtcatcattctaaatgggaatcatttttaatgaaataattataactgttttctgaaatataatcataatcagtgtttctagttcaaggtacaattgaactaatccataattttacccttttctttttgataagagagtgtttcatgagggtatctttggtagagatcttttctcaagtattttataaaatattcgagtttgatgaagatggtagataaatacaccagctgtcagatgcctataattttcacaaaatgtgaagaattcattgtatcttaggatgaccataaaaaaattcatggtgtggaatctctaagcattaatagagacaacagcgctactgcagtaatacacagctactacaaatcagtggcagagcaagaataagtggtgtatcaggcaatgtgaagtttttgccttttctcctaatgctgtggttgagttttcctggaaatgaaggaaaaaaacatagcaaaagtagggtgtgttaatgaatctgatgagcaacaagtctaaaaatagcaaaagtgcaaaatggaagttaaaaaacgcaactggcacctgaagcatatttccccttctttatctccagtgctatgcctctgctaaaaatatgaatcacaaagcaaaggaaaaagagaaaaaaagtgttgtaatacagtaaaaatcactataataaaagtttataagaattgagttttttggaattgactttggcctagtaaccattagtatttcttaatttttcagcatttattccatactaatgtgataacaactgtgtgtgttacctagagaaaatgctgtagatccacacatttgaacagaaatgtttatcgatgccataacgtgatacatttgctttccggtgttgttttttgtttatattatttagggaaattttaccttaccatcacagattttgttactttaataatgcagaactatatttatttaatctagattttgttttaaaattatcaagtgttagcttttacaaataagaggcttataatgtggccagatattcttagaattcttttaggtctaagtgttttcaaaactttaagaaatacattctatttttgcaccatttaaaattttgtttccttttaagttttattaagtacacgagaagtttattatttttcattgaatccaagtgaatttatggatatgtacttatcttttatatgaatgtaatagcttgctttcagttcctcacaggtcattgaaattatttaaccaatgaaaacattctctgttacttccaaagtcaactatgtttatcaaaatctcactagtgtgagaaaaataacaagtgtaatattaaagcattgtgcaatatcttgagttggaacataatattcagaaaattaaaatcatttaaaatgagtatgcaacctttttatttaaaatcatttgctccaaaatagttttcatctctgcatttcatattttcttaaaaatatggtgtctttcactatggataggcagatgtggtagagcagggctgccaggatgagggatgctcttcctctggattacacaacggtttgattctttagtaagatgaaaactttaagacaccaagaaatggaaactggttaaagggtttccctccctgctttattcccacaaactgcactgtcaatcaacattcagatgttactccacagccgctgctgtcaatctaaaggtagatcactcagtagagcaaaggctcctgaggctttgccagcagtccacagcccagtatctacagaggcatttgggtcatggtttttgcaaagtgggatgtgggtgagagtggggttgtgttctgacttcctttattgctatcagcctgtgccagaaatagggatctatatagctacatccaatcctaacttatctctg

SEQ ID NO: 317315 - DNA, 730 bp, Homo sapiens
agcgggggctttctcaccgtgcgacgccccaacccgccgctccgccgcggtggtacgctccaggccgcgaggcacaccgagcggacgccagtggatgaccagcggcgggggaggaggagtctggaaggcaaggtcaaggagacagtgcacaatgcctttggggaccatcttaaagagcaactatcagcaactccccctgacttcagctgtgctcttgaacttctgaaagaaattaaagagatcttgctatcactgctattaccacgccagaaccgcctgagaattgagatggaagaagctctggacatggacttgctcaagcaggaggcagaacatggggccctgaaagtcctctatctctctaagtacgttctcaacatgatggctttgctgtgtgcaccagttcgagatgaagcagtgcagaaactagaaaacattacggatcctgtttggatactgagaatgaccatagtgaaggagatctagactgaaggcttcaaggtccagagacttagctgttcccaattctgccactgactcaccctgggtattgggttctgggccacatgtcatcttctgaaaatgtaggagagggatcttccaggttctgggccggatgaaaatggacatggtgaactacactatccagagccttcaaccccacctgcaggaacattccattcagtatgaacgggctaaattccaggaactcctcaataagcagcctagt

SEQ ID NO: 317316 - DNA, 1402 bp, Homo sapiens
agttcccttgcactcccctctgcctttgcaactgatcatcctccctttctccttggcttgaagcatctatgtccagtatctgtgaaatgatgttttatctgtgtgtcaggatgagaaacggcagtcattccaccaagtgttggaaactggttagcctggagacaagggtttctggggccacagctcagggatgtgtatttaattacaggatccccagaaactcctctctaggctgccacagcaacattttttctgggcttgggagccatacctgaactgtttcctccaaggcgggaactccagagagcctgccaagtctggagcaagctggggcttctgctttggccagacctgggccaccatgagacttgaaggcttctagctgtcctacgacacgagccacggtggccctgcctctccccgctcatagaagcctggtccctctgtctagcccagttcccatctagcatccgtcttctgggcctgaagccctaaatggaccacagcctgcacaggaatcaactgtaggctcaaagggaggcggtgagtaaggtcagagcctgctccaagcccaagaacaaaagttgtgttatgggtggaggctagtcccccagatctagccctgccgtctttgccctttaatgaccattgttttctttctctaaaatgtcttgtaataggtgataatgttgttgattcaaatttccatgaaaaagaaaaaaaaaactacctcttaagcgacatcctggtcgattcctctctgaggaatcctgtgggaaaagaatactgtagctcctgctctgtttacatgtttctgtcgggaaagaagccccgcctgccctggggtgttggtgtttttgtctgtgttgccatcccaggtctgccataggggctggtggctgcattgtgatgtctgggctgtgtctggggattccttcccacctacccagccagggactagtcacccccctgaagaggcctccatttccttcctgtgctccagggcatagggagcaccactcccacagacaccacctttaagggctctagtggcacacacatccacgagcctacccccaggttacctgccctaggtccacctccacccacagtcctgtgtgtaggaatcgaggaaacgggatgtccctgagcccttgtctccaaagggccggccaagggctgcccgccagcctgactccatcaaccctccatgaccaaatgatagctggcgggctctgcaggctacccaggccctctgctacctcccaccctgccagctggcaagggatgggccctgttctgtgaattgactacctgtggaaatgtgaccaattagtgtgaaatgcatgtttagcaagtgttaggtactgtatttgaaccaataaatgtgaatccttctgca

SEQ ID NO: 317317 - DNA, 1677 bp, Homo sapiens
agttcccttgcactcccctctgcctttgcaactgatcatcctccctttctccttggcttgaagcatctatgtccagtatctgtgaaatgatgttttatctgtgtgtcaggatgagaaacggcagtcattccaccaagtgttggaaactggttagcctggagacaagggtttctggggccacagctcagggatgtgtatttaattacaggatccccagaaactcctctctaggctgccacagcaacattttttctgggcttgggagccatacctgaactgtttcctccaaggcgggaactccagagagcctgccaagtctggagcaagctggggcttctgctttggccagacctgggccaccatgagacttgaaggcttctagctgtcctacgacacgagccacggtggccctgcctctccccgctcatagaagcctggtccctctgtctagcccagttcccatctagcatccgtcttctgggcctgaagccctaaatggaccacagcctgcacaggaatcaactgtaggctcaaagggaggcggtgagtaaggtcagagcctgctccaagcccaagaacaaaagttgtgttatgggtggaggctagtcccccagatctagccctgccgtctttgccctttaatgaccattgttttctttctctaaaatgtcttgtaataggtgataatgttgttgattcaaatttccatgaaaaagaaaaaaaaaactacctcttaagcgacatcctggtcgattcctctctgaggaatcctgtgggaaaagaatactgtagctcctgctctgtttacatgtttctgtcgggaaagaagccccgcctgccctggggtgttggtgtttttgtctgtgttgccatcccaggtctgccataggggctggtggctgcattgtgatgtctgggctgtgtctggggattccttcccacctacccagccagggactagtcacccccctgaagaggcctccatttccttcctgtgctccagggcatagggagcaccactcccacagacaccacctttaagggctctagtggcacacacatccacgagcctacccccaggttacctgccctaggtccacctccacccacagtcctgtgtgtaggaatcgaggaaacgggatgtccctgagcccttgtctccaaagggccggccaagggctgcccgccagcctgactccatcaaccctccatgaccaaatgatagctggcgggctctgcaggctacccaggccctctgctacctcccaccctgccagctggcaagggatgggccctgttctgtgaattgactacctgtggaaatgtgaccaattagtgtgaaatgcatgtttagcaagtgttaggtactgtatttgaaccaataaatgtgaatccttctgcaaaaaaaaaaaaaaaaaaagaaaccagaccatacacaagacgggggagcgccgctgaatagagaacccggaaggggcgccaaagtaatcggggtcaccaccctttgtgcaaacaacggggggccccctaagggtaggggccgactcatacagcgagcacgtcgcgcgggtaaacaaggtacaggcgtagcacacacgcaacagggaacatgtggaaagagacacaatgagggggcagaacagggcaacacacagcaagattagacagccgaggaaa

SEQ ID NO: 317318 - DNA, 761 bp, Homo sapiens
  misc_feature (20)..(20): n is a, c, g, or t
  misc_feature (23)..(23): n is a, c, g, or t
  misc_feature (26)..(26): n is a, c, g, or t
  misc_feature (104)..(104): n is a, c, g, or t
ctcgtggtgcgtggaactcnagngtnctacataggccaggactgcagagaaattccagagcaccttggcagggactgtggacatttcgcaaagaggcttgatcngagctttaaccttctgaggtcactggaaggactgagcgcattcaggagcctggaggaactcatcttggacaacaatcagctgggggacgaccttgtgttgccagggttacccagactgcataccttaaccctcaacaagaaccgaatcactgatttggagaacctgctggatcacttggcagaagtgacaccagctctggagtacctcagtctgctgggcaacgtggcctgtcccaacgagctggtcagcttggaaaaggatgaggaagactacaagagatacagatgctttgttctgtacaagctgcccaacttgaaatttctggatgcccagaaagtaaccagacaagaacgagaggaggcgttggtcagaggagtcttcatgaaggtggtgaagcccaaggcttctagtgaggacgttgccagctccccggagcgccactacacgcccttgccttctgcttccagggaactcaccagtcaccaaggtgtcctggggaagtgtcgctacgtttactatgggaaaaactcagagggcaacaggtttatccgagatgaccagctctgaagccaacttctgtataccttcacccatttcatgaaaataaaatcaaaagggaaatcaaaaataaagaaaacgctaaagaaaaaaaaaaa

SEQ ID NO: 317319 - DNA, 748 bp, Homo sapiens
acttatttgtcccatggatggctgctctttcttgcctgttggtctgagatgcctccgagctgctcaaagggacttctttggcctgggaattctgactcttcttcttaaagtcactggaaggactgagcgcattcaggagcctggaggaactcatcttggacaacaatcagctgggggacgaccttgtgttgccagggttacccagactgcataccttaaccctcaacaagaaccgaatcactgatttggagaacctgctggatcacttggcagaagtgacaccagctctggagtacctcagtctgctgggcaacgtggcctgtcccaacgagctggtcagcttggaaaaggatgaggaagactacaagagatacagatgctttgttctgtacaagctgcccaacttgaaatttctggatgcccagaaagtaaccagacaagaacgagaggaggcgttggtcagaggagtcttcatgaaggtggtgaagcccaaggcttctagtgaggacgttgccagctccccggagcgccactacacgcccttgccttctgcttccagggaactcaccagtcaccaaggtgtcctggggaagtgtcgctacgtttactatgggaaaaactcagagggcaacaggtttatccgagatgaccagctctgaagccaacttctgtataccttcacccatttcatgaaaataaaatcaaaagggaaatcaaaaataaagaaaacgctaaagaaaaaaaaaaa

SEQ ID NO: 317320 - DNA, 728 bp, Homo sapiens
aaactctccttgctcgggtctcatgccacgctatttcatcaaggaataggaagctgaattgggaacttgtgggaagccaggaggagaaagtcactggaaggactgagcgcattcaggagcctggaggaactcatcttggacaacaatcagctgggggacgaccttgtgttgccagggttacccagactgcataccttaaccctcaacaagaaccgaatcactgatttggagaacctgctggatcacttggcagaagtgacaccagctctggagtacctcagtctgctgggcaacgtggcctgtcccaacgagctggtcagcttggaaaaggatgaggaagactacaagagatacagatgctttgttctgtacaagctgcccaacttgaaatttctggatgcccagaaagtaaccagacaagaacgagaggaggcgttggtcagaggagtcttcatgaaggtggtgaagcccaaggcttctagtgaggacgttgccagctccccggagcgccactacacgcccttgccttctgcttccagggaactcaccagtcaccaaggtgtcctggggaagtgtcgctacgtttactatgggaaaaactcagagggcaacaggtttatccgagatgaccagctctgaagccaacttctgtataccttcacccatttcatgaaaataaaatcaaaagggaaatcaaaaataaagaaaacgctaaagaaaaaaaaaaa

SEQ ID NO: 317321 - DNA, 900 bp, Homo sapiens
  misc_feature (1)..(1): n is a, c, g, or t
ngttgaagaaagaggatctggctgaaagacccgcaactttcacttgttgagaacctttagccagcgccggcgtgcatgtgttttagttttattctttttcccttgcccccaaagccgtggagtacctgctgttgctctcatgcctcttgccaacagtggcatctgctcagtgtagccatcaagaatttgaatgtcaatatctttgccttgaaatgaatggaaaagtatttgtcactcagcggcaatcattcttcaaataaagtcactggaaggactgagcgcattcaggagcctggaggaactcatcttggacaacaatcagctgggggacgaccttgtgttgccagggttacccagactgcataccttaaccctcaacaagaaccgaatcactgatttggagaacctgctggatcacttggcagaagtgacaccagctctggagtacctcagtctgctgggcaacgtggcctgtcccaacgagctggtcagcttggaaaaggatgaggaagactacaagagatacagatgctttgttctgtacaagctgcccaacttgaaatttctggatgcccagaaagtaaccagacaagaacgagaggaggcgttggtcagaggagtcttcatgaaggtggtgaagcccaaggcttctagtgaggacgttgccagctccccggagcgccactacacgcccttgccttctgcttccagggaactcaccagtcaccaaggtgtcctggggaagtgtcgctacgtttactatgggaaaaactcagagggcaacaggtttatccgagatgaccagctctgaagccaacttctgtataccttcacccatttcatgaaaataaaatcaaaagggaaatcaaaaataaagaaaacgctaaagaaaaaaaaaaa

SEQ ID NO: 317322 - DNA, 361 bp, Homo sapiens
tgcagacgtggaaatgttggcatgtggatagaccctgtaccaaaaacccagcagaagattcagagtccctgagatgcttcctcctcatcttcttcgccaagcacctcttgtcactgatcttggaagttagaggtgggaaaaggcaggtgtcctggggaagtgtcgctacgtttactatgggaaaaactcagagggcaacaggtttatccgagatgaccagctctgaagccaacttctgtataccttcacccatttcatgaaaataaaatcaaaagggaaatcaaaaataaagaaaggtatgcgtgccggtttttcctgcaactaataccattacaataacgcgactctgtgtgtttcgcaa

SEQ ID NO: 317323 - DNA, 924 bp, Homo sapiens
acttatttgtcccatggatggctgctctttcttgcctgttggtctgagatgcctccgagctgctcaaagggacttctttggcctgggaattctgactcttcttcttaaaaatcgacgggatttctctggctgtcgtttgcgctgcatttatccgaatacatccacgctcgcaggcgatcctgcaagaaacggctcccggctcgtcgtgtacgccgtacacgctcggccaacgcaggactcgaggtggtttctatgtgcccgggtggctgccaagtctgccctccgagggaggtctggacatgcggcgcccccaggtcgagcggctctcgctgcctggcagtgcctggcaggccccacctctgccagttgcttcggaatacccgcctggtccatgggttcgcccgcggtgaaaaaatgacaagcaaattccccaacagaggtagccggaactttcctcgacgaaggctccctcctgcgcctgtgtctggagaacccccatgagcgctgcagttagcaagagagattcgatggcggtctggaaggcgcacgaagggtggggcgggggagcaaggaggccactgggtgacccagcctggtccggtgtgaaacgctagagaagggcgccttgctttccttgtttcaatgcaactcctcggcccgagacggtatcacatagtttccaggctgcgcggacgcgccgatgtgtttgcgagatcccactgggaggaggcgttcgttaaagttgcggaagttggcggaagttcgccggggggtccaaaactggggcgtcctgtcttgggcggtgcccattgctggtgacccgccgtttgtgtccctggcgggtttattgcgcgcggatcggcggcaggggcgagttaaccgggcgccgccagggggggggggtcctgcccaccccgggtgtga

SEQ ID NO: 317324 - DNA, 727 bp, Homo sapiens
  misc_feature (1)..(1): n is a, c, g, or t
ngttgaagaaagaggatctggctgaaagacccgcaactttcacttgttgagaacctttagccagcgccggcgtgcatgtgttttagttttattctttttcccttgcccccaaagccgtggagtacctgctgttgctctcatgcctcttgccaacagtggcatctgctcagtgtagccatcaagaatttgaatgtcaatatctttgccttgaaatgaatggaaaagtatttgtcactcagcggcaatcattcttcaaataaaaggttagccagacaggacccttaatcaaagagtcggtcttttctgtcagcagtgccttttaaatagcaatgatgaaggctggctgtcagggtaggacttgatgagcgagatgattgatctgcataaatcattttcttttaacattgtcagtgaagagtaaattggtgggacattttgggtattagctgtgttgaaattaatatgcagtatcctaggtgtgtcctcgatcacatagtcctcataaaagaaggtagaaattaaaaggaggcttttaggcatgcattgttctaacaagaaagttgcaccattcttactgctgtggtcatcatcttgcatgctaaattcggaagttgagtgtgtagcacattttacaagctccaaaaggaatctagttaatttgggaattagctagagtcagtagcatttaacaaccagtaaatctgtaaagacttactgctcagaggca

SEQ ID NO: 317325 - DNA, 578 bp, Homo sapiens
gctactactactaaattcacccccgtccatcaagaatttgaatgtcaatatctttgccttgaaatgaatggaaaagtatttgtcactcagcggcaatcattcttcaaataaaaggttagccagacaggacccttaatcaaagagtcggtcttttctgtcagcagtgccttttaaatagcaatgatgaaggctggctgtcagggtaggacttgatgagcgagatgattgatctgcataaatcattttcttttaacattgtcagtgaagagtaaattggtgggacattttgggtattagctgtgttgaaattaatatgcagtatcctaggtgtgtcctcgatcacatagtcctcataaaagaaggtagaaattaaaaggaggcttttaggcatgcattgttctaacaagaaagttgcaccattcttactgctgtggtcatcatcttgcatgctaaattcggaagttgagtgtgtagcacattttacaagctccaaaaggaatctagttaatttgggaattagctagagtcagtagcatttaacaaccagtaaatctgtaaagacttactgctcagaggca

SEQ ID NO: 317326 - DNA, 553 bp, Homo sapiens
tggctaggtacgaggctgggtggttgctcaacaagaaccgaatcactgatttggagaacctgctggatcacttggcagaagtgacaccagctctggagtacctcagtctgctgggcaacgtggcctgtcccaacgagctggtcagcttggaaaaggatgaggaagactacaagagatacagatgctttgttctgtacaagctgcccaacttgaaatttctggatgcccagaaagtaaccagacaagaacgagaggaggcgttggtcagaggagtcttcatgaaggtggtgaagcccaaggcttctagtgaggacgttgccagctccccggagcgccactacacgcccttgccttctgcttccagggaactcaccagtcaccaaggtgtcctggggaagtgtcgctacgtttactatgggaaaaactcagagggcaacaggtttatccgagatgaccagctctgaagccaacttctgtataccttcacccatttcatgaaaataaaatcaaaagggaaatcaaaaataaagaaaacgctaaagaaaaaaaaaaa

SEQ ID NO: 317327 - DNA, 846 bp, Homo sapiens
  misc_feature (1)..(1): n is a, c, g, or t
ngttgaagaaagaggatctggctgaaagacccgcaactttcacttgttgagaacctttagccagcgccggcgtgcatgtgttttagttttattctttttcccttgcccccaaagccgtggagtacctgctgttgctctcatgcctcttgccaacagtggcatctgctcagtgtagccatcaagaatttgaatgtcaatatctttgccttgaaatgaatggaaaagtatttgtcactcagcggcaatcattcttcaaataaagtcactggaaggactgagcgcattcaggagcctggaggaactcatcttggacaacaatcagctgggggacgaccttgtgttgccagggttacccagactgcataccttaaccctcaacaagaaccgaatcactgatttggagaacctgctggatcacttggcagaagtgacaccagctctggagtacctcagtctgctgggcaacgtggcctgtcccaacgagctggtcagcttggccaacttgaaatttctggatgcccagaaagtaaccagacaagaacgagaggaggcgttggtcagaggagtcttcatgaaggtggtgaagcccaaggcttctagtgaggacgttgccagctccccggagcgccactacacgcccttgccttctgcttccagggaactcaccagtcaccaaggtgtcctggggaagtgtcgctacgtttactatgggaaaaactcagagggcaacaggtttatccgagatgaccagctctgaagccaacttctgtataccttcacccatttcatgaaaataaaatcaaaagggaaatcaaaaataaagaaaacgctaaagaaaaaaaaaaa

SEQ ID NO: 317328 - DNA, 783 bp, Homo sapiens
gctactactactaaattcacccccgtccatcaagaatttgaatgtcaatatctttgccttgaaatgaatggaaaagtatttgtcactcagcggcaatcattcttcaaataaagtcactggaaggactgagcgcattcaggagcctggaggaactcatcttggacaacaatcagctgggggacgaccttgtgttgccagggttacccagactgcataccttaaccctcaacaagaaccgaatcactgatttggagaacctgctggatcacttggcagaagtgacaccagctctggagtacctcagtctgctgggcaacgtggcctgtcccaacgagctggtcagcttggaaaaggatgaggaagactacaagagatacagatgctttgttctgtacaagctgcccaacttgaaatttctggatgcccagaaagtaaccagacaagaacgagaggaggcgttggtcagaggagtcttcatgaaggtggtgaagcccaaggcttctagtgaggacgttgccagctccccggagcgccactacacgcccttgccttctgcttccagggaactcaccagtcaccaaggtgtcctggggaagtgtcgctacgtttactatgggaaaaactcagagggcaacaggtttatccgagatgaccagctctgaagccaacttctgtataccttcacccatttcatgaaaataaaatcaaaagggaaatcaaaaataaagaaacgatgcgcccgaaacctcatcaatcgactgcaggctcccggatccgcaaata

SEQ ID NO: 317329 - DNA, 783 bp, Homo sapiens
gctactactactaaattcacccccgtccatcaagaatttgaatgtcaatatctttgccttgaaatgaatggaaaagtatttgtcactcagcggcaatcattcttcaaataaagtcactggaaggactgagcgcattcaggagcctggaggaactcatcttggacaacaatcagctgggggacgaccttgtgttgccagggttacccagactgcataccttaaccctcaacaagaaccgaatcactgatttggagaacctgctggatcacttggcagaagtgacaccagctctggagtacctcagtctgctgggcaacgtggcctgtcccaacgagctggtcagcttggaaaaggatgaggaagactacaagagatacagatgctttgttctgtacaagctgcccaacttgaaatttctggatgcccagaaagtaaccagacaagaacgagaggaggcgttggtcagaggagtcttcatgaaggtggtgaagcccaaggcttctagtgaggacgttgccagctccccggagcgccactacacgcccttgccttctgcttccagggaactcaccagtcaccaaggtgtcctggggaagtgtcgctacgtttactatgggaaaaactcagagggcaacaggtttatccgagatgaccagctctgaagccaacttctgtataccttcacccatttcatgaaaataaaatcaaaagggaaatcaaaaataaagaaaaccggatgcggcagttcgtttttctttccaatatcggtgccaccacggccca

SEQ ID NO: 317330 - DNA, 785 bp, Homo sapiens
gctactactactaaattcacccccgtccatcaagaatttgaatgtcaatatctttgccttgaaatgaatggaaaagtatttgtcactcagcggcaatcattcttcaaataaagtcactggaaggactgagcgcattcaggagcctggaggaactcatcttggacaacaatcagctgggggacgaccttgtgttgccagggttacccagactgcataccttaaccctcaacaagaaccgaatcactgatttggagaacctgctggatcacttggcagaagtgacaccagctctggagtacctcagtctgctgggcaacgtggcctgtcccaacgagctggtcagcttggaaaaggatgaggaagactacaagagatacagatgctttgttctgtacaagctgcccaacttgaaatttctggatgcccagaaagtaaccagacaagaacgagaggaggcgttggtcagaggagtcttcatgaaggtggtgaagcccaaggcttctagtgaggacgttgccagctccccggagcgccactacacgcccttgccttctgcttccagggaactcaccagtcaccaaggtgtcctggggaagtgtcgctacgtttactatgggaaaaactcagagggcaacaggtttatccgagatgaccagctctgaagccaacttctgtataccttcacccatttcatgaaaataaaatcaaaagggaaatcaaaaataaagaaactgatgcgcccgcgttccctacagctgaatccaccacgacatccaccccccgcc

SEQ ID NO: 317331 - DNA, 885 bp, Homo sapiens
  misc_feature (20)..(20): n is a, c, g, or t
  misc_feature (23)..(23): n is a, c, g, or t
  misc_feature (26)..(26): n is a, c, g, or t
  misc_feature (104)..(104): n is a, c, g, or t
ctcgtggtgcgtggaactcnagngtnctacataggccaggactgcagagaaattccagagcaccttggcagggactgtggacatttcgcaaagaggcttgatcngagctttaaccttctgaggtcactggaaggactgagcgcattcaggagcctggaggaactcatcttggacaacaatcagctgggggacgaccttgtgttgccagggttacccagactgcataccttaaccctcaacaagaaccgaatcactgatttggagaacctgctggatcacttggcagaagtgacaccagctctggagtacctcagtctgctgggcaacgtggcctgtcccaacgagctggtcagcttggaaaaggatgaggaagactacaagagatacagatgctttgttctgtacaagctgcccaacttgaaatttctggatgcccagaaagtaaccagacaagaacgagaggaggcgttggtcagaggagtcttcatgaaggtggtgaagcccaaggcttctagtgaggacgttgccagctccccggagcgccactacacgcccttgccttctgcttccagggaactcaccagtcaccaagatttaaatattccagtgttgagaatccacagtaaacttgctgtactctgtcactgttgaggaatgggacattcacatgaatcaaatatgctggtaaataaagaaatatggagaaaaatatagaggtgtcctggggaagtgtcgctacgtttactatgggaaaaactcagagggcaacaggtttatccgagatgaccagctctgaagccaacttctgtataccttcacccatttcatgaaaataaaatcaaaagggaaatcaaaaataaagaaaacgctaaagaaaaaaaaaaa

SEQ ID NO: 317332 - DNA, 549 bp, Homo sapiens
gaggaggtggtgttcaatgggaatcacaaaggctatggtagaagtgagtaatgagagctgggctcgagccctggtctgagttcagtgtggatgtttaaaggcgaccattcttaagaggcaagagaattcgatactgggttcaaatctcaattttattttaaaagtgcatcagtaacttgtagctcatttgatggcctgcagcccagcttgtttagaaatcccttctattctctctggtactccaagtcccaaagaatctgttctgatggtgtggttacacaaccagccaagcacagccttaggttgctctcaactcagaactcaccctatcacacgttgacgaatgcaagagcctgttagagacactggaacccaagatggtgtcctggggaagtgtcgctacgtttactatgggaaaaactcagagggcaacaggtttatccgagatgaccagctctgaagccaacttctgtataccttcacccatttcatgaaaataaaatcaaaagggaaatcaaaaataaagaaaacgctaaagaaaaaaaaaaa

SEQ ID NO: 317333 - DNA, 983 bp, Homo sapiens
  misc_feature (20)..(20): n is a, c, g, or t
  misc_feature (23)..(23): n is a, c, g, or t
  misc_feature (26)..(26): n is a, c, g, or t
  misc_feature (104)..(104): n is a, c, g, or t
ctcgtggtgcgtggaactcnagngtnctacataggccaggactgcagagaaattccagagcaccttggcagggactgtggacatttcgcaaagaggcttgatcngagctttaaccttctgaggtcactggaaggactgagcgcattcaggagcctggaggaactcatcttggacaacaatcagctgggggacgaccttgtgttgccagggttacccagactgcataccttaaccctcaacaagaaccgaatcactgatttggagaacctgctggatcacttggcagaagtgacaccagctctggagtacctcagtctgctgggcaacgtggcctgtcccaacgagctggtcagcttggaaaaggatgaggaagactacaagagatacagatgctttgttctgtacaagctgcccaacttgaaatttctggatgcccagaaagtaaccagacaagaacgagaggaggcgttggtcagaggagtcttcatgaaggtggtgaagcccaaggcttctagtgaggacgttgccagctccccggagcgccactacacgcccttgccttctgcttccagggaactcaccagtcaccaagatgaagtttcattcttgtcgcccaggctggagtgcagtggtgcgttctcggctcactgcaacctccgcctccccggctcaagcgattctcctgtctcagcctcccaagtagctggaaatacaggcatgtgccaccatgcccagctaattttgtatttttagtaaagatggagtttcttcatgttggccaggtgtcctggggaagtgtcgctacgtttactatgggaaaaactcagagggcaacaggtttatccgagatgaccagctctgaagccaacttctgtataccttcacccatttcatgaaaataaaatcaaaagggaaatcaaaaataaagaaacgatgcgcccgaaacctcatcaatcgactgcaggctcccggatccgcaaata

SEQ ID NO: 317334 - DNA, 884 bp, Homo sapiens
  misc_feature (20)..(20): n is a, c, g, or t
  misc_feature (23)..(23): n is a, c, g, or t
  misc_feature (26)..(26): n is a, c, g, or t
  misc_feature (104)..(104): n is a, c, g, or t
ctcgtggtgcgtggaactcnagngtnctacataggccaggactgcagagaaattccagagcaccttggcagggactgtggacatttcgcaaagaggcttgatcngagctttaaccttctgaggtcactggaaggactgagcgcattcaggagcctggaggaactcatcttggacaacaatcagctgggggacgaccttgtgttgccagggttacccagactgcataccttaaccctcaacaagaaccgaatcactgatttggagaacctgctggatcacttggcagaagtgacaccagctctggagtacctcagtctgctgggcaacgtggcctgtcccaacgagctggtcagcttggaaaaggatgaggaagactacaagagatacagatgctttgttctgtacaagctgcccaacttgaaatttctggatgcccagaaagtaaccagacaagaacgagaggaggcgttggtcagaggagtcttcatgaaggtggtgaagcccaaggcttctagtgaggacgttgccagctccccggagcgccactacacgcccttgccttctgcttccagggaactcaccagtcaccaagatgaagtttcattcttgtcgcccaggctggagtgcagtggtgcgttctcggctcactgcaacctccgcctccccggctcaagcgattctcctgtctcagcctcccaagtagctggaaatacaggtgtcctggggaagtgtcgctacgtttactatgggaaaaactcagagggcaacaggtttatccgagatgaccagctctgaagccaacttctgtataccttcacccatttcatgaaaataaaatcaaaagggaaatcaaaaataaagaaaacgctaaagaaaaaaaaaaa

SEQ ID NO: 317335 - DNA, 377 bp, Homo sapiens
atacaccccaaagaactgaaaacaagaactcaaacagatacttgtacacctatgttcatagcagccttattcacatggacaaaagatgaagtttcattcttgtcgcccaggctggagtgcagtggtgcgttctcggctcactgcaacctccgcctccccggctcaagcgattctcctgtctcagcctcccaagtagctggaaatacaggtgtcctggggaagtgtcgctacgtttactatgggaaaaactcagagggcaacaggtttatccgagatgaccagctctgaagccaacttctgtataccttcacccatttcatgaaaataaaatcaaaagggaaatcaaaaataaagaaaacgctaaagaaaaaaaaaaa

SEQ ID NO: 317336 - DNA, 307 bp, Homo sapiens
tcatatcttcatcaccgtgtaggtaatgggtgtgaatctctgtgtgctcatatacatatgcttgattatatgatcatctcgtggaggacatgtgacacgggaagacaatagggcacatgatatgctctttgatctaaggtgtcctggggaagtgtcgctacgtttactatgggaaaaactcagagggcaacaggtttatccgagatgaccagctctgaagccaacttctgtataccttcacccatttcatgaaaataaaatcaaaagggaaatcaaaaataaagaaaacgctaaagaaaaaaaaaaa

SEQ ID NO: 317337 - DNA, 362 bp, Homo sapiens
tgcagacgtggaaatgttggcatgtggatagaccctgtaccaaaaacccagcagaagattcagagtccctgagatgcttcctcctcatcttcttcgccaagcacctcttgtcactgatcttggaagttagaggtgggaaaaggcagccccagccctgagattgctccagcctgttcttcacctgcagtgccaggtgtcctggggaagtgtcgctacgtttactatgggaaaaactcagagggcaacaggtttatccgagatgaccagctctgaagccaacttctgtataccttcacccatttcatgaaaataaaatcaaaagggaaatcaaaaataaagaaaacgctaaagaaaaaaaaaaa

SEQ ID NO: 317338 - DNA, 259 bp, Homo sapiens
tgaacctgcaggaatgtcagctgaaataccttgctcttttctacacatttctgaatcagccaagatgtcagtgacctggaaaggactcaggtgtcctggggaagtgtcgctacgtttactatgggaaaaactcagagggcaacaggtttatccgagatgaccagctctgaagccaacttctgtataccttcacccatttcatgaaaataaaatcaaaagggaaatcaaaaataaagaaaacgctaaagaaaaaaaaaaa

SEQ ID NO: 317339 - DNA, 217 bp, Homo sapiens
atactaacccaaaatacactaaaacaaaaacaacccaaccttgatgtggtgtcctggggaagtgtcgctacgtttactatgggaaaaactcagagggcaacaggtttatccgagatgaccagctctgaagccaacttctgtataccttcacccatttcatgaaaataaaatcaaaagggaaatcaaaaataaagaaaacgctaaagaaaaaaaaaaa

SEQ ID NO: 317340 - DNA, 234 bp, Homo sapiens
  misc_feature (59)..(59): n is a, c, g, or t
  misc_feature (71)..(71): n is a, c, g, or t
tatatcacagatacatcagcttactacttaatattcccccacaaaaaccccaaccctangtagtacccganggcaagtgctcttctacgtttactatgggaaaaactcagagggcaacaggtttatccgagatgaccagctctgaagccaacttctgtataccttcacccatttcatgaaaataaaatcaaaagggaaatcaaaaataaagaaaacgctaaagaaaaaaaaaaa

SEQ ID NO: 317341 - DNA, 1759 bp, Homo sapiens
gctgtggcgtgcgtggagcccgaggcctcagctcccacatcgggctcttcattgaatctcctctttgcatactcatcccagcagctgcatcaaaattctgcattttaacttaaatgacgcgggactctatacgttatacgcgttaaaaaatgtagtaaattgaaagcagtgagaaaggtaattgctttgagtgctgtttaaaaattgaagtaaaatctcattcatttaagcagttaatgtcagcttattgtgggggttacataaattagcatctttttagtttaaaagagaaatttgcttcaggggtttttcattgttcttagttcaaggacagttatctccagtgcaaagtcatgatcacatatgattgatgttattagcttgctgcttgagttactgttcagaaaaactacactttgtatattatgagaattagtggtcactgttgagcaaaacttctagagctttcttggcatgcctgttgggaagagaataaaaatgtgtcatcagagtacaggtgacagagtgcacccagcgccatgccccacctccctcttccagtcctttggcccacctgcggctcctgcctgctgtctttcttccggatcatctgcctggcccaccccactcacctctcttcttaaaacttaaatgtgatcacatcactgacctgcctacagcctccttttccctggggaataacgttcaaaggcctccctctgccattcacagccctgtagtctggcctcatcctgatttcgggggtctttcgatgctgtatagccctgcatcccctccggtgtgggcccgggcagacgtgcacacctccgcacacgcctctggctcactcaccaccgttcatgcctctgctgtgctccgtgtctgttgctccttccatgtggggcggggtgtcctccttcatccccatgataccccgcaggtcagatgtcctcctttctgtgaagcattctcaggtcagaactaattctgaccaagggacccaaggcagttatcctggcgttaaagtcctggggtgttaaaagggggctcagtgttgaaaaggaactcacaggttcctactcacagactctctcagtaggacattgatgacacactggtaccaaccacatccttaggcctttctctgaggactgaagttctgcttcgcatttgactttatctttgttgttttatttctctgagagattatatgtttccagtattgtagcacaggacttcacctagaaaaagcacctacaaatgctaactttcttttgaataataagatcattggtgttttttgctctctttagggacatgaattttataatccccagaaaaaaaattacattttcctgcgtaatgcagccgaagagctaaagcccaggaataagaagtagtggctggagactctggctcagccagagttgtttctctccactctgcctcatctctgtacgaatttgggtcccagccttgttgggttgtcagccatggacatggatttcaacccctggagaaaacgatgtcattgttcagcagctgagagcccaggcgtccgcggcgacttgccgtctctccattccactgcctgttgcagagtttttctgtaactaagggggttgaggttattgtagacgttagattgcgggcaccgccagggattttgcagcgcttcagtgtacgtgttagagaatattggaaaagcgtctgtgagccccgtgctgtattttgtaataaagtcttttgcagattgctt

SEQ ID NO: 317342 - DNA, 1886 bp, Homo sapiens
gatcagcccgcctcggcctcccaaagtgctgggattacaggcgtgagccaccgcgcctggccagttgcggatttataaaagcagtcgcttagtaacttgcagcggctacatcaactttggaccaattcgcaaactgctggtgtaaagcgtttttgcgcatgtgctgtcgccttgcgggaaaaggagcctttttcttcgacgatttccgggcgacgcaggaagtggctccagggcgcacgcgcgttgtttccgcggtagtcagggcagtttctaccgcaggcttaaggaggcttcgggctcctgggatttctgtccgcgctcctggccctcgtccttcgcgccagagcaggttcgcaaactcctcagacccttctgctcccggccgccgctttccgccggggcgagacccccaggttcaaaatgagcctgtttggaacaacctcaggttttggaaccagtgggaccagcatgtttggcagtgcaactacagacaatcacaatcccatgaaggatattgaagtaacatcatctcctgatgatagcattggttgtctgtcttttagcccaccaaccttgccggggaactttcttattgcaggatcatgggctaatgatgttcgctgctgggaagttcaagacagtggacagaccattccaaaagcccagcagatgcacactgggcctgtgcttgatgtctgctggagtgacgatgggagcaaagtgtttacggcatcgtgtgataaaactgccaaaatgtgggacctcagcagtaaccaagcgatacagatcgcacagcatgatgctcctgttaaaaccatccattggatcaaagctccaaactacagctgtgtgatgactgggagctgggataagactttaaagttttgggatactcgatcgtcaaatcctatgatggttttgcaactccctgaaaggtgttactgtgctgacgtgatataccccatggctgtggtggcaactgcagagaggggcctgattgtctatcagctagagaatcaaccttctgaattcaggaggatagaatctccactgaaacatcagcatcggtgtgtggctatttttaaagacaaacagaacaagcctactggttttgccctgggaagtatcgaggggagagttgctattcactatatcaaccccccgaaccccgccaaagataacttcacctttaaatgtcatcgatctaatggaaccaacacttcagctcctcaggacatttatgcggtaaatggaatcgcgttccatcctgttcatggcacccttgcaactgtgggatctgatggtagattcagcttctgggacaaagatgccagaacaaaactaaaaacttcggaacagttagatcagcccatctcagcttgctgtttcaatcacaatggaaacatatttgcatacgcttccagctacgactggtcaaagggacatgaattttataatccccagaaaaaaaattacattttcctgcgtaatgcagccgaagagctaaagcccaggaataagaagtagtggctggagactctggctcagccagagttgtttctctccactctgcctcatctctgtacgaatttgggtcccagccttgttgggttgtcagccatggacatggatttcaacccctggagaaaacgatgtcattgttcagcagctgagagcccaggcgtccgcggcgacttgccgtctctccattccactgcctgttgcagagtttttctgtaactaagggggttgaggttattgtagacgttagattgcgggcaccgccagggattttgcagcgcttcagtgtacgtgttagagaatattggaaaagcgtctgtgagccccgtgctgtattttgtaataaagtcttttgcagattgctt

SEQ ID NO: 317343 - DNA, 1967 bp, Homo sapiens
gatcagcccgcctcggcctcccaaagtgctgggattacaggcgtgagccaccgcgcctggccagttgcggatttataaaagcagtcgcttagtaacttgcagcggctacatcaactttggaccaattcgcaaactgctggtgtaaagcgtttttgcgcatgtgctgtcgccttgcgggaaaaggagcctttttcttcgacgatttccgggcgacgcaggaagtggctccagggcgcacgcgcgttgtttccgcggtagtcagggcagtttctaccgcaggcttaaggaggcttcgggctcctgggatttctgtccgcgctcctggccctcgtccttcgcgccagagcaggttcgcaaactcctcagacccttctgctcccggccgccgctttccgccggggcgagacccccaggttcaaaatgagcctgtttggaacaacctcaggttttggaaccagtgggaccagcatgtttggcagtgcaactacagacaatcacaatcccatgaaggatattgaagtaacatcatctcctgatgatagcattggttgtctgtcttttagcccaccaaccttgccggggaactttcttattgcaggatcatgggctaatgatgttcgctgctgggaagttcaagacagtggacagaccattccaaaagcccagcagatgcacactgggcctgtgcttgatgtctgctggagtgacgatgggagcaaagtgtttacggcatcgtgtgataaaactgccaaaatgtgggacctcagcagtaaccaagcgatacagatcgcacagcatgatgctcctgttaaaaccatccattggatcaaagctccaaactacagctgtgtgatgactgggagctgggataagactttaaagttttgggatactcgatcgtcaaatcctatgatggttttgcaactccctgaaaggtgttactgtgctgacgtgatataccccatggctgtggtggcaactgcagagaggggcctgattgtctatcagctagagaatcaaccttctgaattcaggaggatagaatctccactgaaacatcagcatcggtgtgtggctatttttaaagacaaacagaacaagcctactggttttgccctgggaagtatcgaggggagagttgctattcactatatcaaccccccgaacccgtaagtgtgactctgtcagcttgcagatttcactggactttttttaacaaaggaagacttacatgaacctttgtctttcagcgccaaagataacttcacctttaaatgtcatcgatctaatggaaccaacacttcagctcctcaggacatttatgcggtaaatggaatcgcgttccatcctgttcatggcacccttgcaactgtgggatctgatggtagattcagcttctgggacaaagatgccagaacaaaactaaaaacttcggaacagttagatcagcccatctcagcttgctgtttcaatcacaatggaaacatatttgcatacgcttccagctacgactggtcaaagggacatgaattttataatccccagaaaaaaaattacattttcctgcgtaatgcagccgaagagctaaagcccaggaataagaagtagtggctggagactctggctcagccagagttgtttctctccactctgcctcatctctgtacgaatttgggtcccagccttgttgggttgtcagccatggacatggatttcaacccctggagaaaacgatgtcattgttcagcagctgagagcccaggcgtccgcggcgacttgccgtctctccattccactgcctgttgcagagtttttctgtaactaagggggttgaggttattgtagacgttagattgcgggcaccgccagggattttgcagcgcttcagtgtacgtgttagagaatattggaaaagcgtctgtgagccccgtgctgtattttgtaataaagtcttttgcagattgctt

SEQ ID NO: 317344 - DNA, 1822 bp, Homo sapiens
gatcagcccgcctcggcctcccaaagtgctgggattacaggcgtgagccaccgcgcctggccagttgcggatttataaaagcagtcgcttagtaacttgcagcggctacatcaactttggaccaattcgcaaactgctggtgtaaagcgtttttgcgcatgtgctgtcgccttgcgggaaaaggagcctttttcttcgacgatttccgggcgacgcaggaagtggctccagggcgcacgcgcgttgtttccgcggtagtcagggcagtttctaccgcaggcttaaggaggcttcgggctcctgggatttctgtccgcgctcctggccctcgtccttcgcgccagagcaggttcaaaatgagcctgtttggaacaacctcaggttttggaaccagtgggaccagcatgtttggcagtgcaactacagacaatcacaatcccatgaaggatattgaagtaacatcatctcctgatgatagcattggttgtctgtcttttagcccaccaaccttgccggggaactttcttattgcaggatcatgggctaatgatgttcgctgctgggaagttcaagacagtggacagaccattccaaaagcccagcagatgcacactgggcctgtgcttgatgtctgctggagtgacgatgggagcaaagtgtttacggcatcgtgtgataaaactgccaaaatgtgggacctcagcagtaaccaagcgatacagatcgcacagcatgatgctcctgttaaaaccatccattggatcaaagctccaaactacagctgtgtgatgactgggagctgggataagactttaaagttttgggatactcgatcgtcaaatcctatgatggttttgcaactccctgaaaggtgttactgtgctgacgtgatataccccatggctgtggtggcaactgcagagaggggcctgattgtctatcagctagagaatcaaccttctgaattcaggaggatagaatctccactgaaacatcagcatcggtgtgtggctatttttaaagacaaacagaacaagcctactggttttgccctgggaagtatcgaggggagagttgctattcactatatcaaccccccgaaccccgccaaagataacttcacctttaaatgtcatcgatctaatggaaccaacacttcagctcctcaggacatttatgcggtaaatggaatcgcgttccatcctgttcatggcacccttgcaactgtgggatctgatggtagattcagcttctgggacaaagatgccagaacaaaactaaaaacttcggaacagttagatcagcccatctcagcttgctgtttcaatcacaatggaaacatatttgcatacgcttccagctacgactggtcaaagggacatgaattttataatccccagaaaaaaaattacattttcctgcgtaatgcagccgaagagctaaagcccaggaataagaagtagtggctggagactctggctcagccagagttgtttctctccactctgcctcatctctgtacgaatttgggtcccagccttgttgggttgtcagccatggacatggatttcaacccctggagaaaacgatgtcattgttcagcagctgagagcccaggcgtccgcggcgacttgccgtctctccattccactgcctgttgcagagtttttctgtaactaagggggttgaggttattgtagacgttagattgcgggcaccgccagggattttgcagcgcttcagtgtacgtgttagagaatattggaaaagcgtctgtgagccccgtgctgtattttgtaataaagtcttttgcagattgctt

SEQ ID NO: 317345 - DNA, 1861 bp, Homo sapiens
actgttgactaagcttcgttactgggccctggaagcgaggtcagagctggaaatggccttaggggtcacctagggcctaatccatcgtttctcttgtgggggaactgagcctctgggaagggtcacattgcgttaatgcagtgtgtgtcgcctctgtccctcccccttacacgtctggcgtctcgtcagatacatgtcagctcctgggagaagctttccctggccgctttgcagaagggcgtccccttttagcctcttccacgtcaacctgctccatttctttcgtagcagttaccagtctctgaaactaagtctgtttctgtcttagcccgccaagtatttattgtatacgtatataggtgccaccgtacaggcagtacttctccaggttcaaaatgagcctgtttggaacaacctcaggttttggaaccagtgggaccagcatgtttggcagtgcaactacagacaatcacaatcccatgaaggatattgaagtaacatcatctcctgatgatagcattggttgtctgtcttttagcccaccaaccttgccggggaactttcttattgcaggatcatgggctaatgatgttcgctgctgggaagttcaagacagtggacagaccattccaaaagcccagcagatgcacactgggcctgtgcttgatgtctgctggagtgacgatgggagcaaagtgtttacggcatcgtgtgataaaactgccaaaatgtgggacctcagcagtaaccaagcgatacagatcgcacagcatgatgctcctgttaaaaccatccattggatcaaagctccaaactacagctgtgtgatgactgggagctgggataagactttaaagttttgggatactcgatcgtcaaatcctatgatggttttgcaactccctgaaaggtgttactgtgctgacgtgatataccccatggctgtggtggcaactgcagagaggggcctgattgtctatcagctagagaatcaaccttctgaattcaggaggatagaatctccactgaaacatcagcatcggtgtgtggctatttttaaagacaaacagaacaagcctactggttttgccctgggaagtatcgaggggagagttgctattcactatatcaaccccccgaaccccgccaaagataacttcacctttaaatgtcatcgatctaatggaaccaacacttcagctcctcaggacatttatgcggtaaatggaatcgcgttccatcctgttcatggcacccttgcaactgtgggatctgatggtagattcagcttctgggacaaagatgccagaacaaaactaaaaacttcggaacagttagatcagcccatctcagcttgctgtttcaatcacaatggaaacatatttgcatacgcttccagctacgactggtcaaagggacatgaattttataatccccagaaaaaaaattacattttcctgcgtaatgcagccgaagagctaaagcccaggaataagaagtagtggctggagactctggctcagccagagttgtttctctccactctgcctcatctctgtacgaatttgggtcccagccttgttgggttgtcagccatggacatggatttcaacccctggagaaaacgatgtcattgttcagcagctgagagcccaggcgtccgcggcgacttgccgtctctccattccactgcctgttgcagagtttttctgtaactaagggggttgaggttattgtagacgttagattgcgggcaccgccagggattttgcagcgcttcagtgtacgtgttagagaatattggaaaagcgtctgtgagccccgtgctgtattttgtaataaagtcttttgcagattgctt

SEQ ID NO: 317346 - DNA, 1833 bp, Homo sapiens
gatcagcccgcctcggcctcccaaagtgctgggattacaggcgtgagccaccgcgcctggccagttgcggatttataaaagcagtcgcttagtaacttgcagcggctacatcaactttggaccaattcgcaaactgctggtgtaaagcgtttttgcgcatgtgctgtcgccttgcgggaaaaggagcctttttcttcgacgatttccgggcgacgcaggaagtggctccagggcgcacgcgcgttgtttccgcggtagtcagggcagtttctaccgcaggcttaaggaggcttcgggctcctgggatttctgtccgcgctcctggccctcgtccttcgcgccagagcaggttcgcaaactcctcagacccttctgctcccggccgccgctttccgccggggcgagacccccaggttcaaaatgagcctgtttggaacaacctcaggttttggaaccagtgggaccagcatgtttggcagtgcaactacagacaatcacaatcccatgaagcccaccaaccttgccggggaactttcttattgcaggatcatgggctaatgatgttcgctgctgggaagttcaagacagtggacagaccattccaaaagcccagcagatgcacactgggcctgtgcttgatgtctgctggagtgacgatgggagcaaagtgtttacggcatcgtgtgataaaactgccaaaatgtgggacctcagcagtaaccaagcgatacagatcgcacagcatgatgctcctgttaaaaccatccattggatcaaagctccaaactacagctgtgtgatgactgggagctgggataagactttaaagttttgggatactcgatcgtcaaatcctatgatggttttgcaactccctgaaaggtgttactgtgctgacgtgatataccccatggctgtggtggcaactgcagagaggggcctgattgtctatcagctagagaatcaaccttctgaattcaggaggatagaatctccactgaaacatcagcatcggtgtgtggctatttttaaagacaaacagaacaagcctactggttttgccctgggaagtatcgaggggagagttgctattcactatatcaaccccccgaaccccgccaaagataacttcacctttaaatgtcatcgatctaatggaaccaacacttcagctcctcaggacatttatgcggtaaatggaatcgcgttccatcctgttcatggcacccttgcaactgtgggatctgatggtagattcagcttctgggacaaagatgccagaacaaaactaaaaacttcggaacagttagatcagcccatctcagcttgctgtttcaatcacaatggaaacatatttgcatacgcttccagctacgactggtcaaagggacatgaattttataatccccagaaaaaaaattacattttcctgcgtaatgcagccgaagagctaaagcccaggaataagaagtagtggctggagactctggctcagccagagttgtttctctccactctgcctcatctctgtacgaatttgggtcccagccttgttgggttgtcagccatggacatggatttcaacccctggagaaaacgatgtcattgttcagcagctgagagcccaggcgtccgcggcgacttgccgtctctccattccactgcctgttgcagagtttttctgtaactaagggggttgaggttattgtagacgttagattgcgggcaccgccagggattttgcagcgcttcagtgtacgtgttagagaatattggaaaagcgtctgtgagccccgtgctgtattttgtaataaagtcttttgcagattgctt

SEQ ID NO: 317347 - DNA, 2525 bp, Homo sapiens
gatcagcccgcctcggcctcccaaagtgctgggattacaggcgtgagccaccgcgcctggccagttgcggatttataaaagcagtcgcttagtaacttgcagcggctacatcaactttggaccaattcgcaaactgctggtgtaaagcgtttttgcgcatgtgctgtcgccttgcgggaaaaggagcctttttcttcgacgatttccgggcgacgcaggaagtggctccagggcgcacgcgcgttgtttccgcggtagtcagggcagtttctaccgcaggcttaaggaggcttcgggctcctgggatttctgtccgcgctcctggccctcgtccttcgcgccagagcaggttcgcaaactcctcagacccttctgctcccggccgccgctttccgccggggcgagacccccaggttcaaaatgagcctgtttggaacaacctcaggttttggaaccagtgggaccagcatgtttggcagtgcaactacagacaatcacaatcccatgaaggatattgaagtaacatcatctcctgatgatagcattggttgtctgtcttttagcccaccaaccttgccggggaactttcttattgcaggatcatgggctaatgatgttcgctgctgggaagttcaagacagtggacagaccattccaaaagcccagcagatgcacactgggcctgtgcttgatgtctgctggagtgacgatgggagcaaagtgtttacggcatcgtgtgataaaactgccaaaatgtgggacctcagcagtaaccaagcgatacagatcgcacagcatgatgctcctgttaaaaccatccattggatcaaagctccaaactacagctgtgtgatgactgggagctgggataagactttaaagttttgggatactcgatcgtcaaatcctatgatggttttgcaactccctgaaaggtgttactgtgctgacgtgatataccccatggctgtggtggcaactgcagagaggggcctgattgtctatcagctagagaatcaaccttctgaattcaggaggatagaatctccactgaaacatcagcatcggtgtgtggctatttttaaagacaaacagaacaagcctactggttttgccctgggaagtatcgaggggagagttgctattcactatatcaaccccccgaaccccgccaaagataacttcacctttaaatgtcatcgatctaatggaaccaacacttcagctcctcaggacatttatgcgggacatggatttcaacccctggagaaaacgatgtcattgttcagcagctgagagcccaggcgtccgcggcgacttgccgtctctccattccactgcctgttgcagagtttttctgtaactaagggggttgaggttattgtagacgttagattgcgggcaccgccagggattttgcagcgcttcagtgtacgtgttagagaatattggaaaagcgtctgtgagccccgtgctgtattttgtaataaagtcttttgcagattgcttcccgagcttcctttgtccttttctccccttgcccaccccgtaacctcaggaacatgcgtcctgcccagcatcagcgtggggttttgagttgagatttcagacaccctctgggaaatgcggcaaccttaggggaaagggagtccccagctgcgctcacttctgctgcgcggaacggcagcctctgtgagccctggtgggcagagtttgaatgtgtttttccttgcttccctcattcccatcttcaaaatccccagtgctttctggccttgctgctcagatttccgagtgactcaaatggggactgttacttgtgctgggtgacaggccatttgtgggtaacctcctaaggcccaagtgggtgacacttgcgtgactttcaagttagaacccaagccccctgcatgggaattgccctgaactcttacccaccccggtcccctgcatgggaattgccctgaaccctcagtagtggttgtttggctgttcttttgtattttgtgtaatttaaaattcctggttggtaagtattcaaaatgaaattcagctgggctgagaaaaagtgtgacttttgggtctgtcactgtatttctcacctgtgatctcaaatgcttcttaggcctttctgtttggactaatgtgtgaagtctgacttgctgagtgtaaaattctagtatcgatagtgttgtaagatgtgtttgcctactcataaaaaacaatgaaaataaaattttctactggaagagacaaaaaaaacaacaacaacacaaaaaaaacacacaaaaaacaacacaaacaaaaaaacaaaaacaacaagagagaagacgaaagccacacgcacaaaaagaaacaaacaacacacgacgatgggtggggcgggcgacgcgacggcgcaggcaagaactgattgccaaaccacacgagggggaagaggcggaggccggcacgacggtgagacacgagagaggacacgacaggacgacccacacaagaaagaccgacggccgagcgacacaccc

SEQ ID NO: 317348 - DNA, 889 bp, Homo sapiens
acttaagtgctaagtacgaggctgggtgttaatcggccgagggaatctccactgaatatcatcagcatcggtgtgtggctatttttaaagacaaacagaacaagcctactggttttgccctgggaagtatcgaggggagagttgctattcactatatcaaccccccgaaccccgccaaagataacttcacctttaaatgtcatcgatctaatggaaccaacacttcagctcctcaggacatttatgcggtaaatggaatcgcgttccatcctgttcatggcacccttgcaactgtgggatctgatggtagattcagcttctgggacaaagatgccagaacaaaactaaaaacttcggaacagttagatcagcccatctcagcttgctgtttcaatcacaatggaaacatatttgcatacgcttccagctacgactggtcaaagggacatgaattttataatccccagaaaaaaaattacattttcctgcgtaatgcagccgaagagctaaagcccaggaataagaagtagtggctggagactctggctcagccagagttgtttctctccactctgcctcatctctgtacgaatttgggtcccagccttgttgggttgtcagccatggacatggatttcaacccctggagaaaacgatgtcattgttcagcagctgagagcccaggcgtccgcggcgacttgccgtctctccattccactgcctgttgcagagtttttctgtaactaagggggttgaggttattgtagacgttagattgcgggcaccgccagggattttgcagcgcttcagtgtacgtgttagagaatattggaaaagcgtctgtgagccccgtgctgtattttgtaataaagtcttttgcagattgctt

SEQ ID NO: 317349 - DNA, 854 bp, Homo sapiens
aaggaggttttcacatgttgtttaactccagtaaagtctgatccagcatctgatgcatactaaggttttcttctttggcatagccactttctcttctaagtcatcaatgctattcactatatcaaccccccgaaccccgccaaagataacttcacctttaaatgtcatcgatctaatggaaccaacacttcagctcctcaggacatttatgcggtaaatggaatcgcgttccatcctgttcatggcacccttgcaactgtgggatctgatggtagattcagcttctgggacaaagatgccagaacaaaactaaaaacttcggaacagttagatcagcccatctcagcttgctgtttcaatcacaatggaaacatatttgcatacgcttccagctacgactggtcaaagggacatgaattttataatccccagaaaaaaaattacattttcctgcgtaatgcagccgaagagctaaagcccaggaataagaagtagtggctggagactctggctcagccagagttgtttctctccactctgcctcatctctgtacgaatttgggtcccagccttgttgggttgtcagccatggacatggatttcaacccctggagaaaacgatgtcattgttcagcagctgagagcccaggcgtccgcggcgacttgccgtctctccattccactgcctgttgcagagtttttctgtaactaagggggttgaggttattgtagacgttagattgcgggcaccgccagggattttgcagcgcttcagtgtacgtgttagagaatattggaaaagcgtctgtgagccccgtgctgtattttgtaataaagtcttttgcagattgctt

SEQ ID NO: 317350 - DNA, 1028 bp, Homo sapiens
gatcagcccgcctcggcctcccaaagtgctgggattacaggcgtgagccaccgcgcctggccagttgcggatttataaaagcagtcgcttagtaacttgcagcggctacatcaactttggaccaattcgcaaactgctggtgtaaagcgtttttgcgcatgtgctgtcgccttgcgggaaaaggagcctttttcttcgacgatttccgggcgacgcaggaagtggctccagggcgcacgcgcgttgtttccgcggtagtcagggcagtttctaccgcaggcttaaggaggcttcgggctcctgggatttctgtccgcgctcctggccctcgtccttcgcgccagagcaggttcgcaaactcctcagacccttctgctcccggccgccgctttccgccggggcgagacccccaggttcaaaatgagcctgtttggaacaacctcaggttttggaaccagtgggaccagcatgtttggcagtgcaactacagacaatcacaatcccatgaaggatattgaagtaacatcatctcctgatgatagcattggttgtctgtcttttagcccaccaaccttgccggggaactttcttattgcaggatcatgggctaatgatgtaagtgctccttaaatacgtgttctagaaatcatctctctttgtatggccaaggttagctttagctccgttgtttcccaagtaaatgaatcagttggacttatttatggccttttttgagaaatcaatttagggggtgtgaacccttctgaatggcagacattattcttacacccgtttttgttaggaaagcacaatcatatgtgttgctcgaaattttctactttagttcagtctcttgaagtttattcccaaatcaaatatcatattcatccagagtgaacattatacccagtggcacacaccaacaaattccctttcttggcatcctgacagtgttcctcaggcatgtatgaaactttttcaacattaaataatagcacagatttgcctagatacttactcatcatgta

SEQ ID NO: 317351 - DNA, 1849 bp, Homo sapiens
gatcagcccgcctcggcctcccaaagtgctgggattacaggcgtgagccaccgcgcctggccagttgcggatttataaaagcagtcgcttagtaacttgcagcggctacatcaactttggaccaattcgcaaactgctggtgtaaagcgtttttgcgcatgtgctgtcgccttgcgggaaaaggagcctttttcttcgacgatttccgggcgacgcaggaagtggctccagggcgcacgcgcgttgtttccgcggtagtcagggcagtttctaccgcaggcttaaggaggcttcgggctcctgggatttctgtccgcgctcctggccctcgtccttcgcgccagagcaggttcgcaaactcctcagacccttctgctcccggccgccgctttccgccggggcgagacccccaggttcaaaatgagcctgtttggaacaacctcaggttttggaaccagtgggaccagcatgtttggcagtgcaactacagacaatcacaatcccatgaaggatattgaagtaacatcatctcctgatgatagcattggttgtctgtcttttagcccaccaaccttgccggggaactttcttattgcaggatcatgggctaatgatgttcgctgctgggaagttcaagacagtggacagaccattccaaaagcccagcagatgcacactgggcctgtgcttgatgtctgctggagtgacgatgggagcaaagtgtttacggcatcgtgtgataaaactgccaaaatgtgggacctcagcagtaaccaagcgatacagatcgcacagcatgatgctcctgttaaaaccatccattggatcaaagctccaaactacagctgtgtgatgactgggagctgggataagactttaaagttttgggatactcgatcgtcaaatcctatgatggttttgcaactccctgaaaggtgttactgtgctgacgtgatataccccatggctgtggtggcaactgcagagaggggcctgattgtctatcagctagagaatcaaccttctgaattcaggaggatagaatctccactgaaacatcagcatcggtgtgtggctatttttaaagacaaacagaacaagcctactggttttgccctgggaagtatcgaggggagagttgctattcactatatcaaccccccgaaccccgccaaagataacttcacctttaaatgtcatcgatctaatggaaccaacacttcagctcctcaggacatttatgcggtaaatggaatcgcgttccatcctgttcatggcacccttgcaactgtgggatctgatggtagattcagcttctgggacaaagatgccagaacaaaactaaaaacttcggaacagttagatcagcccatctcagcttgctgtttcaatcacaatggaaacatatttgcatacgcttccagctacgactggtcaaagggacatgaattttataatccccagaaaaaaaattacattttcctgcgtaatgcagccgaagagctaaagcccaggaataagaagtagtggctggagactctggctcagccagagttgtttctctccactctgcctcatctctgtacgaatttgggtcccagccttgttgggttgtcagccatggacatggatttcaacccctggagaaaacgatgtcattgttcagcagctgagagcccaggcctgctgcgggttctctaagggaactgagactcaatgaagtcggatctcgaggggatcatgagcagcagtgtgtacttgacagcgttgggagggaactgctgatgagccctgtggtgttttataataaaatactttgaagatggcctaactccatcttctccaactc

SEQ ID NO: 317352 - DNA, 2902 bp, Homo sapiens
gatcagcccgcctcggcctcccaaagtgctgggattacaggcgtgagccaccgcgcctggccagttgcggatttataaaagcagtcgcttagtaacttgcagcggctacatcaactttggaccaattcgcaaactgctggtgtaaagcgtttttgcgcatgtgctgtcgccttgcgggaaaaggagcctttttcttcgacgatttccgggcgacgcaggaagtggctccagggcgcacgcgcgttgtttccgcggtagtcagggcagtttctaccgcaggcttaaggaggcttcgggctcctgggatttctgtccgcgctcctggccctcgtccttcgcgccagagcaggttcgcaaactcctcagacccttctgctcccggccgccgctttccgccggggcgagacccccaggttcaaaatgagcctgtttggaacaacctcaggttttggaaccagtgggaccagcatgtttggcagtgcaactacagacaatcacaatcccatgaaggatattgaagtaacatcatctcctgatgatagcattggttgtctgtcttttagcccaccaaccttgccggggaactttcttattgcaggatcatgggctaatgatgttcgctgctgggaagttcaagacagtggacagaccattccaaaagcccagcagatgcacactgggcctgtgcttgatgtctgctggagtgacgatgggagcaaagtgtttacggcatcgtgtgataaaactgccaaaatgtgggacctcagcagtaaccaagcgatacagatcgcacagcatgatgctcctgttaaaaccatccattggatcaaagctccaaactacagctgtgtgatgactgggagctgggataagactttaaagttttgggatactcgatcgtcaaatcctatgatggttttgcaactccctgaaaggtgttactgtgctgacgtgatataccccatggctgtggtggcaactgcagagaggggcctgattgtctatcagctagagaatcaaccttctgaattcaggaggatagaatctccactgaaacatcagcatcggtgtgtggctatttttaaagacaaacagaacaagcctactggttttgccctgggaagtatcgaggggagagttgctattcactatatcaaccccccgaaccccgccaaagataacttcacctttaaatgtcatcgatctaatggaaccaacacttcagctcctcaggacatttatgcggtaaatggaatcgcgttccatcctgttcatggcacccttgcaactgtgggatctgatggtagattcagcttctgggacaaagatgccagaacaaaactaaaaacttcggaacagttagatcagcccatctcagcttgctgtttcaatcacaatggaaacatatttgcatacgcttccagctacgactggtcaaagggacatgaattttataatccccagaaaaaaaattacattttcctgcgtaatgcagccgaagagctaaagcccaggaataagaagtagtggctggagactctggctcagccagagttgtttctctccactctgcctcatctctgtacgaatttgggtcccagccttgttgggttgtcagccatggacatggatttcaacccctggagaaaacgatgtcattgttcagcagctgagagcccaggcgtccgcggcgacttgccgtctctccattccactgcctgttgcagagtttttctgtaactaagggggttgaggttattgtagacgttagattgcgggcaccgccagggattttgcagcgcttcagtgtacgtgttagagaatattggaaaagcgtctgtgagccccgtgctgtattttgtaataaagtcttttgcagattgcttcccgagcttcctttgtccttttctccccttgcccaccccgtaacctcaggaacatgcgtcctgcccagcatcagcgtggggttttgagttgagatttcagacaccctctgggaaatgcggcaaccttaggggaaagggagtccccagctgcgctcacttctgctgcgcggaacggcagcctctgtgagccctggtgggcagagtttgaatgtgtttttccttgcttccctcattcccatcttcaaaatccccagtgctttctggccttgctgctcagatttccgagtgactcaaatggggactgttacttgtgctgggtgacaggccatttgtgggtaacctcctaaggcccaagtgggtgacacttgcgtgactttcaagttagaacccaagccccctgcatgggaattgccctgaactcttacccaccccggtcccctgcatgggaattgccctgaaccctcagtagtggttgtttggctgttcttttgtattttgtgtaatttaaaattcctggttggtaagtattcaaaatgaaattcagctgggctgagaaaaagtgtgacttttgggtctgtcactgtatttctcacctgtgatctcaaatgcttcttaggcctttctgtttggactaatgtgtgaagtctgacttgctgagtgtaaaattctagtatcgatagtgttgtaagatgtgtttgcctactcataaaaaacaatgaaaataaaattttctactggaagagacaaaaaaaacaacaacaacacaaaaaaaacacacaaaaaacaacacaaacaaaaaaacaaaaacaacaagagagaagacgaaagccacacgcacaaaaagaaacaaacaacacacgacgatgggtggggcgggcgacgcgacggcgcaggcaagaactgattgccaaaccacacgagggggaagaggcggaggccggcacgacggtgagacacgagagaggacacgacaggacgacccacacaagaaagaccgacggccgagcgacacaccc

SEQ ID NO: 317353 - DNA, 1512 bp, Homo sapiens
actgttgactaagcttcgttactgggccctggaagcgaggttcaaaatgagcctgtttggaacaacctcaggttttggaaccagtgggaccagcatgtttggcagtgcaactacagacaatcacaatcccatgaaggatattgaagtaacatcatctcctgatgatagcattggttgtctgtcttttagcccaccaaccttgccggggaactttcttattgcaggatcatgggctaatgatgttcgctgctgggaagttcaagacagtggacagaccattccaaaagcccagcagatgcacactgggcctgtgcttgatgtctgctggagtgacgatgggagcaaagtgtttacggcatcgtgtgataaaactgccaaaatgtgggacctcagcagtaaccaagcgatacagatcgcacagcatgatgctcctgttaaaaccatccattggatcaaagctccaaactacagctgtgtgatgactgggagctgggataagactttaaagttttgggatactcgatcgtcaaatcctatgatggttttgcaactccctgaaaggtgttactgtgctgacgtgatataccccatggctgtggtggcaactgcagagaggggcctgattgtctatcagctagagaatcaaccttctgaattcaggaggatagaatctccactgaaacatcagcatcggtgtgtggctatttttaaagacaaacagaacaagcctactggttttgccctgggaagtatcgaggggagagttgctattcactatatcaaccccccgaaccccgccaaagataacttcacctttaaatgtcatcgatctaatggaaccaacacttcagctcctcaggacatttatgcggtaaatggaatcgcgttccatcctgttcatggcacccttgcaactgtgggatctgatggtagattcagcttctgggacaaagatgccagaacaaaactaaaaacttcggaacagttagatcagcccatctcagcttgctgtttcaatcacaatggaaacatatttgcatacgcttccagctacgactggtcaaagggacatgaattttataatccccagaaaaaaaattacattttcctgcgtaatgcagccgaagagctaaagcccaggaataagaagtagtggctggagactctggctcagccagagttgtttctctccactctgcctcatctctgtacgaatttgggtcccagccttgttgggttgtcagccatggacatggatttcaacccctggagaaaacgatgtcattgttcagcagctgagagcccaggcgtccgcggcgacttgccgtctctccattccactgcctgttgcagagtttttctgtaactaagggggttgaggttattgtagacgttagattgcgggcaccgccagggattttgcagcgcttcagtgtacgtgttagagaatattggaaaagcgtctgtgagccccgtgctgtattttgtaataaagtcttttgcagattgctt

SEQ ID NO: 317354 - DNA, 1658 bp, Homo sapiens
gatcagcccgcctcggcctcccaaagtgctgggattacaggcgtgagccaccgcgcctggccagttgcggatttataaaagcagtcgcttagtaacttgcagcggctacatcaactttggaccaattcgcaaactgctggtgtaaagcgtttttgcgcatgtgctgtcgccttgcgggaaaaggagcctttttcttcgacgatttccgggcgacgcaggaagtggctccagggcgcacgcgcgttgtttccgcggtagtcagggcagtttctaccgcaggcttaaggaggcttcgggctcctgggatttctgtccgcgctcctggccctcgtccttcgcgccagagcaggttcgcaaactcctcagacccttctgctcccggccgccgctttccgccggggcgagacccccaggttcaaaatgagcctgtttggaacaacctcaggttttggaaccagtgggaccagcatgtttggcagtgcaactacagacaatcacaatcccatgaaggatattgaagtaacatcatctcctgatgatagcattggttgtctgtcttttagcccaccaaccttgccggggaactttcttattgcaggatcatgggctaatgatgttcgctgctgggaagttcaagacagtggacagaccattccaaaagcccagcagatgcacactgggcctgtgcttgatgtctgctggagtgacgatgggagcaaagtgtttacggcatcgtgtgataaaactgccaaaatgtgggacctcagcagtaaccaagcgatacagatcgcacagcatgatgctcctgttaaaaccatccattggatcaaagctccaaactacagctgtgtgatgactgggagctgggataagactttaaagttttgggatactcgatcgtcaaatcctatgatggttttgcaactccctgaaaggtgttactgtgctgacgtgatataccccatggctgtggtggcaactgcagagaggggcctgattgtctatcagctagagaatcaaccttctgaattcaggaggatagaatctccactgaaacatcagcatcggtgtgtggctatttttaaagacaaacagaacaagcctactggttttgccctgggaagtatcgaggggagagttgctattcactatatcaaccccccgaaccccgccaaagataacttcacctttaaatgtcatcgatctaatggaaccaacacttcagctcctcaggacatttatgcggtaaatggaatcgcgttccatcctgttcatggcacccttgcaactgtgggatctgatggtagattcagcttctgggacaaagatgccagaacaaaactaaaaacttcggaacagttagatcagcccatctcagcttgctgtttcaatcaggacatggatttcaacccctggagaaaacgatgtcattgttcagcagctgagagcccaggcgtccgcggcgacttgccgtctctccattccactgcctgttgcagagtttttctgtaactaagggggttgaggttattgtagacgttagattgcgggcaccgccagggattttgcagcgcttcagtgtacgtgttagagaatattggaaaagcgtctgtgagccccgtgctgtattttgtaataaagtcttttgcagattgctt

SEQ ID NO: 317355 - DNA, 1215 bp, Homo sapiens
gatcagcccgcctcggcctcccaaagtgctgggattacaggcgtgagccaccgcgcctggccagttgcggatttataaaagcagtcgcttagtaacttgcagcggctacatcaactttggaccaattcgcaaactgctggtgtaaagcgtttttgcgcatgtgctgtcgccttgcgggaaaaggagcctttttcttcgacgatttccgggcgacgcaggaagtggctccagggcgcacgcgcgttgtttccgcggtagtcagggcagtttctaccgcaggcttaaggaggcttcgggctcctgggatttctgtccgcgctcctggccctcgtccttcgcgccagagcaggttcaaaatgagcctgtttggaacaacctcaggttttggaaccagtgggaccagcatgtttggcagtgcaactacagacaatcacaatcccatgaaggatattgaagtaacatcatctcctgatgatagcattggttgtctgtcttttagcccaccaaccttgccggggaactttcttattgcaggatcatgggctaatgatgttcgctgctgggaagttcaagacagtggacagaccattccaaaagcccagcagatgcacactgggcctgtgcttgatgtctgctggagtgacgatgggagcaaagtgtttacggcatcgtgtgataaaactgccaaaatgtgggacctcagcagtaaccaagcgatacagatcgcacagcatgatgctcctgttaaaaccatccattggatcaaagctccaaactacagctgtgtgatgactgggagctgggataagactttaaagttttgggatactcgatcgtcaaatcctatgatggttttgcaactccctgaaaggtgttactgtgctgacgtgatataccccatggctgtggtggcaactgcagagaggggcctgattgtctatcagctagagaatcaaccttctgaattcaggaggatagaatctccactgaaacatcagcatcggtgtgtggctatttttaaagacaaacagaacaagcctactggttttgccctgggaagtatcgaggggagagttgctattcactatatcaaccccccgaaccccgccaaagataacttcacctttaaatgtcatcgatctaatggaaccaacacttcagctcctcaggacatttatgcggtacgtttttagacactttaaccgtggtaataca

SEQ ID NO: 317356 - DNA, 2797 bp, Homo sapiens
tagctggagcggtgtggagcgctgcggagggtgcgtgcgggccgcggcagccgaacaaaggagcaggggcgccgccgcagggacccgccacccacctcccggggccgcgcagcggcctctcgtctactgccaccatgaccgccaacggcacagccgaggcggtgcagatccagttcggcctcatcaactgcggcaacaagtacctgacggccgaggcgttcgggttcaaggtgaacgcgtccgccagcagcctgaagaagaagcagatctggacgctggagcagccccctgacgaggcgggcagcgcggccgtgtgcctgcgcagccacctgggccgctacctggcggcggacaaggacggcaacgtgacctgcgagcgcgaggtgcccggtcccgactgccgtttcctcatcgtggcgcacgacgacggtcgctggtcgctgcagtccgaggcgcaccggcgctacttcggcggcaccgaggaccgcctgtcctgcttcgcgcagacggtgtcccccgccgagaagtggagcgtgcacatcgccatgcaccctcaggtcaacatctacagcgtcacccgtaagcgctacgcgcacctgagcgcgcggccggccgacgagatcgccgtggaccgcgacgtgccctggggcgtcgactcgctcatcaccctcgccttccaggaccagcgctacagcgtgcagaccgccgaccaccgcttcctgcgccacgacgggcgcctggtggcgcgccccgagccggccactggctacacgctggagttccgctccggcaaggtggccttccgcgactgcgagggccgttacctggcgccgtcggggcccagcggcacgctcaaggcgggcaaggccaccaaggtgggcaaggacgagctctttgctctggagcagagctgcgcccaggtcgtgctgcaggcggccaacgagaggaacgtgtccacgcgccagggtatggacctgtctgccaatcaggacgaggagaccgaccaggagaccttccagctggagatcgaccgcgacaccaaaaagtgtgccttccgtacccacacgggcaagtactggacgctgacggccaccgggggcgtgcagtccaccgcctccagcaagaatgccagctgctactttgacatcgagtggcgtgaccggcgcatcacactgagggcgtccaatggcaagtttgtgacctccaagaagaatgggcagctggccgcctcggtggagacagcaggggactcagagctcttcctcatgaagctcatcaaccgccccatcatcgtgttccgcggggagcatggcttcatcggctgccgcaaggtcacgggcaccctggacgccaaccgctccagctatgacgtcttccagctggagttcaacgatggcgcctacaacatcaaagactccacaggcaaatactggacggtgggcagtgactccgcggtcaccagcagcggcgacactcctgtggacttcttcttcgagttctgcgactataacaaggtggccatcaaggtgggcgggcgctacctgaagggcgaccacgcaggcgtcctgaaggcctcggcggaaaccgtggaccccgcctcgctctgggagtactagggccggcccgtccttccccgcccctgcccacatggcggctcctgccaaccctccctgctaaccccttctccgccaggtgggctccagggcgggaggcaagcccccttgcctttcaaactggaaaccccagagaaaacggtgcccccacctgtcgcccctatggactccccactctcccctccgcccgggttccctactcccctcgggtcagcggctgcggcctggccctgggagggatttcagatgcccctgccctcttgtctgccacggggcgagtctggcacctctttcttctgacctcagacggctctgagccttatttctctggaagcggctaagggacggttgggggctgggagccctgggcgtgtagtgtaactggaatcttttgcctctcccagccacctcctcccagccccccaggagagctgggcacatgtcccaagcctgtcagtggccctccctggtgcactgtccccgaaacccctgcttgggaagggaagctgtcgggtgggctaggactgacccttgtggtgtttttttgggtggtggctggaaacagcccctctcccacgtggcagaggctcagcctggctcccttccctggagcggcagggcgtgacggccacagggtctgcccgctgcacgttctgccaaggtggtggtggcgggcgggtaggggtgtgggggccgtcttcctcctgtctctttcctttcaccctagcctgactggaagcagaaaatgaccaaatcagtattttttttaatgaaatattattgctggaggcgtcccaggcaagcctggctgtagtagcgagtgatctggcggggggcgtctcagcaccctccccagggggtgcatctcagccccctctttccgtccttcccgtccagccccagccctgggcctgggctgccgacacctgggccagagcccctgctgtgattggtgctccctgggcctcccgggtggatgaagccaggcgtcgccccctccgggagccctggggtgagccgccggggcccccctgctgccagcctcccccgtccccaacatgcatctcactctgggtgtcttggtcttttattttttgtaagtgtcatttgtataactctaaacgcccatgatagtagcttcaaactggaaatagcgaaataaaataactcagtctgcagcccca

SEQ ID NO: 317357 - DNA, 2371 bp, Homo sapiens
tagctggagcggtgtggagcgctgcggagggtgcgtgcgggccgcggcagccgaacaaaggagcaggggcgccgccgcagggacccgccacccacctcccggggccgcgcagcggcctctcgtctactgccaccatgaccgccaacggcacagccgaggcggtgcagatccagttcggcctcatcaactgcggcaacaagtacctgacggccgaggcgttcgggttcaaggtgaacgcgtccgccagcagcctgaagaagaagcagatctggacgctggagcagccccctgacgaggcgggcagcgcggccgtgtgcctgcgcagccacctgggccgctacctggcggcggacaaggacggcaacgtgacctgcgagcgcgaggtgcccggtcccgactgccgtttcctcatcgtggcgcacgacgacggtcgctggtcgctgcagtccgaggcgcaccggcgctacttcggcggcaccgaggaccgcctgtcctgcttcgcgcagacggtgtcccccgccgagaagtggagcgtgcacatcgccatgcaccctcaggtcaacatctacagcgtcacccgtaagcgctacgcgcacctgagcgcgcggccggccgacgagatcgccgtggaccgcgacgtgccctggggcgtcgactcgctcatcaccctcgccttccaggaccagcgctacagcgtgcagaccgccgaccaccgcttcctgcgccacgacgggcgcctggtggcgcgccccgagccggccactggctacacgctggagttccgctccggcaaggtggccttccgcgactgcgagggccgttacctggcgccgtcggggcccagcggcacgctcaaggcgggcaaggccaccaaggtgggcaaggacgagctctttgctctggagcagagctgcgcccaggtcgtgctgcaggcggccaacgagaggaacgtgtccacgcgccagggtatggacctgtctgccaatcaggacgaggagaccgaccaggagaccttccagctggagatcgaccgcgacaccaaaaagtgtgccttccgtacccacacgggcaagtactggacgctgacggccaccgggggcgtgcagtccaccgcctccagcaagaatgccagctgctactttgacatcgagtggcgtgaccggcgcatcacactgagggcgtccaatggcaagtttgtgacctccaagaagaatgggcagctggccgcctcggtggagacagcaggggactcagagctcttcctcatgaagctcatcaaccgccccatcatcgtgttccgcggggagcatggcttcatcggctgccgcaaggtcacgggcaccctggacgccaaccgctccagctatgacgtcttccagctggagttcaacgatggcgcctacaacatcaaagactccacaggcaaatactggacggtgggcagtgactccgcggtcaccagcagcggcgacactcctgtggacttcttcttcgagttctgcgactataacaaggtggccatcaaggtgggcgggcgctacctgaagggcgaccacgcaggcgtcctgaaggcctcggcggaaaccgtggaccccgcctcgctctgggagtactagggccggcccgtccttccccgcccctgcccacatggcggctcctgccaaccctccctgctaaccccttctccgccaggtgggctccagggcgggaggcaagcccccttgcctttcaaactggaaaccccagagaaaacggtgcccccacctgtcgcccctatggactccccactctcccctccgcccgggttccctactcccctcgggtcagcggctgcggcctggccctgggagggatttcagatgcccctgccctcttgtctgccacggggcgagtctggcacctctttcttctgacctcagacggctctgagccttatttctctggaagcggctaagggacggttgggggctgggagccctgggcgtgtagtgtaactggaatcttttgcctctcccagccacctcctcccagccccccaggagagctgggcacatgtcccaagcctgtcagtggccctccctggtgcactgtccccgaaacccctgcttgggaagggaagctgtcgggtgggctaggactgacccttgtggtgtttttttgggtggtggctggaaacacgccccctccgggagccctggggtgagccgccggggcccccctgctgccagcctcccccgtccccaacatgcatctcactctgggtgtcttggtcttttattttttgtaagtgtcatttgtataactctaaacgcccatgatagtagcttcaaactggaaatagcgaaataaaataactcagtctgcagcccca

SEQ ID NO: 317358 - DNA, 1213 bp, Homo sapiens
aaggaaggaaggaaggaaggaagaggaaggaaggaaggaaggaaggaaggaagaggaaggaaggaaggaaggaaggaaggaagaggaaggaaggaaggaaggaaggaaggaagaggaaggaaggaaggaaggaaggaaggaagaggaaggaaggaaggaaggaaggaaggaagaggaaggaaggaaggaaggaaggaaggaagaggaaggaaggaaggaaggaaggaaggaagaggaaggaaggaaggaaggaaggaaggaagaggaaggaaggaaggaaggaaggaaggaagaggaaggaaggaaggaaggaaggaaggaagaggaaggaaggaaggaaggaaggaaggaagaggaaggaaggaaggaaggaaggaaggaagaggaaggaaggaaggaaggaaggaaggaagaggaaggaaggaaggaaggaaggaaggaagaggaaggaaggaaggaaggaaggaaggaagaggaaggaaggaaggaaggaaggaaggaagaggaaggaaggaaggaaggaaggaaggaagaggaaggaaggaaggaaggaaggaaggaagaggaaggaaggaaggaaggaaggaaggaagaggaaggaaggaaggaaggaaggaaggaagggaaggaaggaaggaaggaaggaaggaagaggaaggaaggaaggaaggaaggaaggaagaggaaggaaggaaggaaggaaggaaggaagaggaaggaaggaaggaaggaaggaaggaagaggaaggaaggaaggaaggatggaagcagaaaatgaccaaatcagtattttttttaatgaaatattattgctggaggcgtcccaggcaagcctggctgtagtagcgagtgatctggcggggggcgtctcagcaccctccccagggggtgcatctcagccccctctttccgtccttcccgtccagccccagccctgggcctgggctgccgacacctgggccagagcccctgctgtgattggtgctccctgggcctcccgggtggatgaagccaggcgtcgccccctccgggagccctggggtgagccgccggggcccccctgctgccagcctcccccgtccccaacatgcatctcactctgggtgtcttggtcttttattttttgtaagtgtcatttgtataactctaaacgcccatgatagtagcttcaaactggaaatagcgaaataaaataactcagtctgcagcccca

SEQ ID NO: 317359 - DNA, 2155 bp, Homo sapiens
taatctgggaaaccggctccattctgggtctgagttaggagcttggggctgtagtggggagctaggagtcccattggaaggggcctgcagcgacaggctgtggatgcgcacaggctggcccatgcggcccgtgcagcaggcgccacataagccagatgtcagcggccgagagcccgtgcactacaaccagctcacggtaaaagcaggggtcgaaggtgctcaaatgcggcgcggctgaaggctgggggatgccaaaggtgcggaaggcagggtgaggctcgggcgtgagccgcaggcgctgcagacacatgcccagaaagacgtcgtcgatggggaagagctcgacctgcgcacaggcgccagccaggcggtgcagcgtggccccggaaagcacaaagccaccgccgcccgcgtaggccggataggcgggcaggccgtacacggcctcggggatgtagtacttgctagcccgcgtgcggatgggccgcgcatgcacaattacgtcaccagcaagcaggtcttgcgccgggtcccgcggcgccaggaactccaggagatttcccacgttcacgaacacatctgcgtcgcccttaaaaacgaagcgcacgtcggggcagaaagctgaggcccaggctagaaagtggatctccttgagcgttaggttaaaaaaggtgtcgtcgaaggcccagagcaggatgtccgcatacgcaaggctctcggcccgcagcagggcgcgccagtgggttcgcgcgccctccccaacttcgtcggccccgcccgagcctgcgcccctgggcacgcccagcaagaacacgcggcgcaccagcgccccctgcacgcgaccctccgcgccccacgtctggcgcacggcttggcgccgctcgaagtcctctgccaccgacttgacagcaataagcaggtccgggcggccaccgggtgcgccgtcgccgcggcacttgtgcggctggttaatgagcagtggaaaccgccgctggtccttggcgcgcaaatagcgggcgaagtcaaagggtcccgtaggcgtgggcggcgccggtgtgtccccttcgtaggccggcggggctgcacccgcgtcgggtaactggaacgcgcggggtccgggggtgggcctcggtgccgccctccctcgccctcgcggcgcgctcgccgtcggggccgcgccgtcgcgctgcgcatagagtaagaggcccagggaggcgccaaggagcagcgtgagcaatgcgtccctgcgtaggcgcagcctcctcctcatctccgcgcggcctgcgccctccctcccctgtaagggtcgcagtcggcagcagggggcagcgagccccgccctccccagctgagggggcgggaggccacgccccggggggggctccagcgaccgacggttgagccccttgcgttgttctcctcctcccggccgtgtcgcaccgccgggaccggcagcctgaagggacaagaagttcacccatgtagccaactcccccgcggcctcagctccggcccaggactgcgacccagggccgggcagggagactgggagcctcggcccctcccccgcccgcctccctcgcgctgaggccgaatcccttccaccctgccatcccctcaatgtcgggccctggggtcccgacactcacgctcggccctcggaagtggcgcagccccggacgccctggcctccggggctcagcgcagggtccgaggggccgccatggaccgggcccgagccaaatgcagaagactccacaggcaaatactggacggtgggcagtgactccgcggtcaccagcagcggcgacactcctgtggacttcttcttcgagttctgcgactataacaaggtggccatcaaggtgggcgggcgctacctgaagggcgaccacgcaggcgtcctgaaggcctcggcggaaaccgtggaccccgcctcgctctgggagtactagggccggcccgtccttccccgcccctgcccacatggcggctcctgccaaccctgccagcctcccccgtccccaacatgcatctcactctgggtgtcttggtcttttattttttgtaagtgtcatttgtataactctaaacgcccatgatagtagcttcaaactggaaatagcgaaataaaataactcagtctgcagcccca

SEQ ID NO: 317360 - DNA, 870 bp, Homo sapiens
  misc_feature (1)..(1): n is a, c, g, or t
  misc_feature (32)..(32): n is a, c, g, or t
nctccgtcccaacttaggctaggtacgaggcngggtggttaatcggccgaggcgcgcagcggcctctcgtctactgccaccatgaccgccaacggcacagccgaggcggtgcagatccagttcggcctcatcaactgcggcaacaagtacctgacggccgaggcgttcgggttcaaggtgaacgcgtccgccagcagcctgaagaagaagcagatctggacgctggagcagccccctgacgaggcgggcagcgcggccgtgtgcctgcgcagccacctgggccgctacctggcggcggacaaggacggcaacgtgacctgcgagcgcgaggtgcccggtcccgactgccgtttcctcatcgtggcgcacgacgacggtcgctggtcgctgcagtccgaggcgcaccggcgctacttcggcggcaccgaggaccgcctgtcctgcttcgcgcagacggtgtcccccgccgagaagtggagcgtgcacatcgccatgcaccctcaggtcaacatctacagcgtcacccgtaagcgctacgcgcacctgagcgcgcggccggccgacgagatcgccgtggaccgcgacgtgccctggggcgtcgactcgctcatcaccctcgccttccaggaccagcgctacagcgtgcagaccgccgaccaccgcttcctgcgccacgacgggcgcctggtggcgcgccccgagccggccactggctacacgctggagttccgctccggcaaggtggccttccgcgactgcgagggcgtcctgggcgtcgggccggggcctccagggggcggcccaggtgaggcactcttggtggcagtgccgttcgttggtgccggactcccccggtgcgtgacgaggcgc

SEQ ID NO: 317361 - DNA, 2815 bp, Homo sapiens
  misc_feature (1)..(1): n is a, c, g, or t
  misc_feature (32)..(32): n is a, c, g, or t
nctccgtcccaacttaggctaggtacgaggcngggtggttaatcggccgagggtgcgggccgcggcagccgaacaaaggagcaggggcgccgccgcagggacccgccacccacctcccggggccgcgcagcggcctctcgtctactgccaccatgaccgccaacggcacagccgaggcggtgcagatccagttcggcctcatcaactgcggcaacaagtacctgacggccgaggcgttcgggttcaaggtgaacgcgtccgccagcagcctgaagaagaagcagatctggacgctggagcagccccctgacgaggcgggcagcgcggccgtgtgcctgcgcagccacctgggccgctacctggcggcggacaaggacggcaacgtgacctgcgagcgcgaggtgcccggtcccgactgccgtttcctcatcgtggcgcacgacgacggtcgctggtcgctgcagtccgaggcgcaccggcgctacttcggcggcaccgaggaccgcctgtcctgcttcgcgcagacggtgtcccccgccgagaagtggagcgtgcacatcgccatgcaccctcaggtcaacatctacagcgtcacccgtaagcgctacgcgcacctgagcgcgcggccggccgacgagatcgccgtggaccgcgacgtgccctggggcgtcgactcgctcatcaccctcgccttccaggaccagcgctacagcgtgcagaccgccgaccaccgcttcctgcgccacgacgggcgcctggtggcgcgccccgagccggccactggctacacgctggagttccgctccggcaaggtggccttccgcgactgcgagggccgttacctggcgccgtcggggcccagcggcacgctcaaggcgggcaaggccaccaaggtgggcaaggacgagctctttgctctggagcagagctgcgcccaggtcgtgctgcaggcggccaacgagaggaacgtgtccacgcgccagggtatggacctgtctgccaatcaggacgaggagaccgaccaggagaccttccagctggagatcgaccgcgacaccaaaaagtgtgccttccgtacccacacgggcaagtactggacgctgacggccaccgggggcgtgcagtccaccgcctccagcaagaatgccagctgctactttgacatcgagtggcgtgaccggcgcatcacactgagggcgtccaatggcaagtttgtgacctccaagaagaatgggcagctggccgcctcggtggagacagcaggggactcagagctcttcctcatgaagctcatcaaccgccccatcatcgtgttccgcggggagcatggcttcatcggctgccgcaaggtcacgggcaccctggacgccaaccgctccagctatgacgtcttccagctggagttcaacgatggcgcctacaacatcaaagactccacaggcaaatactggacggtgggcagtgactccgcggtcaccagcagcggcgacactcctgtggacttcttcttcgagttctgcgactataacaaggtggccatcaaggtgggcgggcgctacctgaagggcgaccacgcaggcgtcctgaaggcctcggcggaaaccgtggaccccgcctcgctctgggagtactagggccggcccgtccttccccgcccctgcccacatggcggctcctgccaaccctccctgctaaccccttctccgccaggtgggctccagggcgggaggcaagcccccttgcctttcaaactggaaaccccagagaaaacggtgcccccacctgtcgcccctatggactccccactctcccctccgcccgggttccctactcccctcgggtcagcggctgcggcctggccctgggagggatttcagatgcccctgccctcttgtctgccacggggcgagtctggcacctctttcttctgacctcagacggctctgagccttatttctctggaagcggctaagggacggttgggggctgggagccctgggcgtgtagtgtaactggaatcttttgcctctcccagccacctcctcccagccccccaggagagctgggcacatgtcccaagcctgtcagtggccctccctggtgcactgtccccgaaacccctgcttgggaagggaagctgtcgggtgggctaggactgacccttgtggtgtttttttgggtggtggctggaaacagcccctctcccacgtggcagaggctcagcctggctcccttccctggagcggcagggcgtgacggccacagggtctgcccgctgcacgttctgccaaggtggtggtggcgggcgggtaggggtgtgggggccgtcttcctcctgtctctttcctttcaccctagcctgactggaagcagaaaatgaccaaatcagtattttttttaatgaaatattattgctggaggcgtcccaggcaagcctggctgtagtagcgagtgatctggcggggggcgtctcagcaccctccccagggggtgcatctcagccccctctttccgtccttcccgtccagccccagccctgggcctgggctgccgacacctgggccagagcccctgctgtgattggtgctccctgggcctcccgggtggatgaagccaggcgtcgccccctccgggagccctggggtgagccgccggggcccccctgctgccagcctcccccgtccccaacatgcatctcactctgggtgtcttggtcttttattttttgtaagtgtcatttgtataactctaaacgcccatgatagtagcttcaaactggaaatagcgaaataaaataactcagtctgcagcccca

SEQ ID NO: 317362 - DNA, 2832 bp, Homo sapiens
  misc_feature (2808)..(2808): n is a, c, g, or t
tagctggagcggtgtggagcgctgcggagggtgcgtgcgggccgcggcagccgaacaaaggagcaggggcgccgccgcagggacccgccacccacctcccggggccgcgcagcggcctctcgtctactgccaccatgaccgccaacggcacagccgaggcggtgcagatccagttcggcctcatcaactgcggcaacaagtacctgacggccgaggcgttcgggttcaaggtgaacgcgtccgccagcagcctgaagaagaagcagatctggacgctggagcagccccctgacgaggcgggcagcgcggccgtgtgcctgcgcagccacctgggccgctacctggcggcggacaaggacggcaacgtgacctgcgagcgcgaggtgcccggtcccgactgccgtttcctcatcgtggcgcacgacgacggtcgctggtcgctgcagtccgaggcgcaccggcgctacttcggcggcaccgaggaccgcctgtcctgcttcgcgcagacggtgtcccccgccgagaagtggagcgtgcacatcgccatgcaccctcaggtcaacatctacagcgtcacccgtaagcgctacgcgcacctgagcgcgcggccggccgacgagatcgccgtggaccgcgacgtgccctggggcgtcgactcgctcatcaccctcgccttccaggaccagcgctacagcgtgcagaccgccgaccaccgcttcctgcgccacgacgggcgcctggtggcgcgccccgagccggccactggctacacgctggagttccgctccggcaaggtggccttccgcgactgcgagggccgttacctggcgccgtcggggcccagcggcacgctcaaggcgggcaaggccaccaaggtgggcaaggacgagctctttgctctggagcagagctgcgcccaggtcgtgctgcaggcggccaacgagaggaacgtgtccacgcgccagggtatggacctgtctgccaatcaggacgaggagaccgaccaggagaccttccagctggagatcgaccgcgacaccaaaaagtgtgccttccgtacccacacgggcaagtactggacgctgacggccaccgggggcgtgcagtccaccgcctccagcaagaatgccagctgctactttgacatcgagtggcgtgaccggcgcatcacactgagggcgtccaatggcaagtttgtgacctccaagaagaatgggcagctggccgcctcggtggagacagcaggggactcagagctcttcctcatgaagctcatcaaccgccccatcatcgtgttccgcggggagcatggcttcatcggctgccgcaaggtcacgggcaccctggacgccaaccgctccagctatgacgtcttccagctggagttcaacgatggcgcctacaacatcaaagactccacaggcaaatactggacggtgggcagtgactccgcggtcaccagcagcggcgacactcctgtggacttcttcttcgagttctgcgactataacaaggtggccatcaaggtgggcgggcgctacctgaagggcgaccacgcaggcgtcctgaaggcctcggcggaaaccgtggaccccgcctcgctctgggagtactagggccggcccgtccttccccgcccctgcccacatggcggctcctgccaaccctccctgctaaccccttctccgccaggtgggctccagggcgggaggcaagcccccttgcctttcaaactggaaaccccagagaaaacggtgcccccacctgtcgcccctatggactccccactctcccctccgcccgggttccctactcccctcgggtcagcggctgcggcctggccctgggagggatttcagatgcccctgccctcttgtctgccacggggcgagtctggcacctctttcttctgacctcagacggctctgagccttatttctctggaagcggctaagggacggttgggggctgggagccctgggcgtgtagtgtaactggaatcttttgcctctcccagccacctcctcccagccccccaggagagctgggcacatgtcccaagcctgtcagtggccctccctggtgcactgtccccgaaacccctgcttgggaagggaagctgtcgggtgggctaggactgacccttgtggtgtttttttgggtggtggctggaaacagcccctctcccacgtggcagaggctcagcctggctcccttccctggagcggcagggcgtgacggccacagggtctgcccgctgcacgttctgccaaggtggtggtggcgggcgggtaggggtgtgggggccgtcttcctcctgtctctttcctttcaccctagcctgactggaagcagaaaatgaccaaatcagtattttttttaatgaaatattattgctggaggcgtcccaggcaagcctggctgtagtagcgagtgatctggcggggggcgtctcagcaccctccccagggggtgcatctcagccccctctttccgtccttcccgtccagccccagccctgggcctgggctgccgacacctgggccagagcccctgctgtgattggtgctccctgggcctcccgggtggatgaagccaggcgtcgccccctccgggagccctggggtgagccgccggggcccccctgctgccagcctcccccgtccccaacatgcatctcactctgggtgtcttggtcttttattttttgtaagtgtcatttgtataactctaaacgcccatgatagtagcttcaaactggaaatagcgaaataaaataactcagtctgcagccccaaaaaaaacacnaacacataaaacacaaaacacagg

SEQ ID NO: 317363 - DNA, 2614 bp, Homo sapiens
tagctggagcggtgtggagcgctgcggagggtgcgtgcgggccgcggcagccgaacaaaggagcaggggcgccgccgcagggacccgccacccacctcccggggccgcgcagcggcctctcgtctactgccaccatgaccgccaacggcacagccgaggcggtgcagatccagttcggcctcatcaactgcggcaacaagtacctgacggccgaggcgttcgggttcaaggtgaacgcgtccgccagcagcctgaagaagaagcagatctggacgctggagcagccccctgacgaggcgggcagcgcggccgtgtgcctgcgcagccacctgggccgctacctggcggcggacaaggacggcaacgtgacctgcgagcgcgaggtgcccggtcccgactgccgtttcctcatcgtggcgcacgacgacggtcgctggtcgctgcagtccgaggcgcaccggcgctacttcggcggcaccgaggaccgcctgtcctgcttcgcgcagacggtgtcccccgccgagaagtggagcgtgcacatcgccatgcaccctcaggtcaacatctacagcgtcacccgtaagcgctacgcgcacctgagcgcgcggccggccgacgagatcgccgtggaccgcgacgtgccctggggcgtcgactcgctcatcaccctcgccttccaggaccagcgctacagcgtgcagaccgccgaccaccgcttcctgcgccacgacgggcgcctggtggcgcgccccgagccggccactggctacacgctggagttccgctccggcaaggtggccttccgcgactgcgagggccgttacctggcgccgtcggggcccagcggcacgctcaaggcgggcaaggccaccaaggtgggcaaggacgagctctttgctctggagcagagctgcgcccaggtcgtgctgcaggcggccaacgagaggaacgtgtccacgcgccagggtatggacctgtctgccaatcaggacgaggagaccgaccaggagaccttccagctggagatcgaccgcgacaccaaaaagtgtgccttccgtacccacacgggcaagtactggacgctgacggccaccgggggcgtgcagtccaccgcctccagcaagaatgccagctgctactttgacatcgagtggcgtgaccggcgcatcacactgagggcgtccaatggcaagtttgtgacctccaagaagaatgggcagctggccgcctcggtggagacagcaggggactcagagctcttcctcatgaagctcatcaaccgccccatcatcgtgttccgcggggagcatggcttcatcggctgccgcaaggtcacgggcaccctggacgccaaccgctccagctatgacgtcttccagctggagttcaacgatggcgcctacaacatcaaagactccacaggcaaatactggacggtgggcagtgactccgcggtcaccagcagcggcgacactcctgtggacttcttcttcgagttctgcgactataacaaggtggccatcaaggtgggcgggcgctacctgaagggcgaccacgcaggcgtcctgaaggcctcggcggaaaccgtggaccccgcctcgctctgggagtactagggccggcccgtccttccccgcccctgcccacatggcggctcctgccaaccctccctgctaaccccttctccgccaggtgggctccagggcgggaggcaagcccccttgcctttcaaactggaaaccccagagaaaacggtgcccccacctgtcgcccctatggactccccactctcccctccgcccgggttccctactcccctcgggtcagcggctgcggcctggccctgggagggatttcagatgcccctgccctcttgtctgccacggggcgagtctggcacctctttcttctgacctcagacggctctgagccttatttctctggaagcggctaagggacggttgggggctgggagccctgggcgtgtagtgtaagcccctctcccacgtggcagaggctcagcctggctcccttccctggagcggcagggcgtgacggccacagggtctgcccgctgcacgttctgccaaggtggtggtggcgggcgggtaggggtgtgggggccgtcttcctcctgtctctttcctttcaccctagcctgactggaagcagaaaatgaccaaatcagtattttttttaatgaaatattattgctggaggcgtcccaggcaagcctggctgtagtagcgagtgatctggcggggggcgtctcagcaccctccccagggggtgcatctcagccccctctttccgtccttcccgtccagccccagccctgggcctgggctgccgacacctgggccagagcccctgctgtgattggtgctccctgggcctcccgggtggatgaagccaggcgtcgccccctccgggagccctggggtgagccgccggggcccccctgctgccagcctcccccgtccccaacatgcatctcactctgggtgtcttggtcttttattttttgtaagtgtcatttgtataactctaaacgcccatgatagtagcttcaaactggaaatagcgaaataaaataactcagtctgcagcccca

SEQ ID NO: 317364 - DNA, 2778 bp, Homo sapiens
agcgtggggaggggcactctccaatgcgctgcggcccggagtgactggggccgcggctgccaccgccacacgcggtgcgggcaccacgcgcagcggcctctcgtctactgccaccatgaccgccaacggcacagccgaggcggtgcagatccagttcggcctcatcaactgcggcaacaagtacctgacggccgaggcgttcgggttcaaggtgaacgcgtccgccagcagcctgaagaagaagcagatctggacgctggagcagccccctgacgaggcgggcagcgcggccgtgtgcctgcgcagccacctgggccgctacctggcggcggacaaggacggcaacgtgacctgcgagcgcgaggtgcccggtcccgactgccgtttcctcatcgtggcgcacgacgacggtcgctggtcgctgcagtccgaggcgcaccggcgctacttcggcggcaccgaggaccgcctgtcctgcttcgcgcagacggtgtcccccgccgagaagtggagcgtgcacatcgccatgcaccctcaggtcaacatctacagcgtcacccgtaagcgctacgcgcacctgagcgcgcggccggccgacgagatcgccgtggaccgcgacgtgccctggggcgtcgactcgctcatcaccctcgccttccaggaccagcgctacagcgtgcagaccgccgaccaccgcttcctgcgccacgacgggcgcctggtggcgcgccccgagccggccactggctacacgctggagttccgctccggcaaggtggccttccgcgactgcgagggccgttacctggcgccgtcggggcccagcggcacgctcaaggcgggcaaggccaccaaggtgggcaaggacgagctctttgctctggagcagagctgcgcccaggtcgtgctgcaggcggccaacgagaggaacgtgtccacgcgccagggtatggacctgtctgccaatcaggacgaggagaccgaccaggagaccttccagctggagatcgaccgcgacaccaaaaagtgtgccttccgtacccacacgggcaagtactggacgctgacggccaccgggggcgtgcagtccaccgcctccagcaagaatgccagctgctactttgacatcgagtggcgtgaccggcgcatcacactgagggcgtccaatggcaagtttgtgacctccaagaagaatgggcagctggccgcctcggtggagacagcaggggactcagagctcttcctcatgaagctcatcaaccgccccatcatcgtgttccgcggggagcatggcttcatcggctgccgcaaggtcacgggcaccctggacgccaaccgctccagctatgacgtcttccagctggagttcaacgatggcgcctacaacatcaaagactccacaggcaaatactggacggtgggcagtgactccgcggtcaccagcagcggcgacactcctgtggacttcttcttcgagttctgcgactataacaaggtggccatcaaggtgggcgggcgctacctgaagggcgaccacgcaggcgtcctgaaggcctcggcggaaaccgtggaccccgcctcgctctgggagtactagggccggcccgtccttccccgcccctgcccacatggcggctcctgccaaccctccctgctaaccccttctccgccaggtgggctccagggcgggaggcaagcccccttgcctttcaaactggaaaccccagagaaaacggtgcccccacctgtcgcccctatggactccccactctcccctccgcccgggttccctactcccctcgggtcagcggctgcggcctggccctgggagggatttcagatgcccctgccctcttgtctgccacggggcgagtctggcacctctttcttctgacctcagacggctctgagccttatttctctggaagcggctaagggacggttgggggctgggagccctgggcgtgtagtgtaactggaatcttttgcctctcccagccacctcctcccagccccccaggagagctgggcacatgtcccaagcctgtcagtggccctccctggtgcactgtccccgaaacccctgcttgggaagggaagctgtcgggtgggctaggactgacccttgtggtgtttttttgggtggtggctggaaacagcccctctcccacgtggcagaggctcagcctggctcccttccctggagcggcagggcgtgacggccacagggtctgcccgctgcacgttctgccaaggtggtggtggcgggcgggtaggggtgtgggggccgtcttcctcctgtctctttcctttcaccctagcctgactggaagcagaaaatgaccaaatcagtattttttttaatgaaatattattgctggaggcgtcccaggcaagcctggctgtagtagcgagtgatctggcggggggcgtctcagcaccctccccagggggtgcatctcagccccctctttccgtccttcccgtccagccccagccctgggcctgggctgccgacacctgggccagagcccctgctgtgattggtgctccctgggcctcccgggtggatgaagccaggcgtcgccccctccgggagccctggggtgagccgccggggcccccctgctgccagcctcccccgtccccaacatgcatctcactctgggtgtcttggtcttttattttttgtaagtgtcatttgtataactctaaacgcccatgatagtagcttcaaactggaaatagcgaaataaaataactcagtctgcagcccca

SEQ ID NO: 317365 - DNA, 3446 bp, Homo sapiens
tagctggagcggtgtggagcgctgcggagggtgcgtgcgggccgcggcagccgaacaaaggagcaggggcgccgccgcagggacccgccacccacctcccggggccgcgcagcggcctctcgtctactgccaccatgaccgccaacggcacagccgaggcggtgcagatccagttcggcctcatcaactgcggcaacaagtacctgacggccgaggcgttcgggttcaaggtgaacgcgtccgccagcagcctgaagaagaagcagatctggacgctggagcagccccctgacgaggcgggcagcgcggccgtgtgcctgcgcagccacctgggccgctacctggcggcggacaaggacggcaacgtgacctgcgagcgcgaggtgcccggtcccgactgccgtttcctcatcgtggcgcacgacgacggtcgctggtcgctgcagtccgaggcgcaccggcgctacttcggcggcaccgaggaccgcctgtcctgcttcgcgcagacggtgtcccccgccgagaagtggagcgtgcacatcgccatgcaccctcaggtcaacatctacagcgtcacccgtaagcgctacgcgcacctgagcgcgcggccggccgacgagatcgccgtggaccgcgacgtgccctggggcgtcgactcgctcatcaccctcgccttccaggaccagcgctacagcgtgcagaccgccgaccaccgcttcctgcgccacgacgggcgcctggtggcgcgccccgagccggccactggctacacgctggagttccgctccggcaaggtggccttccgcgactgcgagggccgttacctggcgccgtcggggcccagcggcacgctcaaggcgggcaaggccaccaaggtgggcaaggacgagctctttgctctggagcagagctgcgcccaggtcgtgctgcaggcggccaacgagaggaacgtgtccacgcgccagggtatggacctgtctgccaatcaggacgaggagaccgaccaggagaccttccagctggagatcgaccgcgacaccaaaaagtgtgccttccgtacccacacgggcaagtactggacgctgacggccaccgggggcgtgcagtccaccgcctccagcaagaatgccagctgctactttgacatcgagtggcgtgaccggcgcatcacactgagggcgtccaatggcaagtttgtgacctccaagaagaatgggcagctggccgcctcggtggagacagcaggggactcagagctcttcctcatgaagctcatcaaccgccccatcatcgtgttccgcggggagcatggcttcatcggctgccgcaaggtcacgggcaccctggacgccaaccgctccagctatgacgtcttccagctggagttcaacgatggcgcctacaacatcaaagactccacaggcaaatactggacggtgggcagtgactccgcggtcaccagcagcggcgacactcctgtggacttcttcttcgagttctgcgactataacaaggtggccatcaaggtgggcgggcgctacctgaagggcgaccacgcaggcgtcctgaaggcctcggcggaaaccgtggaccccgcctcgctctgggagtactagggccggcccgtccttccccgcccctgcccacatggcggctcctgccaaccctccctgctaaccccttctccgccaggtgggctccagggcgggaggcaagcccccttgcctttcaaactggaaaccccagagaaaacggtgcccccacctgtcgcccctatggactccccactctcccctccgcccgggttccctactcccctcgggtcagcggctgcggcctggccctgggagggatttcagatgcccctgccctcttgtctgccacggggcgagtctggcacctctttcttctgacctcagacggctctgagccttatttctctggaagcggctaagggacggttgggggctgggagccctgggcgtgtagtgtaactggaatcttttgcctctcccagccacctcctcccagccccccaggagagctgggcacatgtcccaagcctgtcagtggccctccctggtgcactgtccccgaaacccctgcttgggaagggaagctgtcgggtgggctaggactgacccttgtggtgtttttttgggtggtggctggaaacagcccctctcccacgtggcagaggctcagcctggctcccttccctggagcggcagggcgtgacggccacagggtctgcccgctgcacgttctgccaaggtggtggtggcgggcgggtaggggtgtgggggccgtcttcctcctgtctctttcctttcaccctagcctgactggaagcagaaaatgaccaaatcagtattttttttaatgaaatattattgctggaggcgtcccaggcaagcctggctgtagtagcgagtgatctggcggggggcgtctcagcaccctccccagggggtgcatctcagccccctctttccgtccttcccgtccagccccagccctgggcctgggctgccgacacctgggccagagcccctgctgtgattggtgctccctgggcctcccgggtggatgaagccaggcgtcgccccctccgggagccctggggtgagccgccggggcccccctgctgccagcctcccccgtccccaacatgcatctcactctgggtgtcttggtcttttattttttgtaagtgtcatttgtataactctaaacgcccatgatagtagcttcaaactggaaatagcgaaataaaataactcagtctgcagccccaaaaaaaaaaaacaaaaaaaaaaaatccggggccttaatgccgggggggggaacaaaggggtcacggaatgggcccggggccataggcggatacaacagaccaagttttctggacacacgggggacaacacacgccggaacaccaaaaacgggagcggaataaagccagaaaacaccaggtcaccggcttaatgagacgcgacaaaaggaagagagaacccagacacaacaagaacaacaagagacaaacaacaacgacacaacaaacacacacagaaaaacaaaacaacacacaacaagacaacaccacaaacacacacaaccaacagacacaatacaccaacacaaccctcaccacacaggacaagagaaaaaaagaacaaggaaagcagcagcacagaggaacccgaggcgacgagaacgacagacagagagaagacaaagcaaaagaagcaggagaagccagacgagaaacagacggacagtaacgagcacgacacggaggagagccagaggagaggagagagcaagcacaaggcagaccaagagaagagagacagaaaaggggacggaagagagcaaaagaacaaaaaggagcggaacggaggtacgaagaaaaaggacaaaaagaagagcaaggacgaaaggcg

SEQ ID NO: 317366 - DNA, 2922 bp, Homo sapiens
tagctggagcggtgtggagcgctgcggagggtgcgtgcgggccgcggcagccgaacaaaggagcaggggcgccgccgcagggacccgccacccacctcccggggccgcgcagcggcctctcgtctactgccaccatgaccgccaacggcacagccgaggcggtgcagatccagttcggcctcatcaactgcggcaacaagtacctgacggccgaggcgttcgggttcaaggtgaacgcgtccgccagcagcctgaagaagaagcagatctggacgctggagcagccccctgacgaggcgggcagcgcggccgtgtgcctgcgcagccacctgggccgctacctggcggcggacaaggacggcaacgtgacctgcgagcgcgaggtgcccggtcccgactgccgtttcctcatcgtggcgcacgacgacggtcgctggtcgctgcagtccgaggcgcaccggcgctacttcggcggcaccgaggaccgcctgtcctgcttcgcgcagacggtgtcccccgccgagaagtggagcgtgcacatcgccatgcaccctcaggtcaacatctacagcgtcacccgtaagcgctacgcgcacctgagcgcgcggccggccgacgagatcgccgtggaccgcgacgtgccctggggcgtcgactcgctcatcaccctcgccttccaggaccagcgctacagcgtgcagaccgccgaccaccgcttcctgcgccacgacgggcgcctggtggcgcgccccgagccggccactggctacacgctggagttccgctccggcaaggtggccttccgcgactgcgagggccgttacctggcgccgtcggggcccagcggcacgctcaaggcgggcaaggccaccaaggtgggcaaggacgagctctttgctctggagcagagctgcgcccaggtcgtgctgcaggcggccaacgagaggaacgtgtccacgcgccagggtatggacctgtctgccaatcaggacgaggagaccgaccaggagaccttccagctggagatcgaccgcgacaccaaaaagtgtgccttccgtacccacacgggcaagtactggacgctgacggccaccgggggcgtgcagtccaccgcctccagcaagaatgccagctgctactttgacatcgagtggcgtgaccggcgcatcacactgagggcgtccaatggcaagtttgtgacctccaagaagaatgggcagctggccgcctcggtggagacagcaggggactcagagctcttcctcatgaagctcatcaaccgccccatcatcgtgttccgcggggagcatggcttcatcggctgccgcaaggtcacgggcaccctggacgccaaccgctccagctatgacgtcttccagctggagttcaacgatggcgcctacaacatcaaagactccacaggcaaatactggacggtgggcagtgactccgcggtcaccagcagcggcgacactcctgtggacttcttcttcgagttctgcgactataacaaggtggccatcaaggtgggcgggcgctacctgaagggcgaccacgcaggcgtcctgaaggcctcggcggaaaccgtggaccccgcctcgctctgggagtactagggccggcccgtccttccccgcccctgcccacatggcggctcctgccaaccctccctgctaaccccttctccgccaggtgggctccagggcgggaggcaagcccccttgcctttcaaactggaaaccccagagaaaacggtgcccccacctgtcgcccctatggactccccactctcccctccgcccgggttccctactcccctcgggtcagcggctgcggcctggccctgggagggatttcagatgcccctgccctcttgtctgccacggggcgagtctggcacctctttcttctgacctcagacggctctgagccttatttctctggaagcggctaagggacggttgggggctgggagccctgggcgtgtagtgtaactggaatcttttgcctctcccagccacctcctcccagccccccaggagagctgggcacatgtcccaagcctgtcagtggccctccctggtgcactgtccccgaaacccctgcttgggaagggaagctgtcgggtgggctaggactgacccttgtggtgtttttttgggtggtggctggaaacagcccctctcccacgtggcagaggctcagcctggctcccttccctggagcggcagggcgtgacggccacagggtctgcccgctgcacgttctgccaaggtggtggtggcgggcgggtaggggtgtgggggccgtcttcctcctgtctctttcctttcaccctagcctgactggaagcagaaaatgaccaaatcagtattttttttaatgaaatattattgctggaggcgtcccaggcaagcctggctgtagtagcgagtgatctggcggggggcgtctcagcaccctccccagggggtgcatctcagccccctctttccgtccttcccgtccagccccagccctgggcctgggctgccgacacctgggccagagcccctgctgtgattggtgctccctgggcctcccgggtggatgaagccaggcgtcgccccctccgggagccctggggtgagccgccggggcccccctgctgccagcctcccccgtccccaacatgcatctcactctgggtgtcttggtcttttattttttgtaagtgtcatttgtataactctaaacgcccatgatagtagcttcaaactggaaatagcgaaataaaataactcagtctgcagccccagcgccagaagaaaatatggaaatatatgactaatcatcatgaaagatgaaaatattcacaatctcatgaacatgcaagcacagaaagtttaactaggaagcaggaaacaacgtcaggaccccatt

SEQ ID NO: 317367 - DNA, 2818 bp, Homo sapiens
tagctggagcggtgtggagcgctgcggagggtgcgtgcgggccgcggcagccgaacaaaggagcaggggcgccgccgcagggacccgccacccacctcccggggccgcgcagcggcctctcgtctactgccaccatgaccgccaacggcacagccgaggcggtgcagatccagttcggcctcatcaactgcggcaacaagtacctgacggccgaggcgttcgggttcaaggtgaacgcgtccgccagcagcctgaagaagaagcagatctggacgctggagcagccccctgacgaggcgggcagcgcggccgtgtgcctgcgcagccacctgggccgctacctggcggcggacaaggacggcaacgtgacctgcgagcgcgaggtgcccggtcccgactgccgtttcctcatcgtggcgcacgacgacggtcgctggtcgctgcagtccgaggcgcaccggcgctacttcggcggcaccgaggaccgcctgtcctgcttcgcgcagacggtgtcccccgccgagaagtggagcgtgcacatcgccatgcaccctcaggtcaacatctacagcgtcacccgtaagcgctacgcgcacctgagcgcgcggccggccgacgagatcgccgtggaccgcgacgtgccctggggcgtcgactcgctcatcaccctcgccttccaggaccagcgctacagcgtgcagaccgccgaccaccgcttcctgcgccacgacgggcgcctggtggcgcgccccgagccggccactggctacacgctggagttccgctccggcaaggtggccttccgcgactgcgagggccgttacctggcgccgtcggggcccagcggcacgctcaaggcgggcaaggccaccaaggtgggcaaggacgagctctttgctctggagcagagctgcgcccaggtcgtgctgcaggcggccaacgagaggaacgtgtccacgcgccagggtatggacctgtctgccaatcaggacgaggagaccgaccaggagaccttccagctggagatcgaccgcgacaccaaaaagtgtgccttccgtacccacacgggcaagtactggacgctgacggccaccgggggcgtgcagtccaccgcctccagcaagaatgccagctgctactttgacatcgagtggcgtgaccggcgcatcacactgagggcgtccaatggcaagtttgtgacctccaagaagaatgggcagctggccgcctcggtggagacagcaggggactcagagctcttcctcatgaagctcatcaaccgccccatcatcgtgttccgcggggagcatggcttcatcggctgccgcaaggtcacgggcaccctggacgccaaccgctccagctatgacgtcttccagctggagttcaacgatggcgcctacaacatcaaagactccacaggcaaatactggacggtgggcagtgactccgcggtcaccagcagcggcgacactcctgtggacttcttcttcgagttctgcgactataacaaggtggccatcaaggtgggcgggcgctacctgaagggcgaccacgcaggcgtcctgaaggcctcggcggaaaccgtggaccccgcctcgctctgggagtactagggccggcccgtccttccccgcccctgcccacatggcggctcctgccaaccctccctgctaaccccttctccgccaggtgggctccagggcgggaggcaagcccccttgcctttcaaactggaaaccccagagaaaacggtgcccccacctgtcgcccctatggactccccactctcccctccgcccgggttccctactcccctcgggtcagcggctgcggcctggccctgggagggatttcagatgcccctgccctcttgtctgccacggggcgagtctggcacctctttcttctgacctcagacggctctgagccttatttctctggaagcggctaagggacggttgggggctgggagccctgggcgtgtagtgtaactggaatcttttgcctctcccagccacctcctcccagccccccaggagagctgggcacatgtcccaagcctgtcagtggccctccctggtgcactgtccccgaaacccctgcttgggaagggaagctgtcgggtgggctaggactgacccttgtggtgtttttttgggtggtggctggaaacagcccctctcccacgtggcagaggctcagcctggctcccttccctggagcggcagggcgtgacggccacagggtctgcccgctgcacgttctgccaaggtggtggtggcgggcgggtaggggtgtgggggccgtcttcctcctgtctctttcctttcaccctagcctgactggaagcagaaaatgaccaaatcagtattttttttaatgaaatattattgctggaggcgtcccaggcaagcctggctgtagtagcgagtgatctggcggggggcgtctcagcaccctccccagggggtgcatctcagccccctctttccgtccttcccgtccagccccagccctgggcctgggctgccgacacctgggccagagcccctgctgtgattggtgctccctgggcctcccgggtggatgaagccaggcgtcgccccctccgggagccctggggtgagccgccggggcccccctgctgccagcctcccccgtccccaacatgcatctcactctgggtgtcttggtcttttattttttgtaagtgtcccttgcatagctaattgcgcccggccaaggagcttttgactggccatcatcccctgacctaccttagtgttggtacagcagcaagcgacaccaaaaaaaa

SEQ ID NO: 317368 - DNA, 2753 bp, Homo sapiens
tagctggagcggtgtggagcgctgcggagggtgcgtgcgggccgcggcagccgaacaaaggagcaggggcgccgccgcagggacccgccacccacctcccggggccgcgcagcggcctctcgtctactgccaccatgaccgccaacggcacagccgaggcggtgcagatccagttcggcctcatcaactgcggcaacaagtacctgacggccgaggcgttcgggttcaaggtgaacgcgtccgccagcagcctgaagaagaagcagatctggacgctggagcagccccctgacgaggcgggcagcgcggccgtgtgcctgcgcagccacctgggccgctacctggcggcggacaaggacggcaacgtgacctgcgagcgcgaggtgcccggtcccgactgccgtttcctcatcgtggcgcacgacgacggtcgctggtcgctgcagtccgaggcgcaccggcgctacttcggcggcaccgaggaccgcctgtcctgcttcgcgcagacggtgtcccccgccgagaagtggagcgtgcacatcgccatgcaccctcaggtcaacatctacagcgtcacccgtaagcgctacgcgcacctgagcgcgcggccggccgacgagatcgccgtggaccgcgacgtgccctggggcgtcgactcgctcatcaccctcgccttccaggaccagcgctacagcgtgcagaccgccgaccaccgcttcctgcgccacgacgggcgcctggtggcgcgccccgagccggccactggctacacgctggagttccgctccggcaaggtggccttccgcgactgcgagggccgttacctggcgccgtcggggcccagcggcacgctcaaggcgggcaaggccaccaaggtgggcaaggacgagctctttgctctggagcagagctgcgcccaggtcgtgctgcaggcggccaacgagaggaacgtgtccacgcgccagggtatggacctgtctgccaatcaggacgaggagaccgaccaggagaccttccagctggagatcgaccgcgacaccaaaaagtgtgccttccgtacccacacgggcaagtactggacgctgacggccaccgggggcgtgcagtccaccgcctccagcaagaatgccagctgctactttgacatcgagtggcgtgaccggcgcatcacactgagggcgtccaatggcaagtttgtgacctccaagaagaatgggcagctggccgcctcggtggagacagcaggggactcagagctcttcctcatgaagctcatcaaccgccccatcatcgtgttccgcggggagcatggcttcatcggctgccgcaaggtcacgggcaccctggacgccaaccgctccagctatgacgtcttccagctggagttcaacgatggcgcctacaacatcaaagactccacaggcaaatactggacggtgggcagtgactccgcggtcaccagcagcggcgacactcctgtggacttcttcttcgagttctgcgactataacaaggtggccatcaaggtgggcgggcgctacctgaagggcgaccacgcaggcgtcctgaaggcctcggcggaaaccgtggaccccgcctcgctctgggagtactagggccggcccgtccttccccgcccctgcccacatggcggctcctgccaaccctccctgctaaccccttctccgccaggtgggctccagggcgggaggcaagcccccttgcctttcaaactggaaaccccagagaaaacggtgcccccacctgtcgcccctatggactccccactctcccctccgcccgggttccctactcccctcgggtcagcggctgcggcctggccctgggagggatttcagatgcccctgccctcttgtctgccacggggcgagtctggcacctctttcttctgacctcagacggctctgagccttatttctctggaagcggctaagggacggttgggggctgggagccctgggcgtgtagtgtaactggaatcttttgcctctcccagccacctcctcccagccccccaggagagctgggcacatgtcccaagcctgtcagtggccctccctggtgcactgtccccgaaacccctgcttgggaagggaagctgtcgggtgggctaggactgacccttgtggtgtttttttgggtggtggctggaaacagcccctctcccacgtggcagaggctcagcctggctcccttccctggagcggcagggcgtgacggccacagggtctgcccgctgcacgttctgccaaggtggtggtggcgggcgggtaggggtgtgggggccgtcttcctcctgtctctttcctttcaccctagcctgactggaagcagaaaatgaccaaatcagtattttttttaatgaaatattattgctggaggcgtcccaggcaagcctggctgtagtagcgagtgatctggcggggggcgtctcagcaccctccccagggggtgcatctcagccccctctttccgtccttcccgtccagccccagccctgggcctgggctgccgacacctgggccagagcccctgctgtgattggtgctccctgggcctcccgggtggatgaagccaggcgtctgccagcctcccccgtccccaacatgcatctcactctgggtgtcttggtcttttattttttgtaagtgtcatttgtataactctaaacgcccatgatagtagcttcaaactggaaatagcgaaataaaataactcagtctgcagcccca

SEQ ID NO: 317369 - DNA, 1859 bp, Homo sapiens
tagctggagcggtgtggagcgctgcggagggtgcgtgcgggccgcggcagccgaacaaaggagcaggggcgccgccgcagggacccgccacccacctcccggggccgcgcagcggcctctcgtctactgccaccatgaccgccaacggcacagccgaggcggtgcagatccagttcggcctcatcaactgcggcaacaagtacctgacggccgaggcgttcgggttcaaggtgaacgcgtccgccagcagcctgaagaagaagcagatctggacgctggagcagccccctgacgaggcgggcagcgcggccgtgtgcctgcgcagccacctgggccgctacctggcggcggacaaggacggcaacgtgacctgcgagcgcgaggtgcccggtcccgactgccgtttcctcatcgtggcgcacgacgacggtcgctggtcgctgcagtccgaggcgcaccggcgctacttcggcggcaccgaggaccgcctgtcctgcttcgcgcagacggtgtcccccgccgagaagtggagcgtgcacatcgccatgcaccctcaggtcaacatctacagcgtcacccgtaagcgctacgcgcacctgagcgcgcggccggccgacgagatcgccgtggaccgcgacgtgccctggggcgtcgactcgctcatcaccctcgccttccaggaccagcgctacagcgtgcagaccgccgaccaccgcttcctgcgccacgacgggcgcctggtggcgcgccccgagccggccactggctacacgctggagttccgctccggcaaggtggccttccgcgactgcgagggccgttacctggcgccgtcggggcccagcggcacgctcaaggcgggcaaggccaccaaggtgggcaaggacgagctctttgctctggagcagagctgcgcccaggtcgtgctgcaggcggccaacgagaggaacgtgtccacgcgccagggtatggacctgtctgccaatcaggacgaggagaccgaccaggagaccttccagctggagatcgaccgcgacaccaaaaagtgtgccttccgtacccacacgggcaagtactggacgctgacggccaccgggggcgtgcagtccaccgcctccagcaagaatgccagctgctactttgacatcgagtggcgtgaccggcgcatcacactgagggcgtccaatggcaagtttgtgacctccaagaagaatgggcagctggccgcctcggtggagacagcaggggactcagagctcttcctcatgaagctcatcaaccgccccatcatcgtgttccgcggggagcatggcttcatcggctgccgcaaggtcacgggcaccctggacgccaaccgctccagctatgacgtcttcctcctgtctctttcctttcaccctagcctgactggaagcagaaaatgaccaaatcagtattttttttaatgaaatattattgctggaggcgtcccaggcaagcctggctgtagtagcgagtgatctggcggggggcgtctcagcaccctccccagggggtgcatctcagccccctctttccgtccttcccgtccagccccagccctgggcctgggctgccgacacctgggccagagcccctgctgtgattggtgctccctgggcctcccgggtggatgaagccaggcgtcgccccctccgggagccctggggtgagccgccggggcccccctgctgccagcctcccccgtccccaacatgcatctcactctgggtgtcttggtcttttattttttgtaagtgtcatttgtataactctaaacgcccatgatagtagcttcaaactggaaatagcgaaataaaataactcagtctgcagcccca

SEQ ID NO: 317370 - DNA, 2273 bp, Homo sapiens
tagctggagcggtgtggagcgctgcggagggtgcgtgcgggccgcggcagccgaacaaaggagcaggggcgccgccgcagggacccgccacccacctcccggggccgcgcagcggcctctcgtctactgccaccatgaccgccaacggcacagccgaggcggtgcagatccagttcggcctcatcaactgcggcaacaagtacctgacggccgaggcgttcgggttcaaggtgaacgcgtccgccagcagcctgaagaagaagcagatctggacgctggagcagccccctgacgaggcgggcagcgcggccgtgtgcctgcgcagccacctgggccgctacctggcggcggacaaggacggcaacgtgacctgcgagcgcgaggtgcccggtcccgactgccgtttcctcatcgtggcgcacgacgacggtcgctggtcgctgcagtccgaggcgcaccggcgctacttcggcggcaccgaggaccgcctgtcctgcttcgcgcagacggtgtcccccgccgagaagtggagcgtgcacatcgccatgcaccctcaggtcaacatctacagcgtcacccgtaagcgctacgcgcacctgagcgcgcggccggccgacgagatcgccgtggaccgcgacgtgccctggggcgtcgactcgctcatcaccctcgccttccaggaccagcgctacagcgtgcagaccgccgaccaccgcttcctgcgccacgacgggcgcctggtggcgcgccccgagccggccactggctacacgctggagttccgctccggcaaggtggccttccgcgactgcgagggccgttacctggcgccgtcggggcccagcggcacgctcaaggcgggcaaggccaccaaggtgggcaaggacgagctctttgctctggagcagagctgcgcccaggtcgtgctgcaggcggccaacgagaggaacgtgtccacgcgccagggtatggacctgtctgccaatcaggacgaggagaccgaccaggagaccttccagctggagatcgaccgcgacaccaaaaagtgtgccttccgtacccacacgggcaagtactggacgctgacggccaccgggggcgtgcagtccaccgcctccagcaagaatgccagctgctactttgacatcgagtggcgtgaccggcgcatcacactgagggcgtccaatggcaagtttgtgacctccaagaagaatgggcagctggccgcctcggtggagacagcaggggactcagagctcttcctcatgaagctcatcaaccgccccatcatcgtgttccgcggggagcatggcttcatcggctgccgcaaggtcacgggcaccctggacgccaaccgctccagctatgacgtcttccagctggagttcaacgatggcgcctacaacatcaaagactccacaggcaaatactggacggtgggcagtgactccgcggtcaccagcagcggcgacactcctgtggacttcttcttcgagttctgcgactataacaaggtggccatcaaggtgggcgggcgctacctgaagggcgaccacgcaggcgtcctgaaggcctcggcggaaaccgtggaccccgcctcgctctgggagtactagggccggcccgtccttccccgcccctgcccacatggcggctcctgccaaccctccctgctaaccccttctccgccaggtgggctccagggcgggaggcaagcccccttgcctttcaaactggaaaccccagagaaaacggtgcccccacctgtcgcccctatggactccccactctcccctccgcccgggttccctactcccctcgggtcagcggctgcggcctggccctgggagggatttcagatgcccctgccctcttgtctgccacggggcgagtctggcacctctttcttctgacctcagacggctctgagccttatttctctggaagcggctaagggacggttgggggctgggagccctgggcgtgtagtgtaactggaatcttttgcctctcccagccacctcctcccagccccccaggagagctgggcacatgtcccaagcctgtcagtggccctccctggtgcactgtccccgaaacccctgcttgggaagggaagctgtcgggtgggctaggactgacccttgtggtgtttttttgggtggtggctggaaacagcccctctcccacgtggcagaggctaggacagccactggcgaggctaggacagccactggcgaggctaggacagccactggcgaggctaggacagc

SEQ ID NO: 317371 - DNA, 2108 bp, Homo sapiens
tagctggagcggtgtggagcgctgcggagggtgcgtgcgggccgcggcagccgaacaaaggagcaggggcgccgccgcagggacccgccacccacctcccggggccgcgcagcggcctctcgtctactgccaccatgaccgccaacggcacagccgaggcggtgcagatccagttcggcctcatcaactgcggcaacaagtacctgacggccgaggcgttcgggttcaaggtgaacgcgtccgccagcagcctgaagaagaagcagatctggacgctggagcagccccctgacgaggcgggcagcgcggccgtgtgcctgcgcagccacctgggccgctacctggcggcggacaaggacggcaacgtgacctgcgagcgcgaggtgcccggtcccgactgccgtttcctcatcgtggcgcacgacgacggtcgctggtcgctgcagtccgaggcgcaccggcgctacttcggcggcaccgaggaccgcctgtcctgcttcgcgcagacggtgtcccccgccgagaagtggagcgtgcacatcgccatgcaccctcaggtcaacatctacagcgtcacccgtaagcgctacgcgcacctgagcgcgcggccggccgacgagatcgccgtggaccgcgacgtgccctggggcgtcgactcgctcatcaccctcgccttccaggaccagcgctacagcgtgcagaccgccgaccaccgcttcctgcgccacgacgggcgcctggtggcgcgccccgagccggccactggctacacgctggagttccgctccggcaaggtggccttccgcgactgcgagggccgttacctggcgccgtcggggcccagcggcacgctcaaggcgggcaaggccaccaaggtgggcaaggacgagctctttgctctggagcagagctgcgcccaggtcgtgctgcaggcggccaacgagaggaacgtgtccacgcgccagggtatggacctgtctgccaatcaggacgaggagaccgaccaggagaccttccagctggagatcgaccgcgacaccaaaaagtgtgccttccgtacccacacgggcaagtactggacgctgacggccaccgggggcgtgcagtccaccgcctccagcaagaatgccagctgctactttgacatcgagtggcgtgaccggcgcatcacactgagggcgtccaatggcaagtttgtgacctccaagaagaatgggcagctggccgcctcggtggagacagcaggggactcagagctcttcctcatgaagctcatcaaccgccccatcatcgtgttccgcggggagcatggcttcatcggctgccgcaaggtcacgggcaccctggacgccaaccgctccagctatgacgtcttccagctggagttcaacgatggcgcctacaacatcaaagactccacaggcaaatactggacggtgggcagtgactccgcggtcaccagcagcggcgacactcctgtggacttcttcttcgagttctgcgactataacaaggtggccatcaaggtgggcgggcgctacctgaagggcgaccacgcaggcgtcctgaaggcctcggcggaaaccgtggaccccgcctcgctctgggagtactagggccggcccgtccttccccgcccctgcccacatggcggctcctgccaaccctccctgctaaccccttctccgccaggtgggctccagggcgggaggcaagcccccttgcctttcaaactggaaaccccagagaaaacggtgcccccacctgtcgcccctatggactccccactctcccctccgcccgggttccctactcccctcgggtcagcggctgcggcctggccctgggagggatttcagatgcccctgccctcttgtctgccacggggcgagtctggcacctctttcttctgaccgccccctccgggagccctggggtgagccgccggggcccccctgctgccagcctcccccgtccccaacatgcatctcactctgggtgtcttggtcttttattttttgtaagtgtcatttgtataactctaaacgcccatgatagtagcttcaaactggaaatagcgaaataaaataactcagtctgcagcccca

SEQ ID NO: 317372 - DNA, 2061 bp, Homo sapiens
tagctggagcggtgtggagcgctgcggagggtgcgtgcgggccgcggcagccgaacaaaggagcaggggcgccgccgcagggacccgccacccacctcccggggccgcgcagcggcctctcgtctactgccaccatgaccgccaacggcacagccgaggcggtgcagatccagttcggcctcatcaactgcggcaacaagtacctgacggccgaggcgttcgggttcaaggtgaacgcgtccgccagcagcctgaagaagaagcagatctggacgctggagcagccccctgacgaggcgggcagcgcggccgtgtgcctgcgcagccacctgggccgctacctggcggcggacaaggacggcaacgtgacctgcgagcgcgaggtgcccggtcccgactgccgtttcctcatcgtggcgcacgacgacggtcgctggtcgctgcagtccgaggcgcaccggcgctacttcggcggcaccgaggaccgcctgtcctgcttcgcgcagacggtgtcccccgccgagaagtggagcgtgcacatcgccatgcaccctcaggtcaacatctacagcgtcacccgtaagcgctacgcgcacctgagcgcgcggccggccgacgagatcgccgtggaccgcgacgtgccctggggcgtcgactcgctcatcaccctcgccttccaggaccagcgctacagcgtgcagaccgccgaccaccgcttcctgcgccacgacgggcgcctggtggcgcgccccgagccggccactggctacacgctggagttccgctccggcaaggtggccttccgcgactgcgagggccgttacctggcgccgtcggggcccagcggcacgctcaaggcgggcaaggccaccaaggtgggcaaggacgagctctttgctctggagcagagctgcgcccaggtcgtgctgcaggcggccaacgagaggaacgtgtccacgcgccagggtatggacctgtctgccaatcaggacgaggagaccgaccaggagaccttccagctggagatcgaccgcgacaccaaaaagtgtgccttccgtacccacacgggcaagtactggacgctgacggccaccgggggcgtgcagtccaccgcctccagcaagaatgccagctgctactttgacatcgagtggcgtgaccggcgcatcacactgagggcgtccaatggcaagtttgtgacctccaagaagaatgggcagctggccgcctcggtggagacagcaggggactcagagctcttcctcatgaagctcatcaaccgccccatcatcgtgttccgcggggagcatggcttcatcggctgccgcaaggtcacgggcaccctggacgccaaccgctccagctatgacgtcttccagctggagttcaacgatggcgcctacaacatcaaagactccacaggcaaatactggacggtgggcagtgactccgcggtcaccagcagcggcgacactcctgtggacttcttcttcgagttctgcgactataacaaggtggccatcaaggtgggcgggcgctacctgaagggcgaccacgcaggcgtcctgaaggcctcggcggaaaccgtggaccccgcctcgctctgggagtactagggccggcccgtccttccccgcccctgcccacatggcggctcctgccaaccctccctgctaaccccttctccgccaggtgggctccagggcgggaggcaagcccccttgcctttcaaactggaaaccccagagaaaacggtgcccccacctgtcgcccctatggactccccactctcccctccgcccgggttccctactcccctcgggtcagcggctgcggcctggccctgggagggatttcagatgcccctcgccccctccgggagccctggggtgagccgccggggcccccctgctgccagcctcccccgtccccaacatgcatctcactctgggtgtcttggtcttttattttttgtaagtgtcatttgtataactctaaacgcccatgatagtagcttcaaactggaaatagcgaaataaaataactcagtctgcagcccca

SEQ ID NO: 317373 - DNA, 2017 bp, Homo sapiens
tagctggagcggtgtggagcgctgcggagggtgcgtgcgggccgcggcagccgaacaaaggagcaggggcgccgccgcagggacccgccacccacctcccggggccgcgcagcggcctctcgtctactgccaccatgaccgccaacggcacagccgaggcggtgcagatccagttcggcctcatcaactgcggcaacaagtacctgacggccgaggcgttcgggttcaaggtgaacgcgtccgccagcagcctgaagaagaagcagatctggacgctggagcagccccctgacgaggcgggcagcgcggccgtgtgcctgcgcagccacctgggccgctacctggcggcggacaaggacggcaacgtgacctgcgagcgcgaggtgcccggtcccgactgccgtttcctcatcgtggcgcacgacgacggtcgctggtcgctgcagtccgaggcgcaccggcgctacttcggcggcaccgaggaccgcctgtcctgcttcgcgcagacggtgtcccccgccgagaagtggagcgtgcacatcgccatgcaccctcaggtcaacatctacagcgtcacccgtaagcgctacgcgcacctgagcgcgcggccggccgacgagatcgccgtggaccgcgacgtgccctggggcgtcgactcgctcatcaccctcgccttccaggaccagcgctacagcgtgcagaccgccgaccaccgcttcctgcgccacgacgggcgcctggtggcgcgccccgagccggccactggctacacgctggagttccgctccggcaaggtggccttccgcgactgcgagggccgttacctggcgccgtcggggcccagcggcacgctcaaggcgggcaaggccaccaaggtgggcaaggacgagctctttgctctggagcagagctgcgcccaggtcgtgctgcaggcggccaacgagaggaacgtgtccacgcgccagggtatggacctgtctgccaatcaggacgaggagaccgaccaggagaccttccagctggagatcgaccgcgacaccaaaaagtgtgccttccgtacccacacgggcaagtactggacgctgacggccaccgggggcgtgcagtccaccgcctccagcaagaatgccagctgctactttgacatcgagtggcgtgaccggcgcatcacactgagggcgtccaatggcaagtttgtgacctccaagaagaatgggcagctggccgcctcggtggagacagcaggggactcagagctcttcctcatgaagctcatcaaccgccccatcatcgtgttccgcggggagcatggcttcatcggctgccgcaaggtcacgggcaccctggacgccaaccgctccagctatgacgtcttccagctggagttcaacgatggcgcctacaacatcaaagactccacaggcaaatactggacggtgggcagtgactccgcggtcaccagcagcggcgacactcctgtggacttcttcttcgagttctgcgactataacaaggtggccatcaaggtgggcgggcgctacctgaagggcgaccacgcaggcgtcctgaaggcctcggcggaaaccgtggaccccgcctcgctctgggagtactagggccggcccgtccttccccgcccctgcccacatggcggctcctgccaaccctccctgctaaccccttctccgccaggtgggctccagggcgggaggcaagcccccttgcctttcaaactggaaaccccagagaaaacggtgcccccacctgtcgcccctatggactccccactctcccctccgcccgggttccctactcccctcgggtcagcggctgcggcctggccctgggagggatttcagatgcccctctgccagcctcccccgtccccaacatgcatctcactctgggtgtcttggtcttttattttttgtaagtgtcatttgtataactctaaacgcccatgatagtagcttcaaactggaaatagcgaaataaaataactcagtctgcagcccca

SEQ ID NO: 317374 - DNA, 2443 bp, Homo sapiens
  misc_feature (1)..(1): n is a, c, g, or t
  misc_feature (32)..(32): n is a, c, g, or t
nctccgtcccaacttaggctaggtacgaggcngggtggttaatcggccgaggcctcatcgtggcgcacgacgacggtcgctggtcgctgcagtccgaggcgcaccggcgctacttcggcggcaccgaggaccgcctgtcctgcttcgcgcagacggtgtcccccgccgagaagtggagcgtgcacatcgccatgcaccctcaggtcaacatctacagcgtcacccgtaagcgctacgcgcacctgagcgcgcggccggccgacgagatcgccgtggaccgcgacgtgccctggggcgtcgactcgctcatcaccctcgccttccaggaccagcgctacagcgtgcagaccgccgaccaccgcttcctgcgccacgacgggcgcctggtggcgcgccccgagccggccactggctacacgctggagttccgctccggcaaggtggccttccgcgactgcgagggccgttacctggcgccgtcggggcccagcggcacgctcaaggcgggcaaggccaccaaggtgggcaaggacgagctctttgctctggagcagagctgcgcccaggtcgtgctgcaggcggccaacgagaggaacgtgtccacgcgccagggtatggacctgtctgccaatcaggacgaggagaccgaccaggagaccttccagctggagatcgaccgcgacaccaaaaagtgtgccttccgtacccacacgggcaagtactggacgctgacggccaccgggggcgtgcagtccaccgcctccagcaagaatgccagctgctactttgacatcgagtggcgtgaccggcgcatcacactgagggcgtccaatggcaagtttgtgacctccaagaagaatgggcagctggccgcctcggtggagacagcaggggactcagagctcttcctcatgaagctcatcaaccgccccatcatcgtgttccgcggggagcatggcttcatcggctgccgcaaggtcacgggcaccctggacgccaaccgctccagctatgacgtcttccagctggagttcaacgatggcgcctacaacatcaaagactccacaggcaaatactggacggtgggcagtgactccgcggtcaccagcagcggcgacactcctgtggacttcttcttcgagttctgcgactataacaaggtggccatcaaggtgggcgggcgctacctgaagggcgaccacgcaggcgtcctgaaggcctcggcggaaaccgtggaccccgcctcgctctgggagtactagggccggcccgtccttccccgcccctgcccacatggcggctcctgccaaccctccctgctaaccccttctccgccaggtgggctccagggcgggaggcaagcccccttgcctttcaaactggaaaccccagagaaaacggtgcccccacctgtcgcccctatggactccccactctcccctccgcccgggttccctactcccctcgggtcagcggctgcggcctggccctgggagggatttcagatgcccctgccctcttgtctgccacggggcgagtctggcacctctttcttctgacctcagacggctctgagccttatttctctggaagcggctaagggacggttgggggctgggagccctgggcgtgtagtgtaactggaatcttttgcctctcccagccacctcctcccagccccccaggagagctgggcacatgtcccaagcctgtcagtggccctccctggtgcactgtccccgaaacccctgcttgggaagggaagctgtcgggtgggctaggactgacccttgtggtgtttttttgggtggtggctggaaacagcccctctcccacgtggcagaggctcagcctggctcccttccctggagcggcagggcgtgacggccacagggtctgcccgctgcacgttctgccaaggtggtggtggcgggcgggtaggggtgtgggggccgtcttcctcctgtctctttcctttcaccctagcctgactggaagcagaaaatgaccaaatcagtattttttttaatgaaatattattgctggaggcgtcccaggcaagcctggctgtagtagcgagtgatctggcggggggcgtctcagcaccctccccagggggtgcatctcagccccctctttccgtccttcccgtccagccccagccctgggcctgggctgccgacacctgggccagagcccctgctgtgattggtgctccctgggcctcccgggtggatgaagccaggcgtcgccccctccgggagccctggggtgagccgccggggcccccctgctgccagcctcccccgtccccaacatgcatctcactctgggtgtcttggtcttttattttttgtaagtgtcatttgtataactctaaacgcccatgatagtagcttcaaactggaaatagcgaaataaaataactcagtctgcagcccca

SEQ ID NO: 317375 - DNA, 2855 bp, Homo sapiens
tagctggagcggtgtggagcgctgcggagggtgcgtgcgggccgcggcagccgaacaaaggagcaggggcgccgccgcagggacccgccacccacctcccggggccgcgcagcggcctctcgtctactgccaccatgaccgccaacggcacagccgaggcggtgcagatccagttcggcctcatcaactgcggcaacaagtacctgacggccgaggcgttcgggttcaaggtgaacgcgtccgccagcagcctgaagaagaagcagatctggacgctggagcagccccctgacgaggcgggcagcgcggccgtgtgcctgcgcagccacctgggccgctacctggcggcggacaaggacggcaacgtgacctgcgagctgctgagtgttgccctgtgtccctgacttgcctagtttcgctcccatcctggttgtgcctgccactggacctggaactgtggtctgcattgtggttctgcgttgcgatggtcctgatgtgctgacacctgtgctggctagcttctgtgctgtgcacctgatggaccgcctgtcctgcttcgcgcagacggtgtcccccgccgagaagtggagcgtgcacatcgccatgcaccctcaggtcaacatctacagcgtcacccgtaagcgctacgcgcacctgagcgcgcggccggccgacgagatcgccgtggaccgcgacgtgccctggggcgtcgactcgctcatcaccctcgccttccaggaccagcgctacagcgtgcagaccgccgaccaccgcttcctgcgccacgacgggcgcctggtggcgcgccccgagccggccactggctacacgctggagttccgctccggcaaggtggccttccgcgactgcgagggccgttacctggcgccgtcggggcccagcggcacgctcaaggcgggcaaggccaccaaggtgggcaaggacgagctctttgctctggagcagagctgcgcccaggtcgtgctgcaggcggccaacgagaggaacgtgtccacgcgccagggtatggacctgtctgccaatcaggacgaggagaccgaccaggagaccttccagctggagatcgaccgcgacaccaaaaagtgtgccttccgtacccacacgggcaagtactggacgctgacggccaccgggggcgtgcagtccaccgcctccagcaagaatgccagctgctactttgacatcgagtggcgtgaccggcgcatcacactgagggcgtccaatggcaagtttgtgacctccaagaagaatgggcagctggccgcctcggtggagacagcaggggactcagagctcttcctcatgaagctcatcaaccgccccatcatcgtgttccgcggggagcatggcttcatcggctgccgcaaggtcacgggcaccctggacgccaaccgctccagctatgacgtcttccagctggagttcaacgatggcgcctacaacatcaaagactccacaggcaaatactggacggtgggcagtgactccgcggtcaccagcagcggcgacactcctgtggacttcttcttcgagttctgcgactataacaaggtggccatcaaggtgggcgggcgctacctgaagggcgaccacgcaggcgtcctgaaggcctcggcggaaaccgtggaccccgcctcgctctgggagtactagggccggcccgtccttccccgcccctgcccacatggcggctcctgccaaccctccctgctaaccccttctccgccaggtgggctccagggcgggaggcaagcccccttgcctttcaaactggaaaccccagagaaaacggtgcccccacctgtcgcccctatggactccccactctcccctccgcccgggttccctactcccctcgggtcagcggctgcggcctggccctgggagggatttcagatgcccctgccctcttgtctgccacggggcgagtctggcacctctttcttctgacctcagacggctctgagccttatttctctggaagcggctaagggacggttgggggctgggagccctgggcgtgtagtgtaactggaatcttttgcctctcccagccacctcctcccagccccccaggagagctgggcacatgtcccaagcctgtcagtggccctccctggtgcactgtccccgaaacccctgcttgggaagggaagctgtcgggtgggctaggactgacccttgtggtgtttttttgggtggtggctggaaacagcccctctcccacgtggcagaggctcagcctggctcccttccctggagcggcagggcgtgacggccacagggtctgcccgctgcacgttctgccaaggtggtggtggcgggcgggtaggggtgtgggggccgtcttcctcctgtctctttcctttcaccctagcctgactggaagcagaaaatgaccaaatcagtattttttttaatgaaatattattgctggaggcgtcccaggcaagcctggctgtagtagcgagtgatctggcggggggcgtctcagcaccctccccagggggtgcatctcagccccctctttccgtccttcccgtccagccccagccctgggcctgggctgccgacacctgggccagagcccctgctgtgattggtgctccctgggcctcccgggtggatgaagccaggcgtcgccccctccgggagccctggggtgagccgccggggcccccctgctgccagcctcccccgtccccaacatgcatctcactctgggtgtcttggtcttttattttttgtaagtgtcatttgtataactctaaacgcccatgatagtagcttcaaactggaaatagcgaaataaaataactcagtctgcagcccca

SEQ ID NO: 317376 - DNA, 1607 bp, Homo sapiens
tagctggagcggtgtggagcgctgcggagggtgcgtgcgggccgcggcagccgaacaaaggagcaggggcgccgccgcagggacccgccacccacctcccggggccgcgcagcggcctctcgtctactgccaccatgaccgccaacggcacagccgaggcggtgcagatccagttcggcctcatcaactgcggcaacaagtacctgacggccgaggcgttcgggttcaaggtgaacgcgtccgccagcagcctgaagaagaagcagatctggacgctggagcagccccctgacgaggcgggcagcgcggccgtgtgcctgcgcagccacctgggccgctacctggcggcggacaaggacggcaacgtgacctgcgagcgcgaggtgcccggtcccgactgccgtttcctcatcgtggcgcacgacgacggtcgctggtcgctgcagtccgaggcgcaccggcgctacttcggcggcaccgaggaccgcctgtcctgcttcgcgcagacggtgtcccccgccgagaagtggagcgtgcacatcgccatgcaccctcaggtcaacatctacagcgtcacccgtaagcgctacgcgcacctgagcgcgcggccggccgacgagatcgccgtggaccgcgacgtgccctggggcgtcgactcgctcatcaccctcgccttccaggaccagcgctacagcgtgcagaccgccgaccaccgcttcctgcgccacgacgggcgcctggtggcgcgccccgagccggccactggctacacgctggagttccgctccggcaaggtggccttccgcgactgcgagggccgttacctggcgccgtcggggcccagcggcacgctcaaggcgggcaaggccaccaaggtgggcaaggacgagctctttgctctggagcagagctgcgcccaggtcgtgctgcaggcggccaacgagaggaacgtgtccacgcgccagggtatggacctgtctgccaatcaggacgaggagaccgaccaggagaccttccagctggagatcgaccgcgacaccaaaaagtgtgccttccgtacccacacgggcaagtactggacgctgacggccaccgggggcgtgcagtccaccgcctccagcaagaatgccagctgctactttgacatcgagtggcgtgaccggcgcatcacactgagggcgtccaatggcaagtttgtgacctccaagaagaatgggcagctggccgcctcggtggagacagcaggggactcagagctcttcctcatgaagctcatcaaccgccccatcatcgtgttccgcggggagcatggcttcatcggctgccgcaaggtcacgggcaccctggacgccaaccgctccagctatgacgtcttccagctggagttcaacgatggcgcctacaacatcaaagcgccccctccgggagccctggggtgagccgccggggcccccctgctgccagcctcccccgtccccaacatgcatctcactctgggtgtcttggtcttttattttttgtaagtgtcatttgtataactctaaacgcccatgatagtagcttcaaactggaaatagcgaaataaaataactcagtctgcagcccca

SEQ ID NO: 317377 - DNA, 1374 bp, Homo sapiens
tagctggagcggtgtggagcgctgcggagggtgcgtgcgggccgcggcagccgaacaaaggagcaggggcgccgccgcagggacccgccacccacctcccggggccgcgcagcggcctctcgtctactgccaccatgaccgccaacggcacagccgaggcggtgcagatccagttcggcctcatcaactgcggcaacaagtacctgacggccgaggcgttcgggttcaaggtgaacgcgtccgccagcagcctgaagaagaagcagatctggacgctggagcagccccctgacgaggcgggcagcgcggccgtgtgcctgcgcagccacctgggccgctacctggcggcggacaaggacggcaacgtgacctgcgagcgcgaggtgcccggtcccgactgccgtttcctcatcgtggcgcacgacgacggtcgctggtcgctgcagtccgaggcgcaccggcgctacttcggcggcaccgaggaccgcctgtcctgcttcgcgcagacggtgtcccccgccgagaagtggagcgtgcacatcgccatgcaccctcaggtcaacatctacagcgtcacccgtaagcgctacgcgcacctgagcgcgcggccggccgacgagatcgccgtggaccgcgacgtgccctggggcgtcgactcgctcatcaccctcgccttccaggaccagcgctacagcgtgcagaccgccgaccaccgcttcctgcgccacgacgggcgcctggtggcgcgccccgagccggccactggctacacgctggagttccgctccggcaaggtggccttccgcgactgcgagggccgttacctggcgccgtcggggcccagcggcacgctcaaggcgggcaaggccaccaaggtgggcaaggacgagctctttgctctggagcagagctgcgcccaggtcgtgctgcaggcggccaacgagaggaacgtgtccacgcgccagggtatggacctgtctgccaatcaggacgaggagaccgaccaggagaccttccagctggagatcgaccgcgacaccaaaaagtgtgccttccgtacccacacgggcaagtactggacgctgacggccaccgggggcgtgcagtccaccgcctccagcaagaatgccagctgctactttgacatcgagtggcgtgaccggcgcatcacactgagggcgtccaatggcaagtttgtgacctccaagaagaatgggcagctggccgcctcggtggagacagcagggggactcaagaagcttcttcccctccaagttgaaaggcttccattcaaaacgcgggcccccaattccattcggtgttaccagccgggggaagctagtggttcaatcggggctgcccgcaaagggtcca

SEQ ID NO: 317378 - DNA, 1145 bp, Homo sapiens
tagctggagcggtgtggagcgctgcggagggtgcgtgcgggccgcggcagccgaacaaaggagcaggggcgccgccgcagggacccgccacccacctcccggggccgcgcagcggcctctcgtctactgccaccatgaccgccaacggcacagccgaggcggtgcagatccagttcggcctcatcaactgcggcaacaagtacctgacggccgaggcgttcgggttcaaggtgaacgcgtccgccagcagcctgaagaagaagcagatctggacgctggagcagccccctgacgaggcgggcagcgcggccgtgtgcctgcgcagccacctgggccgctacctggcggcggacaaggacggcaacgtgacctgcgagcgcgaggtgcccggtcccgactgccgtttcctcatcgtggcgcacgacgacggtcgctggtcgctgcagtccgaggcgcaccggcgctacttcggcggcaccgaggaccgcctgtcctgcttcgcgcagacggtgtcccccgccgagaagtggagcgtgcacatcgccatgcaccctcaggtcaacatctacagcgtcacccgtaagcgctacgcgcacctgagcgcgcggccggccgacgagatcgccgtggaccgcgacgtgccctggggcgtcgactcgctcatcaccctcgccttccaggaccagcgctacagcgtgcagaccgccgaccaccgcttcctgcgccacgacgggcgcctggtggcgcgccccgagccggccactggctacacgctggagttccgctccggcaaggtggccttccgcgactgcgagggccgttacctggcgccgtcggggcccagcggcacgctcaaggcgggcaaggccaccaaggtgggcaaggacgagctctttgctctggagcagagctgcgcccaggtcgtgctgcaggcggccaacgagaggaacgtgtccacgcgccagggtatggacctgtctgccaatcaggacgaggagaccgaccaggagaccttccagctggagatcgaccgcgacaccaaaaagtgtgccttccgtacccacacgggcaagtactggacgctgacggccacggcacggggcgggaaccacgctcaaaaagcaccgcattgcatatggggacgc

SEQ ID NO: 317379 - DNA, 1480 bp, Homo sapiens
  misc_feature (1)..(1): n is a, c, g, or t
  misc_feature (32)..(32): n is a, c, g, or t
nctccgtcccaacttaggctaggtacgaggcngggtggttaatcggccgaggcgtcttccagctggagttcaacgatggcgcctacaacatcaaagactccacaggcaaatactggacggtgggcagtgactccgcggtcaccagcagcggcgacactcctgtggacttcttcttcgagttctgcgactataacaaggtggccatcaaggtgggcgggcgctacctgaagggcgaccacgcaggcgtcctgaaggcctcggcggaaaccgtggaccccgcctcgctctgggagtactagggccggcccgtccttccccgcccctgcccacatggcggctcctgccaaccctccctgctaaccccttctccgccaggtgggctccagggcgggaggcaagcccccttgcctttcaaactggaaaccccagagaaaacggtgcccccacctgtcgcccctatggactccccactctcccctccgcccgggttccctactcccctcgggtcagcggctgcggcctggccctgggagggatttcagatgcccctgccctcttgtctgccacggggcgagtctggcacctctttcttctgacctcagacggctctgagccttatttctctggaagcggctaagggacggttgggggctgggagccctgggcgtgtagtgtaactggaatcttttgcctctcccagccacctcctcccagccccccaggagagctgggcacatgtcccaagcctgtcagtggccctccctggtgcactgtccccgaaacccctgcttgggaagggaagctgtcgggtgggctaggactgacccttgtggtgtttttttgggtggtggctggaaacagcccctctcccacgtggcagaggctcagcctggctcccttccctggagcggcagggcgtgacggccacagggtctgcccgctgcacgttctgccaaggtggtggtggcgggcgggtaggggtgtgggggccgtcttcctcctgtctctttcctttcaccctagcctgactggaagcagaaaatgaccaaatcagtattttttttaatgaaatattattgctggaggcgtcccaggcaagcctggctgtagtagcgagtgatctggcggggggcgtctcagcaccctccccagggggtgcatctcagccccctctttccgtccttcccgtccagccccagccctgggcctgggctgccgacacctgggccagagcccctgctgtgattggtgctccctgggcctcccgggtggatgaagccaggcgtcgccccctccgggagccctggggtgagccgccggggcccccctgctgccagcctcccccgtccccaacatgcatctcactctgggtgtcttggtcttttattttttgtaagtgtcatttgtataactctaaacgcccatgatagtagcttcaaactggaaatagcgaaataaaataactcagtctgcagcccca

SEQ ID NO: 317380 - DNA, 1671 bp, Homo sapiens
gctggctcgaactcctgacctcaagtgatccgcccacctcagcctcccaaagtgctgggattacaggcgtgagccactgcggccgagcagaacacgttctaggacccttgttcatgtgtccatcatggacaggaggacgtgcgggccatagggaccctggctcattccggagccgggactggagggtggggcgtcacccttgggaacacccgtgcccaccctccgctgcccagggtaggggtggggagccaggctttgggccccacttgataaagtcccctccccagactccacaggcaaatactggacggtgggcagtgactccgcggtcaccagcagcggcgacactcctgtggacttcttcttcgagttctgcgactataacaaggtggccatcaaggtgggcgggcgctacctgaagggcgaccacgcaggcgtcctgaaggcctcggcggaaaccgtggaccccgcctcgctctgggagtactagggccggcccgtccttccccgcccctgcccacatggcggctcctgccaaccctccctgctaaccccttctccgccaggtgggctccagggcgggaggcaagcccccttgcctttcaaactggaaaccccagagaaaacggtgcccccacctgtcgcccctatggactccccactctcccctccgcccgggttccctactcccctcgggtcagcggctgcggcctggccctgggagggatttcagatgcccctgccctcttgtctgccacggggcgagtctggcacctctttcttctgacctcagacggctctgagccttatttctctggaagcggctaagggacggttgggggctgggagccctgggcgtgtagtgtaactggaatcttttgcctctcccagccacctcctcccagccccccaggagagctgggcacatgtcccaagcctgtcagtggccctccctggtgcactgtccccgaaacccctgcttgggaagggaagctgtcgggtgggctaggactgacccttgtggtgtttttttgggtggtggctggaaacagcccctctcccacgtggcagaggctcagcctggctcccttccctggagcggcagggcgtgacggccacagggtctgcccgctgcacgttctgccaaggtggtggtggcgggcgggtaggggtgtgggggccgtcttcctcctgtctctttcctttcaccctagcctgactggaagcagaaaatgaccaaatcagtattttttttaatgaaatattattgctggaggcgtcccaggcaagcctggctgtagtagcgagtgatctggcggggggcgtctcagcaccctccccagggggtgcatctcagccccctctttccgtccttcccgtccagccccagccctgggcctgggctgccgacacctgggccagagcccctgctgtgattggtgctccctgggcctcccgggtggatgaagccaggcgtcgccccctccgggagccctggggtgagccgccggggcccccctgctgccagcctcccccgtccccaacatgcatctcactctgggtgtcttggtcttttattttttgtaagtgtcatttgtataactctaaacgcccatgatagtagcttcaaactggaaatagcgaaataaaataactcagtctgcagcccca

SEQ ID NO: 317381 - DNA, 2469 bp, Homo sapiens
gccggacgttgtggctgaagcctgtaatcccagcggtttaagaggccaaggcctaagcccaggtgttggagaccagcctgagcaacacagcgcaatgtgtcatttaggcctgtgacgtcggaactttattatttgaacatttaaaaataaatgaatccaagagcttgagtcacttggccaaaaatgcccaggaggaaaaggccaagtcaggtaccccggctctagagctactaactgatcgccggagaccctgggccttggaagaagtcgcctccccagatctctaagcaggccgcgcgaccctcgagtctcaggtaagcgggaaatcccacttcacaagaaagcccctctctccgaggcacgggcgcatgcgcgggtcggccacccgctggggccgcggggccgccgctctggcccgcgtggggcagtcgtccgcgtctcgctcatgatgacgcacgtccggggcggtgggggaaggcaagatggcggcgcccatggaggtggccgtgtgtacggactcggcggccccgatgtggagctgcatcgtgtgggaacttcactcgggcgccaacctgctcacctaccgcggcggccaggcgggaccccgcggcctggcgctgctcaatggcgagtatctgctggcggcgcagctgggcaagaattacatcagcgcctgggagctccagcggaaggaccagctccagcagaagatcatgtgccccgggcctgtcacctgtctgactgcatcacccaatggtctctacgtcctggcaggagttgcagaaagcatccacctgtgggaggtctccaccgggaaccttctggtcatcctgagtcgacactaccaggacgtctcctgccttcagttcacaggggacagcagccacttcatctcagggggcaaggactgcctggtgctggtttggagcctctgcagcgtgctgcaggccgacccctccaggattccggcgcccaggcacgtctggtctcaccacacgctccccatcacggacctgcactgcggctttgggggccccctggcccgggtggccacctcctcactggaccagacggtgaagctatgggaggtctcctcgggggagctgctgctctccgtcctctttgacgtgtccatcatggcagtgaccatggacctggctgagcaccatatgttctgcgggggcagtgagggctccatcttccaggtcgacctcttcacctggcccggacagagggagaggagcttccacccagagcaggacgccgggaaggtcttcaaagggcacaggaaccaggtgacttgcctgtcagtgtccactgacggcagcgtgctgctctcaggctcccacgacgagaccgtgcgcctctgggacgtgcagagcaagcagtgcatccggacggtggccctcaaaggcccagtcaccaatgccgccatcctgctggcgcccgtcagcatgctgagctcagacttcaggcccagcctgccgctgccccacttcaacaagcacctgctgggcgccgagcacggggacgagccgcgccacgggggcctcactctgcgcctgggcctccaccagcagggctcggagcccagctacctggaccgcacggagcagctgcaggccgtcctgtgcagcaccatggagaagagcgtgctcggcggccaggaccagctgcgcgtccgtgtgacggagctggaggacgaggtgcgcaacctgcgcaagatcaatcgggacctgttcgacttctccacgcgcttcatcacgcggccggccaagtgaggcccggagaccccggcccgaggcgcccaggcctgagccccatgcctcccagcaaccagggcccgcgggtgtggcccccaccagcccaggcctggactctcctcagttctgtgtcgtgttcgggtttttcctctgtgactgggccgtcttggtgtctcgtggcacgcgtcacagtggtgctagtctgtttttaacaaaagaggatgaaaagccaaaaaaaaaaaaaaaaaaccaaaaaaaaaaaaacacataaacacaacacacaaaccacacagaacaaactacacacatacaatcatccctcacaaactccgtcaccaccccacaccaatcattcatctctaatacacattcccactccctcctgctcaccctctctcccctcactccaccccttcctctctctctactcctccacctcgttgctctggtcaccacaccgccctccctctcctctgcttaactcactcctcctccactccccacccccctccaacaagtagagatatctctcactctccttttctctcgaccactagtcttctcccctctctcgtccccacagctccccctatcctctctcatagtctcttccctccccctcaccacctcccctctccttctctcccttcccctctttccctcctcttctcttcccatttcactcccttcgctctcacccccacca

SEQ ID NO: 317382 - DNA, 2400 bp, Homo sapiens
gccggacgttgtggctgaagcctgtaatcccagcggtttaagaggccaaggcctaagcccaggtgttggagaccagcctgagcaacacagcgcaatgtgtcatttaggcctgtgacgtcggaactttattatttgaacatttaaaaataaatgaatccaagagcttgagtcacttggccaaaaatgcccaggaggaaaaggccaagtcaggtaccccggctctagagctactaactgatcgccggagaccctgggccttggaagaagtcgcctccccagatctctaagcaggccgcgcgaccctcgagtctcaggtaagcgggaaatcccacttcacaagaaagcccctctctccgaggcacgggcgcatgcgcgggtcggccacccgctggggccgcggggccgccgctctggcccgcgtggggcagtcgtccgcgtctcgctcatgatgacgcacgtccggggcggtgggggaaggcaagatggcggcgcccatggaggtggccgtgtgtacggactcggcggccccgatgtggagctgcatcgtgtgggaacttcactcgggcgccaacctgctcacctaccgcggcggccaggcgggaccccgcggcctggcgctgctcaatggcgagtatctgctggcggcgcagctgggcaagaattacatcagcgcctgggagctccagcggaaggaccagctccagcagaagatcatgtgccccgggcctgtcacctgtctgactgcatcacccaatggtctctacgtcctggcaggagttgcagaaagcatccacctgtgggaggtctccaccgggaaccttctggtcatcctgagtcgacactaccaggacgtctcctgccttcagttcacaggggacagcagccacttcatctcagggggcaaggactgcctggtgctggtttggagcctctgcagcgtgctgcaggccgacccctccaggattccggcgcccaggcacgtctggtctcaccacacgctccccatcacggacctgcactgcggctttgggggccccctggcccgggtggccacctcctcactggaccagacggtgaagctatgggaggtctcctcgggggagctgctgctctccgtcctctttgacgtgtccatcatggcagtgaccatggacctggctgagcaccatatgttctgcgggggcagtgagggctccatcttccaggtcgacctcttcacctggcccggacagagggagaggagcttccacccagagcaggacgccgggaaggtcttcaaagggcacaggaaccaggtgacttgcctgtcagtgtccactgacggcagcgtgctgctctcaggctcccacgacgagaccgtgcgcctctgggacgtgcagagcaagcagtgcatccggacggtggccctcaaaggcccagtcaccaatgccgccatcctgctggcgcccgtcagcatgctgagctcagacttcaggcccagcctgccgctgccccacttcaacaagcacctgctgggcgccgagcacggggacgagccgcgccacgggggcctcactctgcgcctgggcctccaccagcagagcgtgctcggcggccaggaccagctgcgcgtccgtgtgacggagctggaggacgaggtgcgcaacctgcgcaagatcaatcgggacctgttcgacttctccacgcgcttcatcacgcggccggccaagtgaggcccggagaccccggcccgaggcgcccaggcctgagccccatgcctcccagcaaccagggcccgcgggtgtggcccccaccagcccaggcctggactctcctcagttctgtgtcgtgttcgggtttttcctctgtgactgggccgtcttggtgtctcgtggcacgcgtcacagtggtgctagtctgtttttaacaaaagaggatgaaaagccaaaaaaaaaaaaaaaaaaccaaaaaaaaaaaaacacataaacacaacacacaaaccacacagaacaaactacacacatacaatcatccctcacaaactccgtcaccaccccacaccaatcattcatctctaatacacattcccactccctcctgctcaccctctctcccctcactccaccccttcctctctctctactcctccacctcgttgctctggtcaccacaccgccctccctctcctctgcttaactcactcctcctccactccccacccccctccaacaagtagagatatctctcactctccttttctctcgaccactagtcttctcccctctctcgtccccacagctccccctatcctctctcatagtctcttccctccccctcaccacctcccctctccttctctcccttcccctctttccctcctcttctcttcccatttcactcccttcgctctcacccccacca

SEQ ID NO: 317383 - DNA, 2013 bp, Homo sapiens
  misc_feature (26)..(26): n is a, c, g, or t
aacttcggctaggtacgggctgggtntgaatcggccgaggggaggtggccgtgtgtacggactcggcggccccgatgtggagctgcatcgtgtgggaacttcactcgggcgccaacctgctcacctaccgcggcggccaggcgggaccccgcggcctggcgctgctcaatggcgagtatctgctggcggcgcagctgggcaagaattacatcagcgcctgggagctccagcggaaggaccagctccagcagaagatcatgtgccccgggcctgtcacctgtctgactgcatcacccaatggtctctacgtcctggcaggagttgcagaaagcatccacctgtgggaggtctccaccgggaaccttctggtcatcctgagtcgacactaccaggacgtctcctgccttcagttcacaggggacagcagccacttcatctcagggggcaaggactgcctggtgctggtttggagcctctgcagcgtgctgcaggccgacccctccaggattccggcgcccaggcacgtctggtctcaccacacgctccccatcacggacctgcactgcggctttgggggccccctggcccgggtggccacctcctcactggaccagacggtgaagctatgggaggtctcctcgggggagctgctgctctccgtcctctttgacgtgtccatcatggcagtgaccatggacctggctgagcaccatatgttctgcgggggcagtgagggctccatcttccaggtcgacctcttcacctggcccggacagagggagaggagcttccacccagagcaggacgccgggaaggtcttcaaagggcacaggaaccaggtgacttgcctgtcagtgtccactgacggcagcgtgctgctctcaggctcccacgacgagaccgtgcgcctctgggacgtgcagagcaagcagtgcatccggacggtggccctcaaaggcccagtcaccaatgccgccatcctgctggcgcccgtcagcatgctgagctcagacttcaggcccagcctgccgctgccccacttcaacaagcacctgctgggcgccgagcacggggacgagccgcgccacgggggcctcactctgcgcctgggcctccaccagcagggctcggagcccagctacctggaccgcacggagcagctgcaggccgtcctgtgcagcaccatggagaagagcgtgctcggcggccaggaccagctgcgcgtccgtgtgacggagctggaggacgaggtgcgcaacctgcgcaagatcaatcgggacctgttcgacttctccacgcgcttcatcacgcggccggccaagtgaggcccggagaccccggcccgaggcgcccaggcctgagccccatgcctcccagcaaccagggcccgcgggtgtggcccccaccagcccaggcctggactctcctcagttctgtgtcgtgttcgggtttttcctctgtgactgggccgtcttggtgtctcgtggcacgcgtcacagtggtgctagtctgtttttaacaaaagaggatgaaaagccaaaaaaaaaaaaaaaaaaccaaaaaaaaaaaaacacataaacacaacacacaaaccacacagaacaaactacacacatacaatcatccctcacaaactccgtcaccaccccacaccaatcattcatctctaatacacattcccactccctcctgctcaccctctctcccctcactccaccccttcctctctctctactcctccacctcgttgctctggtcaccacaccgccctccctctcctctgcttaactcactcctcctccactccccacccccctccaacaagtagagatatctctcactctccttttctctcgaccactagtcttctcccctctctcgtccccacagctccccctatcctctctcatagtctcttccctccccctcaccacctcccctctccttctctcccttcccctctttccctcctcttctcttcccatttcactcccttcgctctcacccccacca

SEQ ID NO: 317384 - DNA, 2015 bp, Homo sapiens
aaagcaggctgtccgccggattcgttcgtcgcacgcgtcgctggaggtggccgtgtgtacggactcggcggccccgatgtggagctgcatcgtgtgggaacttcactcgggcgccaacctgctcacctaccgcggcggccaggcgggaccccgcggcctggcgctgctcaatggcgagtatctgctggcggcgcagctgggcaagaattacatcagcgcctgggagctccagcggaaggaccagctccagcagaagatcatgtgccccgggcctgtcacctgtctgactgcatcacccaatggtctctacgtcctggcaggagttgcagaaagcatccacctgtgggaggtctccaccgggaaccttctggtcatcctgagtcgacactaccaggacgtctcctgccttcagttcacaggggacagcagccacttcatctcagggggcaaggactgcctggtgctggtttggagcctctgcagcgtgctgcaggccgacccctccaggattccggcgcccaggcacgtctggtctcaccacacgctccccatcacggacctgcactgcggctttgggggccccctggcccgggtggccacctcctcactggaccagacggtgaagctatgggaggtctcctcgggggagctgctgctctccgtcctctttgacgtgtccatcatggcagtgaccatggacctggctgagcaccatatgttctgcgggggcagtgagggctccatcttccaggtcgacctcttcacctggcccggacagagggagaggagcttccacccagagcaggacgccgggaaggtcttcaaagggcacaggaaccaggtgacttgcctgtcagtgtccactgacggcagcgtgctgctctcaggctcccacgacgagaccgtgcgcctctgggacgtgcagagcaagcagtgcatccggacggtggccctcaaaggcccagtcaccaatgccgccatcctgctggcgcccgtcagcatgctgagctcagacttcaggcccagcctgccgctgccccacttcaacaagcacctgctgggcgccgagcacggggacgagccgcgccacgggggcctcactctgcgcctgggcctccaccagcagggctcggagcccagctacctggaccgcacggagcagctgcaggccgtcctgtgcagcaccatggagaagagcgtgctcggcggccaggaccagctgcgcgtccgtgtgacggagctggaggacgaggtgcgcaacctgcgcaagatcaatcgggacctgttcgacttctccacgcgcttcatcacgcggccggccaagtgaggcccggagaccccggcccgaggcgcccaggcctgagccccatgcctcccagcaaccagggcccgcgggtgtggcccccaccagcccaggcctggactctcctcagttctgtgtcgtgttcgggtttttcctctgtgactgggccgtcttggtgtctcgtggcacgcgtcacagtggtgctagtctgtttttaacaaaagaggatgaaaagccaaaaaaaaaaaaaaaaaaccaaaaaaaaaaaaacacataaacacaacacacaaaccacacagaacaaactacacacatacaatcatccctcacaaactccgtcaccaccccacaccaatcattcatctctaatacacattcccactccctcctgctcaccctctctcccctcactccaccccttcctctctctctactcctccacctcgttgctctggtcaccacaccgccctccctctcctctgcttaactcactcctcctccactccccacccccctccaacaagtagagatatctctcactctccttttctctcgaccactagtcttctcccctctctcgtccccacagctccccctatcctctctcatagtctcttccctccccctcaccacctcccctctccttctctcccttcccctctttccctcctcttctcttcccatttcactcccttcgctctcacccccacca

SEQ ID NO: 317385 - DNA, 2091 bp, Homo sapiens
gccggacgttgtggctgaagcctgtaatcccagcggtttaagaggccaaggcctaagcccaggtgttggagaccagcctgagcaacacagcgcaatgtgtcatttaggcctgtgacgtcggaactttattatttgaacatttaaaaataaatgaatccaagagcttgagtcacttggccaaaaatgcccaggaggaaaaggccaagtcaggtaccccggctctagagctactaactgatcgccggagaccctgggccttggaagaagtcgcctccccagatctctaagcaggccgcgcgaccctcgagtctcaggaccagctccagcagaagatcatgtgccccgggcctgtcacctgtctgactgcatcacccaatggtctctacgtcctggcaggagttgcagaaagcatccacctgtgggaggtctccaccgggaaccttctggtcatcctgagtcgacactaccaggacgtctcctgccttcagttcacaggggacagcagccacttcatctcagggggcaaggactgcctggtgctggtttggagcctctgcagcgtgctgcaggccgacccctccaggattccggcgcccaggcacgtctggtctcaccacacgctccccatcacggacctgcactgcggctttgggggccccctggcccgggtggccacctcctcactggaccagacggtgaagctatgggaggtctcctcgggggagctgctgctctccgtcctctttgacgtgtccatcatggcagtgaccatggacctggctgagcaccatatgttctgcgggggcagtgagggctccatcttccaggtcgacctcttcacctggcccggacagagggagaggagcttccacccagagcaggacgccgggaaggtcttcaaagggcacaggaaccaggtgacttgcctgtcagtgtccactgacggcagcgtgctgctctcaggctcccacgacgagaccgtgcgcctctgggacgtgcagagcaagcagtgcatccggacggtggccctcaaaggcccagtcaccaatgccgccatcctgctggcgcccgtcagcatgctgagctcagacttcaggcccagcctgccgctgccccacttcaacaagcacctgctgggcgccgagcacggggacgagccgcgccacgggggcctcactctgcgcctgggcctccaccagcagggctcggagcccagctacctggaccgcacggagcagctgcaggccgtcctgtgcagcaccatggagaagagcgtgctcggcggccaggaccagctgcgcgtccgtgtgacggagctggaggacgaggtgcgcaacctgcgcaagatcaatcgggacctgttcgacttctccacgcgcttcatcacgcggccggccaagtgaggcccggagaccccggcccgaggcgcccaggcctgagccccatgcctcccagcaaccagggcccgcgggtgtggcccccaccagcccaggcctggactctcctcagttctgtgtcgtgttcgggtttttcctctgtgactgggccgtcttggtgtctcgtggcacgcgtcacagtggtgctagtctgtttttaacaaaagaggatgaaaagccaaaaaaaaaaaaaaaaaaccaaaaaaaaaaaaacacataaacacaacacacaaaccacacagaacaaactacacacatacaatcatccctcacaaactccgtcaccaccccacaccaatcattcatctctaatacacattcccactccctcctgctcaccctctctcccctcactccaccccttcctctctctctactcctccacctcgttgctctggtcaccacaccgccctccctctcctctgcttaactcactcctcctccactccccacccccctccaacaagtagagatatctctcactctccttttctctcgaccactagtcttctcccctctctcgtccccacagctccccctatcctctctcatagtctcttccctccccctcaccacctcccctctccttctctcccttcccctctttccctcctcttctcttcccatttcactcccttcgctctcacccccacca

SEQ ID NO: 317386 - DNA, 2956 bp, Homo sapiens
gccggacgttgtggctgaagcctgtaatcccagcggtttaagaggccaaggcctaagcccaggtgttggagaccagcctgagcaacacagcgcaatgtgtcatttaggcctgtgacgtcggaactttattatttgaacatttaaaaataaatgaatccaagagcttgagtcacttggccaaaaatgcccaggaggaaaaggccaagtcaggtaccccggctctagagctactaactgatcgccggagaccctgggccttggaagaagtcgcctccccagatctctaagcaggccgcgcgaccctcgagtctcaggtaagcgggaaatcccacttcacaagaaagcccctctctccgaggcacgggcgcatgcgcgggtcggccacccgctggggccgcggggccgccgctctggcccgcgtggggcagtcgtccgcgtctcgctcatgatgacgcacgtccggggcggtgggggaaggcaagatggcggcgcccatggaggtggccgtgtgtacggactcggcggccccgatgtggagctgcatcgtgtgggaacttcactcgggcgccaacctgctcacctaccgcggcggccaggcgggaccccgcggcctggcgctgctcaatggcgagtatctgctggcggcgcagctgggcaagaattacatcagcgcctgggagctccagcggaaggaccagctccagcagaagatcatgtgccccgggcctgtcacctgtctgactgcatcacccaatggtctctacgtcctggcaggagttgcagaaagcatccacctgtgggaggtctccaccgggaaccttctggtcatcctgagtcgacactaccaggacgtctcctgccttcagttcacaggggacagcagccacttcatctcagggggcaaggactgcctggtgctggtttggagcctctgcagcgtgctgcaggccgacccctccaggattccggcgcccaggcacgtctggtctcaccacacgctccccatcacggacctgcactgcggctttgggggccccctggcccgggtggccacctcctcactggaccagacggtgaaggtacgccgcccccaccccaccacggtccatgagcggagcccagcagccgcaggtcctcagccaggaatgcaggaatcgcctcctcccgctccctgctgtcaggactccagacggcttttaatcccctggtgctctgagcccaaggacgtccagggaggtctgccagcctggaaattcctactcattcaccgtttctggcccggctccctggccaagcctggggaatcggaggtcatcactatgcttgagtcgtgaccggtggtcctgggagggagaaccaggggtcatcagccggagaccaagctccatttcagcacaggccatgtcccctggcccccaagacccacatggtgacggctttcacccaaagtcgcaagccctagggccagaggacagccgacgcctgacctccctggtgcccctgttcccatggggtcctcgggttccccctgccgggccgagccccacgccctttgcccacccgcagctatgggaggtctcctcgggggagctgctgctctccgtcctctttgacgtgtccatcatggcagtgaccatggacctggctgagcaccatatgttctgcgggggcagtgagggctccatcttccaggtcgacctcttcacctggcccggacagagggagaggagcttccacccagagcaggacgccgggaaggtcttcaaagggcacaggaaccaggtgacttgcctgtcagtgtccactgacggcagcgtgctgctctcaggctcccacgacgagaccgtgcgcctctgggacgtgcagagcaagcagtgcatccggacggtggccctcaaaggcccagtcaccaatgccgccatcctgctggcgcccgtcagcatgctgagctcagacttcaggcccagcctgccgctgccccacttcaacaagcacctgctgggcgccgagcacggggacgagccgcgccacgggggcctcactctgcgcctgggcctccaccagcagggctcggagcccagctacctggaccgcacggagcagctgcaggccgtcctgtgcagcaccatggagaagagcgtgctcggcggccaggaccagctgcgcgtccgtgtgacggagctggaggacgaggtgcgcaacctgcgcaagatcaatcgggacctgttcgacttctccacgcgcttcatcacgcggccggccaagtgaggcccggagaccccggcccgaggcgcccaggcctgagccccatgcctcccagcaaccagggcccgcgggtgtggcccccaccagcccaggcctggactctcctcagttctgtgtcgtgttcgggtttttcctctgtgactgggccgtcttggtgtctcgtggcacgcgtcacagtggtgctagtctgtttttaacaaaagaggatgaaaagccaaaaaaaaaaaaaaaaaaccaaaaaaaaaaaaacacataaacacaacacacaaaccacacagaacaaactacacacatacaatcatccctcacaaactccgtcaccaccccacaccaatcattcatctctaatacacattcccactccctcctgctcaccctctctcccctcactccaccccttcctctctctctactcctccacctcgttgctctggtcaccacaccgccctccctctcctctgcttaactcactcctcctccactccccacccccctccaacaagtagagatatctctcactctccttttctctcgaccactagtcttctcccctctctcgtccccacagctccccctatcctctctcatagtctcttccctccccctcaccacctcccctctccttctctcccttcccctctttccctcctcttctcttcccatttcactcccttcgctctcacccccacca

SEQ ID NO: 317387 - DNA, 1901 bp, Homo sapiens
aaagcaggctgtccgccggattcgttcgtcgcacgcgtcgctggaggtggccgtgtgtacggactcggcggccccgatgtggagctgcatcgtgtgggaacttcactcgggcgccaacctgctcacctaccgcggcggccaggcgggggaaccccccgccgggccctgggcggcttgctcaaatggcgaggtgttgtgcgcaggcagactctagctggctcagagactcagaaaatgtgccggctgactgttgtgtacatggtctctacgtctgcgatgcaagcatcactgtggagtcacggaacttgtcatctgtatacagagtcttgccttcagttcacaggggacagcgcacttcatctcagggggcaaggactgctggtgcgttggagcctctgcagcgtgctgcggccgacccctcagattccggccaggccgttggctcccccgcccctccggacctgcctgggttgggggcccctgccggtggcactcctcctgacagagggagctatgggaggtctcctcgggggagctgctgctctccgtcctctttgacgtgtccatcatggcagtgaccatggacctggctgagcaccatatgttctgcgggggcagtgagggctccatcttccaggtcgacctcttcacctggcccggacagagggagaggagcttccacccagagcaggacgccgggaaggtcttcaaagggcacaggaaccaggtgacttgcctgtcagtgtccactgacggcagcgtgctgctctcaggctcccacgacgagaccgtgcgcctctgggacgtgcagagcaagcagtgcatccggacggtggccctcaaaggcccagtcaccaatgccgccatcctgctggcgcccgtcagcatgctgagctcagacttcaggcccagcctgccgctgccccacttcaacaagcacctgctgggcgccgagcacggggacgagccgcgccacgggggcctcactctgcgcctgggcctccaccagcagggctcggagcccagctacctggaccgcacggagcagctgcaggccgtcctgtgcagcaccatggagaagagcgtgctcggcggccaggaccagctgcgcgtccgtgtgacggagctggaggacgaggtgcgcaacctgcgcaagatcaatcgggacctgttcgacttctccacgcgcttcatcacgcggccggccaagtgaggcccggagaccccggcccgaggcgcccaggcctgagccccatgcctcccagcaaccagggcccgcgggtgtggcccccaccagcccaggcctggactctcctcagttctgtgtcgtgttcgggtttttcctctgtgactgggccgtcttggtgtctcgtggcacgcgtcacagtggtgctagtctgtttttaacaaaagaggatgaaaagccaaaaaaaaaaaaaaaaaaccaaaaaaaaaaaaacacataaacacaacacacaaaccacacagaacaaactacacacatacaatcatccctcacaaactccgtcaccaccccacaccaatcattcatctctaatacacattcccactccctcctgctcaccctctctcccctcactccaccccttcctctctctctactcctccacctcgttgctctggtcaccacaccgccctccctctcctctgcttaactcactcctcctccactccccacccccctccaacaagtagagatatctctcactctccttttctctcgaccactagtcttctcccctctctcgtccccacagctccccctatcctctctcatagtctcttccctccccctcaccacctcccctctccttctctcccttcccctctttccctcctcttctcttcccatttcactcccttcgctctcacccccacca

SEQ ID NO: 317388 - DNA, 2447 bp, Homo sapiens
gccggacgttgtggctgaagcctgtaatcccagcggtttaagaggccaaggcctaagcccaggtgttggagaccagcctgagcaacacagcgcaatgtgtcatttaggcctgtgacgtcggaactttattatttgaacatttaaaaataaatgaatccaagagcttgagtcacttggccaaaaatgcccaggaggaaaaggccaagtcaggtaccccggctctagagctactaactgatcgccggagaccctgggccttggaagaagtcgcctccccagatctctaagcaggccgcgcgaccctcgagtctcaggtaagcgggaaatcccacttcacaagaaagcccctctctccgaggcacgggcgcatgcgcgggtcggccacccgctggggccgcggggccgccgctctggcccgcgtggggcagtcgtccgcgtctcgctcatgatgacgcacgtccggggcggtgggggaaggcaagatggcggcgcccatggaggtggccgtgtgtacggactcggcggccccgatgtggagctgcatcgtgtgggaacttcactcgggcgccaacctgctcacctaccgcggcggccaggcgggaccccgcggcctggcgctgctcaatggcgagtatctgctggcggcgcagctgggcaagaattacatcagcgcctgggagctccagcggaaggaccagctccagcagaagatcatgtgccccgggcctgtcacctgtctgactgcatcacccaatggtctctacgtcctggcaggagttgcagaaagcatccacctgtgggaggtctccaccgggaaccttctggtcatcctgagtcgacactaccaggacgtctcctgccttcagttcacaggggacagcagccacttcatctcagggggcaaggactgcctggtgctggtttggagcctctgcagcgtgctgcaggccgacccctccaggattccggcgcccaggcacgtctggtctcaccacacgctccccatcacggacctgcactgcggctttgggggccccctggcccgggtggccacctcctcactggaccagacggtgaagtgagggctccatcttccaggtcgacctcttcacctgggtgagtgccgcggtctgcgggctgcaccctgccctggggctgagggcatcgggcctgcggctcacacacgtctcggccttcgcagcccggacagagggagaggagcttccacccagagcaggacgccgggaaggtcttcaaagggcacaggaaccaggtgacttgcctgtcagtgtccactgacggcagcgtgctgctctcaggctcccacgacgagaccgtgcgcctctgggacgtgcagagcaagcagtgcatccggacggtggccctcaaaggcccagtcaccaatgccgccatcctgctggcgcccgtcagcatgctgagctcagacttcaggcccagcctgccgctgccccacttcaacaagcacctgctgggcgccgagcacggggacgagccgcgccacgggggcctcactctgcgcctgggcctccaccagcagggctcggagcccagctacctggaccgcacggagcagctgcaggccgtcctgtgcagcaccatggagaagagcgtgctcggcggccaggaccagctgcgcgtccgtgtgacggagctggaggacgaggtgcgcaacctgcgcaagatcaatcgggacctgttcgacttctccacgcgcttcatcacgcggccggccaagtgaggcccggagaccccggcccgaggcgcccaggcctgagccccatgcctcccagcaaccagggcccgcgggtgtggcccccaccagcccaggcctggactctcctcagttctgtgtcgtgttcgggtttttcctctgtgactgggccgtcttggtgtctcgtggcacgcgtcacagtggtgctagtctgtttttaacaaaagaggatgaaaagccaaaaaaaaaaaaaaaaaaccaaaaaaaaaaaaacacataaacacaacacacaaaccacacagaacaaactacacacatacaatcatccctcacaaactccgtcaccaccccacaccaatcattcatctctaatacacattcccactccctcctgctcaccctctctcccctcactccaccccttcctctctctctactcctccacctcgttgctctggtcaccacaccgccctccctctcctctgcttaactcactcctcctccactccccacccccctccaacaagtagagatatctctcactctccttttctctcgaccactagtcttctcccctctctcgtccccacagctccccctatcctctctcatagtctcttccctccccctcaccacctcccctctccttctctcccttcccctctttccctcctcttctcttcccatttcactcccttcgctctcacccccacca

SEQ ID NO: 317389 - DNA, 1019 bp, Homo sapiens
  misc_feature (14)..(14): n is a, c, g, or t
  misc_feature (17)..(17): n is a, c, g, or t
  misc_feature (24)..(27): n is a, c, g, or t
  misc_feature (33)..(33): n is a, c, g, or t
  misc_feature (47)..(47): n is a, c, g, or t
  misc_feature (49)..(50): n is a, c, g, or t
  misc_feature (52)..(52): n is a, c, g, or t
  misc_feature (62)..(62): n is a, c, g, or t
  misc_feature (73)..(73): n is a, c, g, or t
  misc_feature (79)..(79): n is a, c, g, or t
  misc_feature (82)..(82): n is a, c, g, or t
  misc_feature (91)..(91): n is a, c, g, or t
  misc_feature (101)..(101): n is a, c, g, or t
  misc_feature (103)..(103): n is a, c, g, or t
  misc_feature (105)..(105): n is a, c, g, or t
  misc_feature (109)..(109): n is a, c, g, or t
  misc_feature (111)..(111): n is a, c, g, or t
  misc_feature (114)..(114): n is a, c, g, or t
  misc_feature (121)..(121): n is a, c, g, or t
  misc_feature (124)..(125): n is a, c, g, or t
  misc_feature (131)..(131): n is a, c, g, or t
  misc_feature (134)..(137): n is a, c, g, or t
  misc_feature (141)..(141): n is a, c, g, or t
  misc_feature (143)..(143): n is a, c, g, or t
  misc_feature (145)..(145): n is a, c, g, or t
  misc_feature (147)..(147): n is a, c, g, or t
  misc_feature (150)..(151): n is a, c, g, or t
  misc_feature (159)..(159): n is a, c, g, or t
  misc_feature (163)..(163): n is a, c, g, or t
  misc_feature (165)..(165): n is a, c, g, or t
  misc_feature (177)..(177): n is a, c, g, or t
  misc_feature (183)..(183): n is a, c, g, or t
  misc_feature (186)..(186): n is a, c, g, or t
  misc_feature (199)..(199): n is a, c, g, or t
tcattctgtgttcntantttattnnnntctttntttttccccacttntnnangcaccttctntgctccgtgcncggggncgngccgcgccncgggttcttnantnttcncnttntcttccnccnncagttntcnnnncccntntncnttnnccgcacgntgcngnttcatgccttcnttttcngcnccatttagaagtnagcgtgctcggcggccaggaccagctgcgcgtccgtgtgacggagctggaggacgaggtgcgcaacctgcgcaagatcaatcgggacctgttcgacttctccacgcgcttcatcacgcggccggccaagtgaggcccggagaccccggcccgaggcgcccaggcctgagccccatgcctcccagcaaccagggcccgcgggtgtggcccccaccagcccaggcctggactctcctcagttctgtgtcgtgttcgggtttttcctctgtgactgggccgtcttggtgtctcgtggcacgcgtcacagtggtgctagtctgtttttaacaaaagaggatgaaaagccaaaaaaaaaaaaaaaaaaccaaaaaaaaaaaaacacataaacacaacacacaaaccacacagaacaaactacacacatacaatcatccctcacaaactccgtcaccaccccacaccaatcattcatctctaatacacattcccactccctcctgctcaccctctctcccctcactccaccccttcctctctctctactcctccacctcgttgctctggtcaccacaccgccctccctctcctctgcttaactcactcctcctccactccccacccccctccaacaagtagagatatctctcactctccttttctctcgaccactagtcttctcccctctctcgtccccacagctccccctatcctctctcatagtctcttccctccccctcaccacctcccctctccttctctcccttcccctctttccctcctcttctcttcccatttcactcccttcgctctcacccccacca

SEQ ID NO: 317390 - DNA, 1087 bp, Homo sapiens
gccggacgttgtggctgaagcctgtaatcccagcggtttaagaggccaaggcctaagcccaggtgttggagaccagcctgagcaacacagcgcaatgtgtcatttaggcctgtgacgtcggaactttattatttgaacatttaaaaataaatgaatccaagagcttgagtcacttggccaaaaatgcccaggaggaaaaggccaagtcaggtaccccggctctagagctactaactgatcgccggagaccctgggccttggaagaagtcgcctccccagatctctaagcaggccgcgcgaccctcgagtctcaggtaagcgggaaatcccacttcacaagaaagcccctctctccgaggcacgggcgcatgcgcgggtcggccacccgctggggccgcggggccgccgctctggcccgcgtggggcagtcgtccgcgtctcgctcatgatgacgcacgtccggggcggtgggggaaggcaagatggcggcgcccatggaggtggccgtgtgtacggactcggcggccccgatgtggagctgcatcgtgtgggaacttcactcgggcgccaacctgctcacctaccgcggcggccaggcgggaccccgcggcctggcgctgctcaatggcgagtatctgctggcggcgcagctgggcaagaattacatcagcgcctgggagctccagcggaaggaccagctccagcagaagatcatgtgccccgggcctgtcacctgtctgactgcatcacccaatggtctctacgtcctggcaggagttgcagaaagcatccacctgtgggaggtctccaccgggaaccttctggtcatcctgagtcgacactaccaggacgtctcctgccttcagttcacaggggacagcagccacttcatctcagggggcaaggactgcctggtgctggtttggagcctctgcaggtagcgccttgcgcactcaggagggtggtaagggctacatagcaaggagtgtgcttaatgtgcctgagctgtgcacctagaaatggccaagatggcaggtttcatgttatgactattttcccacaataaaacattttttaaaagtctcct

SEQ ID NO: 317391 - DNA, 345 bp, Homo sapiens
cgccctccactgctgtagtagctcccgtgtcctgcatggggctcacgaggctgactgtgcatccttaggaccagctccagcagaagatcatgtgccccgggcctgtcacctgtctgactgcatcacccaatggtctctacgtcctggcaggagttgcagaaagcatccacctgtgggaggtaagaggagcaaagcgtgagcgtttcccacaggacatctcagcccatctgagctttgcctgcagggcaccagggaacaaccatgcggcctggggccctgggatgggtgactgctcaggggttatagcctaagcttcaccctgctgcctcctttctccaggtcccc

SEQ ID NO: 317392 - DNA, 1131 bp, Homo sapiens
  misc_feature (260)..(260): n is a, c, g, or t
  misc_feature (267)..(267): n is a, c, g, or t
ttggagacggagtctcactctgtcacccattctggagtacaatggcatgatctcagctcactgcaacctcctccttctgggttcaagtgattcttctgcctcagcctcctgagtagctgggactacaggcttgtgccaccacactcagctaatttttgtatttttagtagagacagggtttcaccatattggccaagctggtcttgaactcctgacctcaaacgatctgcccaccccagcctcccaaagtgctgggattncaagtgngagccaccacacccagcctaatgtaactgttttcctttccttttagtctttatctcattgttatatgtgattataatgttgtcatttatgcattcacatcaccagtaattatctcaaacagatcttaaatgctgcctatcatgttgaagtcacgtttcactcagggtcgtcagttacaaggatgctatgggagcaaatcaaacagatcatccagcgcatcacatgggtgagcccacctgccatcactctggaatggaagaggaaggtggcccaggaagccattgagagcctcagcgcctccaaattggctaagagcatttgcagccaattccggactcggctcaatagttcccacgaggcttttgcagcctccttgcggcagctggaagctggccactcaggccggttagagaaaacggaagatctatggctgagggttcggaaagatcatgctccccgcctggcccgcctttctctggaaagccgttctttacaggatgtcttgcttcatcgtaaacctaaactgggacaggaactgggccggggccagtatggtgtggtatacctgtgtgacaactggggaggacacttcccttgtgccctcaaatcagttgtccctccagatgagaagcactggaatgatctggctttggaatttcactatatgaggtgggtcctggcctcattcatctctatgagaaagatccagagaagaatctagaaccctggtttagattttgtaccaagagctacagcatggcctctctatatttagttttctgtgtctaacagacatgtgctccctttcaggcctttactgtctttgcttgctctttccccaccatcctaatttctcagactcat

SEQ ID NO: 317393 - DNA, 895 bp, Homo sapiens
aacacatatctggctcatgtgtctgatggcctgggttgtgcttcccaccaccaagctgggcagtgaggagagctgtaagcttcggcgcctccgcttcacctatgggactcagactcgggtcagcctggcgctccctggacagtatgaactagtgcacacgctggttgctcatcagggcaactgggagaccatccctgaggaggatctggaggtccaagagaacaatgaggatgctgctcatgttttagcggaactggaggtaacgatgcaccatgctctcttacaggaagtggacgttgtggtagcaccatgccaaggcctccggcccacagtggatgttctgggtgacttggtgaatgatttcttgcctgtgataacctatgcactccacaaagatgaactctctgagagggatgagcaagagcttcaggaaatccgaaagtatttctcctttcctgtattctttttcaaagtgccgaaactgggctcggagataatagactcctcaaccaggagaatggagagcgaaagatcaccgctttatcgccagctaattgacctgggctatctgagcagcagtcactggaactgtggggctcctggccaggatactaaagctcagagcatgttggtggaacagagtgaaaagctgagacacttgagcacattttctcaccaggtgttacagactcgcctggtggatgcagccaaggccctgaacctggtgcactgccactgccttgacatctttattaaccaggcatttgacatgcagcgggacctgcagatcactcccaaacgtctggaatatactcgaaaaaaggagaatgagtgtatgaatcatatgatgaatattgccgaaagcaggaggaaatgaaggatatgattgtggaga

SEQ ID NO: 317394 - DNA, 607 bp, Homo sapiens
  misc_feature (16)..(16): n is a, c, g, or t
ctagtgcgatccccgngctgcaggaattcggcacgagccttcagttatggaggtgggatgaatagagcttgtttgatgttaaagtgggtaaggagggagtggccttgagacacttgtattccaaactctcctggaggtttccagtagcactactgttcctaaaagggtttcatttttaacttcatctgttttgttaacatccagtccaattgaggtgatctcagaggtgcatcaggacatctagcactggggaggccaccttgcccagatagttgaaaagaaaattggtctgggcagcctgttgtcttttgtcttcatgtaatgttttttctttgttttaaaggactaatgtttattacagtgttaaataaaagtgtaagatactaagtgtgtagaatctctcctttcttgtgctacctggctctttccataatattgttacagcaggaccgtcttaattgtgtgcattttgaagagatgcgactctgggttaatcttcattagtgtaatattgaagggttgggtttggttttatagagtattctgtatacttgttgggatacacaaataccagatgtgctgtataataaagatcacattaacgttt

SEQ ID NO: 317395 - DNA, 646 bp, Homo sapiens
gccatggggcagcgagcccgtctcgggtcccggccccggcggcggcggaatgatccgcgagctgtgccggggcttcggccgctaccgccgctacctgggacggctgcgacagaacctgcgcgagacccagaagttcttccgcgacatcaagtgctcccacaaccacacttgtctctcctccctcacgggcggcggcggggccgagcgcggccctgcaggcgatgtcgccgaaaccgggctgcaggcgggccaactgagctgcatttccttcccacctaaggaagagaagtacctccagcagattgtggactgcctcccttgcatactgatcctcggccaggattgtaacgtcaagtgccagctgttgaatctgctgttgggggtgcaggtgcttcccaccaccaagctgggcagtgaggagagctgtaagcttcggcgcctccgcttcacctatgggactcagactcgggtcagcctggcgctccctggacagtatgaactagtgcacacgctggttgctcatcagggcaactgggagaccatccctgaggcaggagaatcacttgaacccgggaggcagaggtcatggtgagccgagatcacgccactgcactccagcctgggcaacagagcgagactctatctc

SEQ ID NO: 317396 - DNA, 239 bp, Homo sapiens
tactactactaaattcgcggccgcgtcgacctctcctttcttgtgctacctggctctttccataatattgttacagcaggaccgtcttaattgtgtgcattttgaagagatgcgactctgggttaatcttcattagtgtaatattgaagggttgggtttggttttatagagtattctgtatacttgttgggatacacaaataccagatgtgctgtataataaagatcacattaacgttt

SEQ ID NO: 317397 - DNA, 6385 bp, Homo sapiens
ctgagggaaagcttcgtcggaaccctggaacgatgtctgcagagcctggagaagtctcaggatgtctcagttcacatcaccagtaattatctcaaacagatcttaaatgctgcctatcatgttgaagtcacgtttcactcagggtcgtcagttacaaggatgctatgggagcaaatcaaacagatcatccagcgcatcacatgggtgagcccacctgccatcactctggaatggaagaggaaggtggcccaggaagccattgagagcctcagcgcctccaaattggctaagagcatttgcagccaattccggactcggctcaatagttcccacgaggcttttgcagcctccttgcggcagctggaagctggccactcaggccggttagagaaaacggaagatctatggctgagggttcggaaagatcatgctccccgcctggcccgcctttctctggaaagccgttctttacaggatgtcttgcttcatcgtaaacctaaactgggacaggaactgggccggggccagtatggtgtggtatacctgtgtgacaactggggaggacacttcccttgtgccctcaaatcagttgtccctccagatgagaagcactggaatgatctggctttggaatttcactatatgaggtctctgccgaagcatgagcgattggtggatctccatggttcagtcattgactacaactatggtggtggctccagcattgctgtgctcctcattatggagcggctacaccgggatctctacacagggctgaaggctgggctgaccctggagacacgtttgcagatagcactagatgtggtggagggaatccgcttcctgcacagccagggacttgtccatcgtgatatcaaactgaaaaatgtgctgctggataagcagaaccgtgccaagatcactgacttaggattctgcaagccagaggccatgatgtcaggcagcattgtggggacaccaatccatatggcccctgaacttttcacagggaagtacgataattccgtggatgtctacgcttttggaattcttttctggtatatctgctcaggctctgtcaagctccctgaggcatttgagaggtgtgctagcaaagaccatctctggaacaatgtgcggaggggggctcgcccagaacgtcttcctgtgtttgatgaggagtgctggcagttgatggaagcctgttgggatggcgaccccttgaagaggcctctcttgggcattgtccagcccatgctccagggcatcatgaatcggctctgcaagtccaattctgagcagccaaacagaggactagatgattctacttgaaagcaaagacctttctctttcactctctagttatttccttccccctcaccttttggccatggggagaatttgacatttattcactataggacacactcccaagggaactggtgcttgctgggaaacttggaaccttcccaggcagggatgactcctggacagtgaagagttgaatgactgagcatattcagcagctcactgaagcgccaagctatccctttagcaaaaaagtgtctcagatgtgtaaaagctgaggaatgtggtgttctggcttcacaaatgaaaaggaggcagatgttaccattgtcttttcactgtatatacttctaagacagcaagcgggacactgcagtggcaatagtgttaaaaaatctcattctcatgatttttggctctagctaggaatagtttagtcaggactcagaaaatttgagcttagttctgggattatgaaaacatggggacaaaaacaataacttgtggatgtctggttcctgctgtctgcagccaggtatctcaggttgcaatggtcagaagtcccagtgagggagctagaaacagagctatctgttcctcatagtgccagtgtgtttacatttataggaccacatatccctggtttctgggggagggtttcactgttacatcaccaagaggccctgaaaagaggaaaaaaaaaaaaaaagaggccaggcatggtggctcacgcctgtaatctcagcactttggaaggctgaggcgggcggatcacaaggtccagagttcaagagcagcctggccaacatggtgaaaccccgtctctactaaagatacaaaaaattagccgggcgtggtggtgcatgcctgtaatccaagatactcaggaggctgaggcaggagaatcgcttgaacctgggaggcggaggttgcagtgagccgagatcatgccattgcactccagcctgggcgacagagtgagactctgtctcaaaaaaaaaaaaaaatagaatgtgtatgcatatatttgtgtgtatatgtatatatgtgtgtgtgtctatatctctatctatatagacatacacacaggagttattggatttagagttactgctaaccccagaacagaatctgttcttttacctttgagtcttttcttttgtttacctcttttcatctcaaagtgggaaagctccagataacatggtacttaggagtgagtgtctaagcaaaaccaacccaatgcgaagtatttgggtgagaactgagaggtgggagatgattggaggccatggcctatgtacaaacatactggaagaaaaccagcttgtttttaaaacttaacacaatcagaaatttttctttttgtgtttgaatctaacacactgacgtttggaaaacttgatcaatgagcttttaaccacgatttctcccgcaatttgttccttctttttacctttttaaaaatctgttagaagaaaaaaagcagcagacgaaagagaaaaaccctcctctggtagttctgtgtgtgcccctcacccctgtgtgctagtgtctgggaagtttccctgaaaggtgggaggcgggtgggtggtcttttggagggttcctcatgaagtgtgcttgaggaaagaaattctgattctaggcagaggaaggggaacaatttaaatattggtgcatctcagatgcacttgacttcaagccttcctcaaccaaactggtccattagattccgaaaaacaggtagacgaggaagtagacagtggaagtgagtagtctccctccatctgcctaatccccaataactgtggtctggcccctgtgttcagccccagagtttgtaaaacaggtccccaggtaggtgtataagatgagttgcaaattagccgggcatgctggcacgcaccagtaatcccagctacttgggaggctgaggcaggagaatcacttgaacccgggaggcagaggtcatggtgagccgagatcacgccactgcactccagccctgggcaacagagcgagactctatctcaaaaaaaaacaaaaaaaaaaaacaaaaaacaaagatgagtcgcacatctgctgctgggattttctagggttgtctatgacagaatgaccatcttttaaatattaatggagtataaatggagtctataatgggtctttcatataacttttaactctttggctatcctgggctctgatcatgatatgtttgagcatagtagctccctaaactcttggagcctttcagaaattccatgtagtgctaataacctttttacttgcaaatgataaagtaactgactcagtgtctttgggctctgcaggctttagccttgttttggtaggatgttcagtatattctcagaattttaccacctatttagctatacttcaagtactctattctctgcactaacttactgtccttctgggaactatgatggggcttcaagggagtcaggtgtcaagaaaggaggggtaagtactctctacttgctggaaaatcattgtaagtctgttgtgtatgaaattttaggaaaagtcttatatagttccctttccagactgttttcttttgactctaactataatcataagtctgtgcttccattatgaaggtcacattcctagcattcttgggaagtattagctcatactctcattcacatatgggaggttagatttttttcctctacccagagtccctttttagtttaccccacggcttagtttgctgtcagataccagttctctagcagattccccaacagttttttccccagtggggagggtggaagggagggactgatataagtaaggagatgagtagttgtgttacagttcattttctttaaaaaaaagtattttgagaaaaggtgcaaaatattcttgaaagtctctaggccagccaaagtccacatatggatatttggggatgttatttaaatactcagcaggctgagtgcaggtatacgtgtgtatagagtgtgtatactttgcttttgttttataacattgtcagctaattttggctttgttctttggcatccattcttattataagtgatggaatgccatgaaatgtactgtattgtatattacttgggaggacactaggttttcaaagaagtctggcagcacttgggttatagagggctcagcatgaccaaagtcctaaagattttacctcccagctttggttgtatgtgttcccaagtggtgaggtgagattgtggctggaggaagaaaaaggatggcatgaaagaatgacccttattgtggtctgtccttctaatcaacataattagggcagcttaccccaacatgaaaatgatgacctggccatttttaatggccagagcttgaagtctggtctctcattttgtttcagaaatgagtgagaggccttcctgcagagcagtcaggagaaatggtggagcctggggccctggaatggctgaccctgtgcctagagagctgatggcaagggctgtctggcatggctcatttgggtggggtttccccaggcataccttagttccctgatcctctgcaaagagtagctcattgactgagcaagcgcttcaggaggactgtgctggttgttcccagaccaaagagagtcacttttgactccatcaacttcaaggggacagagcctaggcagcagattctcctaatttttaacactaaaattcaaggaagcagtggaggaaagaatgcattactaccacagatagaaataggggactcatagaactctcgactagtacctgtcagctctcaaatgcattcttgtgtctttgcttgagctgccaaagaagggtcacaaagtgttcttcctcatggaagaagtgcctcggggttgcagggctgcaaagtgacaactgcactgaatgacactttattttttggctttggcttattatttagcactgggaggcccaggggaattggtgattacagtagcactttgggaagttaaagccccctttgggcttgctttggagagatgatggcatgcttggtattccatttggataatcaggaagcctccctagtccatccatattgtgtcagagtgggattaacaaccctggaagagtccactgccaaaagagtagttgctttcctggaatttccaaagcttttggattttctggatcaagtaacccactttttaaaacctgaggtcaggagttcgagaccagcctggtaacatggtgaaaccccgtctctattaaaaatagaaaaaattagccaggcatggtggcgggcacctatagtcccagctactcaggaggctgaggtaggagaattgcttgaacccaggagacagaggctgcattgagccaagatcacaccactgcactccagcctgggcagcagagcaagactccatctcaaaaaaaaaaaaaagaaaaagaaaaagaaggttaatccttcagttatggaggtgggatgaatagagcttgtttgatgttaaagtgggtaaggagggagtggccttgagacacttgtattccaaactctcctggaggtttccagtagcactactgttcctaaaagggtttcatttttaacttcatctgttttgttaacatccagtccaattgaggtgatctcagaggtgcatcaggacatctagcactggggaggccaccttgcccagatagttgaaaagaaaattggtctgggcagcctgttgtcttttgtcttcatgtaatgttttttctttgttttaaaggactaatgtttattacagtgttaaataaaagtgtaagatactaagtgtgtagaataaaagtgcaataacaaaagacaatgactttggcacacacttcagtctttatcctctctcctttcttgtgctacctggctctttccataatattgttacagcaggaccgtcttaattgtgtgcattttgaagagatgcgactctgggttaatcttcattagtgtaatattgaagggttgggtttggttttatagagtattctgtatacttgttgggatacacaaataccagatgtgctgtataataaagatcacattaacgttt

SEQ ID NO: 317398 - DNA, 5601 bp, Homo sapiens
gaccccagtccgatcgactgaccgggatagcactagatgtggtggagggaatccgcttcctgcacagccagggacttgtccatcgtgatatcaaactgaaaaatgtgctgctggataagcagaaccgtgccaagatcactgacttaggattctgcaagccagaggccatgatgtcaggcagcattgtggggacaccaatccatatggcccctgaacttttcacagggaagtacgataattccgtggatgtctacgcttttggaattcttttctggtatatctgctcaggctctgtcaagctccctgaggcatttgagaggtgtgctagcaaagaccatctctggaacaatgtgcggaggggggctcgcccagaacgtcttcctgtgtttgatgaggagtgctggcagttgatggaagcctgttgggatggcgaccccttgaagaggcctctcttgggcattgtccagcccatgctccagggcatcatgaatcggctctgcaagtccaattctgagcagccaaacagaggactagatgattctacttgaaagcaaagacctttctctttcactctctagttatttccttccccctcaccttttggccatggggagaatttgacatttattcactataggacacactcccaagggaactggtgcttgctgggaaacttggaaccttcccaggcagggatgactcctggacagtgaagagttgaatgactgagcatattcagcagctcactgaagcgccaagctatccctttagcaaaaaagtgtctcagatgtgtaaaagctgaggaatgtggtgttctggcttcacaaatgaaaaggaggcagatgttaccattgtcttttcactgtatatacttctaagacagcaagcgggacactgcagtggcaatagtgttaaaaaatctcattctcatgatttttggctctagctaggaatagtttagtcaggactcagaaaatttgagcttagttctgggattatgaaaacatggggacaaaaacaataacttgtggatgtctggttcctgctgtctgcagccaggtatctcaggttgcaatggtcagaagtcccagtgagggagctagaaacagagctatctgttcctcatagtgccagtgtgtttacatttataggaccacatatccctggtttctgggggagggtttcactgttacatcaccaagaggccctgaaaagaggaaaaaaaaaaaaaaagaggccaggcatggtggctcacgcctgtaatctcagcactttggaaggctgaggcgggcggatcacaaggtccagagttcaagagcagcctggccaacatggtgaaaccccgtctctactaaagatacaaaaaattagccgggcgtggtggtgcatgcctgtaatccaagatactcaggaggctgaggcaggagaatcgcttgaacctgggaggcggaggttgcagtgagccgagatcatgccattgcactccagcctgggcgacagagtgagactctgtctcaaaaaaaaaaaaaaatagaatgtgtatgcatatatttgtgtgtatatgtatatatgtgtgtgtgtctatatctctatctatatagacatacacacaggagttattggatttagagttactgctaaccccagaacagaatctgttcttttacctttgagtcttttcttttgtttacctcttttcatctcaaagtgggaaagctccagataacatggtacttaggagtgagtgtctaagcaaaaccaacccaatgcgaagtatttgggtgagaactgagaggtgggagatgattggaggccatggcctatgtacaaacatactggaagaaaaccagcttgtttttaaaacttaacacaatcagaaatttttctttttgtgtttgaatctaacacactgacgtttggaaaacttgatcaatgagcttttaaccacgatttctcccgcaatttgttccttctttttacctttttaaaaatctgttagaagaaaaaaagcagcagacgaaagagaaaaaccctcctctggtagttctgtgtgtgcccctcacccctgtgtgctagtgtctgggaagtttccctgaaaggtgggaggcgggtgggtggtcttttggagggttcctcatgaagtgtgcttgaggaaagaaattctgattctaggcagaggaaggggaacaatttaaatattggtgcatctcagatgcacttgacttcaagccttcctcaaccaaactggtccattagattccgaaaaacaggtagacgaggaagtagacagtggaagtgagtagtctccctccatctgcctaatccccaataactgtggtctggcccctgtgttcagccccagagtttgtaaaacaggtccccaggtaggtgtataagatgagttgcaaattagccgggcatgctggcacgcaccagtaatcccagctacttgggaggctgaggcaggagaatcacttgaacccgggaggcagaggtcatggtgagccgagatcacgccactgcactccagccctgggcaacagagcgagactctatctcaaaaaaaaacaaaaaaaaaaaacaaaaaacaaagatgagtcgcacatctgctgctgggattttctagggttgtctatgacagaatgaccatcttttaaatattaatggagtataaatggagtctataatgggtctttcatataacttttaactctttggctatcctgggctctgatcatgatatgtttgagcatagtagctccctaaactcttggagcctttcagaaattccatgtagtgctaataacctttttacttgcaaatgataaagtaactgactcagtgtctttgggctctgcaggctttagccttgttttggtaggatgttcagtatattctcagaattttaccacctatttagctatacttcaagtactctattctctgcactaacttactgtccttctgggaactatgatggggcttcaagggagtcaggtgtcaagaaaggaggggtaagtactctctacttgctggaaaatcattgtaagtctgttgtgtatgaaattttaggaaaagtcttatatagttccctttccagactgttttcttttgactctaactataatcataagtctgtgcttccattatgaaggtcacattcctagcattcttgggaagtattagctcatactctcattcacatatgggaggttagatttttttcctctacccagagtccctttttagtttaccccacggcttagtttgctgtcagataccagttctctagcagattccccaacagttttttccccagtggggagggtggaagggagggactgatataagtaaggagatgagtagttgtgttacagttcattttctttaaaaaaaagtattttgagaaaaggtgcaaaatattcttgaaagtctctaggccagccaaagtccacatatggatatttggggatgttatttaaatactcagcaggctgagtgcaggtatacgtgtgtatagagtgtgtatactttgcttttgttttataacattgtcagctaattttggctttgttctttggcatccattcttattataagtgatggaatgccatgaaatgtactgtattgtatattacttgggaggacactaggttttcaaagaagtctggcagcacttgggttatagagggctcagcatgaccaaagtcctaaagattttacctcccagctttggttgtatgtgttcccaagtggtgaggtgagattgtggctggaggaagaaaaaggatggcatgaaagaatgacccttattgtggtctgtccttctaatcaacataattagggcagcttaccccaacatgaaaatgatgacctggccatttttaatggccagagcttgaagtctggtctctcattttgtttcagaaatgagtgagaggccttcctgcagagcagtcaggagaaatggtggagcctggggccctggaatggctgaccctgtgcctagagagctgatggcaagggctgtctggcatggctcatttgggtggggtttccccaggcataccttagttccctgatcctctgcaaagagtagctcattgactgagcaagcgcttcaggaggactgtgctggttgttcccagaccaaagagagtcacttttgactccatcaacttcaaggggacagagcctaggcagcagattctcctaatttttaacactaaaattcaaggaagcagtggaggaaagaatgcattactaccacagatagaaataggggactcatagaactctcgactagtacctgtcagctctcaaatgcattcttgtgtctttgcttgagctgccaaagaagggtcacaaagtgttcttcctcatggaagaagtgcctcggggttgcagggctgcaaagtgacaactgcactgaatgacactttattttttggctttggcttattatttagcactgggaggcccaggggaattggtgattacagtagcactttgggaagttaaagccccctttgggcttgctttggagagatgatggcatgcttggtattccatttggataatcaggaagcctccctagtccatccatattgtgtcagagtgggattaacaaccctggaagagtccactgccaaaagagtagttgctttcctggaatttccaaagcttttggattttctggatcaagtaacccactttttaaaacctgaggtcaggagttcgagaccagcctggtaacatggtgaaaccccgtctctattaaaaatagaaaaaattagccaggcatggtggcgggcacctatagtcccagctactcaggaggctgaggtaggagaattgcttgaacccaggagacagaggctgcattgagccaagatcacaccactgcactccagcctgggcagcagagcaagactccatctcaaaaaaaaaaaaaagaaaaagaaaaagaaggttaatccttcagttatggaggtgggatgaatagagcttgtttgatgttaaagtgggtaaggagggagtggccttgagacacttgtattccaaactctcctggaggtttccagtagcactactgttcctaaaagggtttcatttttaacttcatctgttttgttaacatccagtccaattgaggtgatctcagaggtgcatcaggacatctagcactggggaggccaccttgcccagatagttgaaaagaaaattggtctgggcagcctgttgtcttttgtcttcatgtaatgttttttctttgttttaaaggactaatgtttattacagtgttaaataaaagtgtaagatactaagtgtgtagaataaaagtgcaataacaaaagacaatgactttggcacacacttcagtctttatcctctctcctttcttgtgctacctggctctttccataatattgttacagcaggaccgtcttaattgtgtgcattttgaagagatgcgactctgggttaatcttcattagtgtaatattgaagggttgggtttggttttatagagtattctgtatacttgttgggatacacaaataccagatgtgctgtataataaagatcacattaacgttt

SEQ ID NO: 317399 - DNA, 6250 bp, Homo sapiens
ctgagggaaagcttcgtcggaaccctggaacgatgtctgcagagcctggagaagtctcaggatgtctcagttcacatcaccagtaattatctcaaacagatcttaaatgctgcctatcatgttgaagtcacgtttcactcagggtcgtcagttacaaggatgctatgggagcaaatcaaacagatcatccagcgcatcacatgggtgagcccacctgccatcactctggaatggaagaggaaggtggcccaggaagccattgagagcctcagcgcctccaaattggctaagagcatttgcagccaattccggactcggctcaatagttcccacgaggcttttgcagcctccttgcggcagctggaagctggccactcaggccggttagagaaaacggaagatctatggctgagggttcggaaagatcatgctccccgcctggcccgcctttctctggaaagccgttctttacaggatgtcttgcttcatcgtaaacctaaactgggacaggaactgggccggggccagtatggtgtggtatacctgtgtgacaactggggaggacacttcccttgtgccctcaaatcagttgtccctccagatgagaagcactggaatgatctggctttggaatttcactatatgaggtctctgccgaagcatgagcgattggtggatctccatggttcagtcattgactacaactatggtggtggctccagcattgctgtgctcctcattatggagcggctacaccgggatctctacacagggctgaaggctgggctgaccctggagacacgtttgcagatagcactagatgtggtggagggaatccgcttcctgcacagccagggacttgtccatcgtgatatcaaactgaaaaatgtgctgctggataagcagaaccgtgccaagatcactgacttaggattctgcaagccagaggccatgatgtcaggcagcattgtggggacaccaatccatatggcccctgaacttttcacaggggctcgcccagaacgtcttcctgtgtttgatgaggagtgctggcagttgatggaagcctgttgggatggcgaccccttgaagaggcctctcttgggcattgtccagcccatgctccagggcatcatgaatcggctctgcaagtccaattctgagcagccaaacagaggactagatgattctacttgaaagcaaagacctttctctttcactctctagttatttccttccccctcaccttttggccatggggagaatttgacatttattcactataggacacactcccaagggaactggtgcttgctgggaaacttggaaccttcccaggcagggatgactcctggacagtgaagagttgaatgactgagcatattcagcagctcactgaagcgccaagctatccctttagcaaaaaagtgtctcagatgtgtaaaagctgaggaatgtggtgttctggcttcacaaatgaaaaggaggcagatgttaccattgtcttttcactgtatatacttctaagacagcaagcgggacactgcagtggcaatagtgttaaaaaatctcattctcatgatttttggctctagctaggaatagtttagtcaggactcagaaaatttgagcttagttctgggattatgaaaacatggggacaaaaacaataacttgtggatgtctggttcctgctgtctgcagccaggtatctcaggttgcaatggtcagaagtcccagtgagggagctagaaacagagctatctgttcctcatagtgccagtgtgtttacatttataggaccacatatccctggtttctgggggagggtttcactgttacatcaccaagaggccctgaaaagaggaaaaaaaaaaaaaaagaggccaggcatggtggctcacgcctgtaatctcagcactttggaaggctgaggcgggcggatcacaaggtccagagttcaagagcagcctggccaacatggtgaaaccccgtctctactaaagatacaaaaaattagccgggcgtggtggtgcatgcctgtaatccaagatactcaggaggctgaggcaggagaatcgcttgaacctgggaggcggaggttgcagtgagccgagatcatgccattgcactccagcctgggcgacagagtgagactctgtctcaaaaaaaaaaaaaaatagaatgtgtatgcatatatttgtgtgtatatgtatatatgtgtgtgtgtctatatctctatctatatagacatacacacaggagttattggatttagagttactgctaaccccagaacagaatctgttcttttacctttgagtcttttcttttgtttacctcttttcatctcaaagtgggaaagctccagataacatggtacttaggagtgagtgtctaagcaaaaccaacccaatgcgaagtatttgggtgagaactgagaggtgggagatgattggaggccatggcctatgtacaaacatactggaagaaaaccagcttgtttttaaaacttaacacaatcagaaatttttctttttgtgtttgaatctaacacactgacgtttggaaaacttgatcaatgagcttttaaccacgatttctcccgcaatttgttccttctttttacctttttaaaaatctgttagaagaaaaaaagcagcagacgaaagagaaaaaccctcctctggtagttctgtgtgtgcccctcacccctgtgtgctagtgtctgggaagtttccctgaaaggtgggaggcgggtgggtggtcttttggagggttcctcatgaagtgtgcttgaggaaagaaattctgattctaggcagaggaaggggaacaatttaaatattggtgcatctcagatgcacttgacttcaagccttcctcaaccaaactggtccattagattccgaaaaacaggtagacgaggaagtagacagtggaagtgagtagtctccctccatctgcctaatccccaataactgtggtctggcccctgtgttcagccccagagtttgtaaaacaggtccccaggtaggtgtataagatgagttgcaaattagccgggcatgctggcacgcaccagtaatcccagctacttgggaggctgaggcaggagaatcacttgaacccgggaggcagaggtcatggtgagccgagatcacgccactgcactccagccctgggcaacagagcgagactctatctcaaaaaaaaacaaaaaaaaaaaacaaaaaacaaagatgagtcgcacatctgctgctgggattttctagggttgtctatgacagaatgaccatcttttaaatattaatggagtataaatggagtctataatgggtctttcatataacttttaactctttggctatcctgggctctgatcatgatatgtttgagcatagtagctccctaaactcttggagcctttcagaaattccatgtagtgctaataacctttttacttgcaaatgataaagtaactgactcagtgtctttgggctctgcaggctttagccttgttttggtaggatgttcagtatattctcagaattttaccacctatttagctatacttcaagtactctattctctgcactaacttactgtccttctgggaactatgatggggcttcaagggagtcaggtgtcaagaaaggaggggtaagtactctctacttgctggaaaatcattgtaagtctgttgtgtatgaaattttaggaaaagtcttatatagttccctttccagactgttttcttttgactctaactataatcataagtctgtgcttccattatgaaggtcacattcctagcattcttgggaagtattagctcatactctcattcacatatgggaggttagatttttttcctctacccagagtccctttttagtttaccccacggcttagtttgctgtcagataccagttctctagcagattccccaacagttttttccccagtggggagggtggaagggagggactgatataagtaaggagatgagtagttgtgttacagttcattttctttaaaaaaaagtattttgagaaaaggtgcaaaatattcttgaaagtctctaggccagccaaagtccacatatggatatttggggatgttatttaaatactcagcaggctgagtgcaggtatacgtgtgtatagagtgtgtatactttgcttttgttttataacattgtcagctaattttggctttgttctttggcatccattcttattataagtgatggaatgccatgaaatgtactgtattgtatattacttgggaggacactaggttttcaaagaagtctggcagcacttgggttatagagggctcagcatgaccaaagtcctaaagattttacctcccagctttggttgtatgtgttcccaagtggtgaggtgagattgtggctggaggaagaaaaaggatggcatgaaagaatgacccttattgtggtctgtccttctaatcaacataattagggcagcttaccccaacatgaaaatgatgacctggccatttttaatggccagagcttgaagtctggtctctcattttgtttcagaaatgagtgagaggccttcctgcagagcagtcaggagaaatggtggagcctggggccctggaatggctgaccctgtgcctagagagctgatggcaagggctgtctggcatggctcatttgggtggggtttccccaggcataccttagttccctgatcctctgcaaagagtagctcattgactgagcaagcgcttcaggaggactgtgctggttgttcccagaccaaagagagtcacttttgactccatcaacttcaaggggacagagcctaggcagcagattctcctaatttttaacactaaaattcaaggaagcagtggaggaaagaatgcattactaccacagatagaaataggggactcatagaactctcgactagtacctgtcagctctcaaatgcattcttgtgtctttgcttgagctgccaaagaagggtcacaaagtgttcttcctcatggaagaagtgcctcggggttgcagggctgcaaagtgacaactgcactgaatgacactttattttttggctttggcttattatttagcactgggaggcccaggggaattggtgattacagtagcactttgggaagttaaagccccctttgggcttgctttggagagatgatggcatgcttggtattccatttggataatcaggaagcctccctagtccatccatattgtgtcagagtgggattaacaaccctggaagagtccactgccaaaagagtagttgctttcctggaatttccaaagcttttggattttctggatcaagtaacccactttttaaaacctgaggtcaggagttcgagaccagcctggtaacatggtgaaaccccgtctctattaaaaatagaaaaaattagccaggcatggtggcgggcacctatagtcccagctactcaggaggctgaggtaggagaattgcttgaacccaggagacagaggctgcattgagccaagatcacaccactgcactccagcctgggcagcagagcaagactccatctcaaaaaaaaaaaaaagaaaaagaaaaagaaggttaatccttcagttatggaggtgggatgaatagagcttgtttgatgttaaagtgggtaaggagggagtggccttgagacacttgtattccaaactctcctggaggtttccagtagcactactgttcctaaaagggtttcatttttaacttcatctgttttgttaacatccagtccaattgaggtgatctcagaggtgcatcaggacatctagcactggggaggccaccttgcccagatagttgaaaagaaaattggtctgggcagcctgttgtcttttgtcttcatgtaatgttttttctttgttttaaaggactaatgtttattacagtgttaaataaaagtgtaagatactaagtgtgtagaataaaagtgcaataacaaaagacaatgactttggcacacacttcagtctttatcctctctcctttcttgtgctacctggctctttccataatattgttacagcaggaccgtcttaattgtgtgcattttgaagagatgcgactctgggttaatcttcattagtgtaatattgaagggttgggtttggttttatagagtattctgtatacttgttgggatacacaaataccagatgtgctgtataataaagatcacattaacgttt

SEQ ID NO: 317400 - DNA, 5192 bp, Homo sapiens
aacggctaggtacgaggctgggtggtgactgaagaggcctctcttgggcattgtccagcccatgctccagggcatcatgaatcggctctgcaagtccaattctgagcagccaaacagaggactagatgattctacttgaaagcaaagacctttctctttcactctctagttatttccttccccctcaccttttggccatggggagaatttgacatttattcactataggacacactcccaagggaactggtgcttgctgggaaacttggaaccttcccaggcagggatgactcctggacagtgaagagttgaatgactgagcatattcagcagctcactgaagcgccaagctatccctttagcaaaaaagtgtctcagatgtgtaaaagctgaggaatgtggtgttctggcttcacaaatgaaaaggaggcagatgttaccattgtcttttcactgtatatacttctaagacagcaagcgggacactgcagtggcaatagtgttaaaaaatctcattctcatgatttttggctctagctaggaatagtttagtcaggactcagaaaatttgagcttagttctgggattatgaaaacatggggacaaaaacaataacttgtggatgtctggttcctgctgtctgcagccaggtatctcaggttgcaatggtcagaagtcccagtgagggagctagaaacagagctatctgttcctcatagtgccagtgtgtttacatttataggaccacatatccctggtttctgggggagggtttcactgttacatcaccaagaggccctgaaaagaggaaaaaaaaaaaaaaagaggccaggcatggtggctcacgcctgtaatctcagcactttggaaggctgaggcgggcggatcacaaggtccagagttcaagagcagcctggccaacatggtgaaaccccgtctctactaaagatacaaaaaattagccgggcgtggtggtgcatgcctgtaatccaagatactcaggaggctgaggcaggagaatcgcttgaacctgggaggcggaggttgcagtgagccgagatcatgccattgcactccagcctgggcgacagagtgagactctgtctcaaaaaaaaaaaaaaatagaatgtgtatgcatatatttgtgtgtatatgtatatatgtgtgtgtgtctatatctctatctatatagacatacacacaggagttattggatttagagttactgctaaccccagaacagaatctgttcttttacctttgagtcttttcttttgtttacctcttttcatctcaaagtgggaaagctccagataacatggtacttaggagtgagtgtctaagcaaaaccaacccaatgcgaagtatttgggtgagaactgagaggtgggagatgattggaggccatggcctatgtacaaacatactggaagaaaaccagcttgtttttaaaacttaacacaatcagaaatttttctttttgtgtttgaatctaacacactgacgtttggaaaacttgatcaatgagcttttaaccacgatttctcccgcaatttgttccttctttttacctttttaaaaatctgttagaagaaaaaaagcagcagacgaaagagaaaaaccctcctctggtagttctgtgtgtgcccctcacccctgtgtgctagtgtctgggaagtttccctgaaaggtgggaggcgggtgggtggtcttttggagggttcctcatgaagtgtgcttgaggaaagaaattctgattctaggcagaggaaggggaacaatttaaatattggtgcatctcagatgcacttgacttcaagccttcctcaaccaaactggtccattagattccgaaaaacaggtagacgaggaagtagacagtggaagtgagtagtctccctccatctgcctaatccccaataactgtggtctggcccctgtgttcagccccagagtttgtaaaacaggtccccaggtaggtgtataagatgagttgcaaattagccgggcatgctggcacgcaccagtaatcccagctacttgggaggctgaggcaggagaatcacttgaacccgggaggcagaggtcatggtgagccgagatcacgccactgcactccagccctgggcaacagagcgagactctatctcaaaaaaaaacaaaaaaaaaaaacaaaaaacaaagatgagtcgcacatctgctgctgggattttctagggttgtctatgacagaatgaccatcttttaaatattaatggagtataaatggagtctataatgggtctttcatataacttttaactctttggctatcctgggctctgatcatgatatgtttgagcatagtagctccctaaactcttggagcctttcagaaattccatgtagtgctaataacctttttacttgcaaatgataaagtaactgactcagtgtctttgggctctgcaggctttagccttgttttggtaggatgttcagtatattctcagaattttaccacctatttagctatacttcaagtactctattctctgcactaacttactgtccttctgggaactatgatggggcttcaagggagtcaggtgtcaagaaaggaggggtaagtactctctacttgctggaaaatcattgtaagtctgttgtgtatgaaattttaggaaaagtcttatatagttccctttccagactgttttcttttgactctaactataatcataagtctgtgcttccattatgaaggtcacattcctagcattcttgggaagtattagctcatactctcattcacatatgggaggttagatttttttcctctacccagagtccctttttagtttaccccacggcttagtttgctgtcagataccagttctctagcagattccccaacagttttttccccagtggggagggtggaagggagggactgatataagtaaggagatgagtagttgtgttacagttcattttctttaaaaaaaagtattttgagaaaaggtgcaaaatattcttgaaagtctctaggccagccaaagtccacatatggatatttggggatgttatttaaatactcagcaggctgagtgcaggtatacgtgtgtatagagtgtgtatactttgcttttgttttataacattgtcagctaattttggctttgttctttggcatccattcttattataagtgatggaatgccatgaaatgtactgtattgtatattacttgggaggacactaggttttcaaagaagtctggcagcacttgggttatagagggctcagcatgaccaaagtcctaaagattttacctcccagctttggttgtatgtgttcccaagtggtgaggtgagattgtggctggaggaagaaaaaggatggcatgaaagaatgacccttattgtggtctgtccttctaatcaacataattagggcagcttaccccaacatgaaaatgatgacctggccatttttaatggccagagcttgaagtctggtctctcattttgtttcagaaatgagtgagaggccttcctgcagagcagtcaggagaaatggtggagcctggggccctggaatggctgaccctgtgcctagagagctgatggcaagggctgtctggcatggctcatttgggtggggtttccccaggcataccttagttccctgatcctctgcaaagagtagctcattgactgagcaagcgcttcaggaggactgtgctggttgttcccagaccaaagagagtcacttttgactccatcaacttcaaggggacagagcctaggcagcagattctcctaatttttaacactaaaattcaaggaagcagtggaggaaagaatgcattactaccacagatagaaataggggactcatagaactctcgactagtacctgtcagctctcaaatgcattcttgtgtctttgcttgagctgccaaagaagggtcacaaagtgttcttcctcatggaagaagtgcctcggggttgcagggctgcaaagtgacaactgcactgaatgacactttattttttggctttggcttattatttagcactgggaggcccaggggaattggtgattacagtagcactttgggaagttaaagccccctttgggcttgctttggagagatgatggcatgcttggtattccatttggataatcaggaagcctccctagtccatccatattgtgtcagagtgggattaacaaccctggaagagtccactgccaaaagagtagttgctttcctggaatttccaaagcttttggattttctggatcaagtaacccactttttaaaacctgaggtcaggagttcgagaccagcctggtaacatggtgaaaccccgtctctattaaaaatagaaaaaattagccaggcatggtggcgggcacctatagtcccagctactcaggaggctgaggtaggagaattgcttgaacccaggagacagaggctgcattgagccaagatcacaccactgcactccagcctgggcagcagagcaagactccatctcaaaaaaaaaaaaaagaaaaagaaaaagaaggttaatccttcagttatggaggtgggatgaatagagcttgtttgatgttaaagtgggtaaggagggagtggccttgagacacttgtattccaaactctcctggaggtttccagtagcactactgttcctaaaagggtttcatttttaacttcatctgttttgttaacatccagtccaattgaggtgatctcagaggtgcatcaggacatctagcactggggaggccaccttgcccagatagttgaaaagaaaattggtctgggcagcctgttgtcttttgtcttcatgtaatgttttttctttgttttaaaggactaatgtttattacagtgttaaataaaagtgtaagatactaagtgtgtagaataaaagtgcaataacaaaagacaatgactttggcacacacttcagtctttatcctctctcctttcttgtgctacctggctctttccataatattgttacagcaggaccgtcttaattgtgtgcattttgaagagatgcgactctgggttaatcttcattagtgtaatattgaagggttgggtttggttttatagagtattctgtatacttgttgggatacacaaataccagatgtgctgtataataaagatcacattaacgttt

SEQ ID NO: 317401 - DNA, 4996 bp, Homo sapiens
ttcgacggtgttctgcctccacaggtgcaggtctcccagacagacctgtacctgaatggacgaaactctctgccttcctgttgcaagtgcccctgtaagggaggacctcccacattgtactggaatcatctgtgacttgcaagagcaggaagtggagggcagcagctgcctgtgtctgcacccagaacaccgtcgagcttcgacggtgttctggcttcacaaatgaaaaggaggcagatgttaccattgtcttttcactgtatatacttctaagacagcaagcgggacactgcagtggcaatagtgttaaaaaatctcattctcatgatttttggctctagctaggaatagtttagtcaggactcagaaaatttgagcttagttctgggattatgaaaacatggggacaaaaacaataacttgtggatgtctggttcctgctgtctgcagccaggtatctcaggttgcaatggtcagaagtcccagtgagggagctagaaacagagctatctgttcctcatagtgccagtgtgtttacatttataggaccacatatccctggtttctgggggagggtttcactgttacatcaccaagaggccctgaaaagaggaaaaaaaaaaaaaaagaggccaggcatggtggctcacgcctgtaatctcagcactttggaaggctgaggcgggcggatcacaaggtccagagttcaagagcagcctggccaacatggtgaaaccccgtctctactaaagatacaaaaaattagccgggcgtggtggtgcatgcctgtaatccaagatactcaggaggctgaggcaggagaatcgcttgaacctgggaggcggaggttgcagtgagccgagatcatgccattgcactccagcctgggcgacagagtgagactctgtctcaaaaaaaaaaaaaaatagaatgtgtatgcatatatttgtgtgtatatgtatatatgtgtgtgtgtctatatctctatctatatagacatacacacaggagttattggatttagagttactgctaaccccagaacagaatctgttcttttacctttgagtcttttcttttgtttacctcttttcatctcaaagtgggaaagctccagataacatggtacttaggagtgagtgtctaagcaaaaccaacccaatgcgaagtatttgggtgagaactgagaggtgggagatgattggaggccatggcctatgtacaaacatactggaagaaaaccagcttgtttttaaaacttaacacaatcagaaatttttctttttgtgtttgaatctaacacactgacgtttggaaaacttgatcaatgagcttttaaccacgatttctcccgcaatttgttccttctttttacctttttaaaaatctgttagaagaaaaaaagcagcagacgaaagagaaaaaccctcctctggtagttctgtgtgtgcccctcacccctgtgtgctagtgtctgggaagtttccctgaaaggtgggaggcgggtgggtggtcttttggagggttcctcatgaagtgtgcttgaggaaagaaattctgattctaggcagaggaaggggaacaatttaaatattggtgcatctcagatgcacttgacttcaagccttcctcaaccaaactggtccattagattccgaaaaacaggtagacgaggaagtagacagtggaagtgagtagtctccctccatctgcctaatccccaataactgtggtctggcccctgtgttcagccccagagtttgtaaaacaggtccccaggtaggtgtataagatgagttgcaaattagccgggcatgctggcacgcaccagtaatcccagctacttgggaggctgaggcaggagaatcacttgaacccgggaggcagaggtcatggtgagccgagatcacgccactgcactccagccctgggcaacagagcgagactctatctcaaaaaaaaacaaaaaaaaaaaacaaaaaacaaagatgagtcgcacatctgctgctgggattttctagggttgtctatgacagaatgaccatcttttaaatattaatggagtataaatggagtctataatgggtctttcatataacttttaactctttggctatcctgggctctgatcatgatatgtttgagcatagtagctccctaaactcttggagcctttcagaaattccatgtagtgctaataacctttttacttgcaaatgataaagtaactgactcagtgtctttgggctctgcaggctttagccttgttttggtaggatgttcagtatattctcagaattttaccacctatttagctatacttcaagtactctattctctgcactaacttactgtccttctgggaactatgatggggcttcaagggagtcaggtgtcaagaaaggaggggtaagtactctctacttgctggaaaatcattgtaagtctgttgtgtatgaaattttaggaaaagtcttatatagttccctttccagactgttttcttttgactctaactataatcataagtctgtgcttccattatgaaggtcacattcctagcattcttgggaagtattagctcatactctcattcacatatgggaggttagatttttttcctctacccagagtccctttttagtttaccccacggcttagtttgctgtcagataccagttctctagcagattccccaacagttttttccccagtggggagggtggaagggagggactgatataagtaaggagatgagtagttgtgttacagttcattttctttaaaaaaaagtattttgagaaaaggtgcaaaatattcttgaaagtctctaggccagccaaagtccacatatggatatttggggatgttatttaaatactcagcaggctgagtgcaggtatacgtgtgtatagagtgtgtatactttgcttttgttttataacattgtcagctaattttggctttgttctttggcatccattcttattataagtgatggaatgccatgaaatgtactgtattgtatattacttgggaggacactaggttttcaaagaagtctggcagcacttgggttatagagggctcagcatgaccaaagtcctaaagattttacctcccagctttggttgtatgtgttcccaagtggtgaggtgagattgtggctggaggaagaaaaaggatggcatgaaagaatgacccttattgtggtctgtccttctaatcaacataattagggcagcttaccccaacatgaaaatgatgacctggccatttttaatggccagagcttgaagtctggtctctcattttgtttcagaaatgagtgagaggccttcctgcagagcagtcaggagaaatggtggagcctggggccctggaatggctgaccctgtgcctagagagctgatggcaagggctgtctggcatggctcatttgggtggggtttccccaggcataccttagttccctgatcctctgcaaagagtagctcattgactgagcaagcgcttcaggaggactgtgctggttgttcccagaccaaagagagtcacttttgactccatcaacttcaaggggacagagcctaggcagcagattctcctaatttttaacactaaaattcaaggaagcagtggaggaaagaatgcattactaccacagatagaaataggggactcatagaactctcgactagtacctgtcagctctcaaatgcattcttgtgtctttgcttgagctgccaaagaagggtcacaaagtgttcttcctcatggaagaagtgcctcggggttgcagggctgcaaagtgacaactgcactgaatgacactttattttttggctttggcttattatttagcactgggaggcccaggggaattggtgattacagtagcactttgggaagttaaagccccctttgggcttgctttggagagatgatggcatgcttggtattccatttggataatcaggaagcctccctagtccatccatattgtgtcagagtgggattaacaaccctggaagagtccactgccaaaagagtagttgctttcctggaatttccaaagcttttggattttctggatcaagtaacccactttttaaaacctgaggtcaggagttcgagaccagcctggtaacatggtgaaaccccgtctctattaaaaatagaaaaaattagccaggcatggtggcgggcacctatagtcccagctactcaggaggctgaggtaggagaattgcttgaacccaggagacagaggctgcattgagccaagatcacaccactgcactccagcctgggcagcagagcaagactccatctcaaaaaaaaaaaaaagaaaaagaaaaagaaggttaatccttcagttatggaggtgggatgaatagagcttgtttgatgttaaagtgggtaaggagggagtggccttgagacacttgtattccaaactctcctggaggtttccagtagcactactgttcctaaaagggtttcatttttaacttcatctgttttgttaacatccagtccaattgaggtgatctcagaggtgcatcaggacatctagcactggggaggccaccttgcccagatagttgaaaagaaaattggtctgggcagcctgttgtcttttgtcttcatgtaatgttttttctttgttttaaaggactaatgtttattacagtgttaaataaaagtgtaagatactaagtgtgtagaataaaagtgcaataacaaaagacaatgactttggcacacacttcagtctttatcctctctcctttcttgtgctacctggctctttccataatattgttacagcaggaccgtcttaattgtgtgcattttgaagagatgcgactctgggttaatcttcattagtgtaatattgaagggttgggtttggttttatagagtattctgtatacttgttgggatacacaaataccagatgtgctgtataataaagatcacattaacgttt

SEQ ID NO: 317402 - DNA, 1221 bp, Homo sapiens
  misc_feature (11)..(11): n is a, c, g, or t
tcccgtctggnatgcaaaatgtcctctggctgcaaagtgacaactgcactgaatgacactttattttttggctttggcttattatttagcactgggaggcccaggggaattggtgattacagtagcactttgggaagttaaagccccctttgggcttgctttggagagatgatggcatgcttggtattccatttggataatcaggaagcctccctagtccatccatattgtgtcagagtgggattaacaaccctggaagagtccactgccaaaagagtagttgctttcctggaatttccaaagcttttggattttctggatcaagtaacccactttttaaaacctgaggtcaggagttcgagaccagcctggtaacatggtgaaaccccgtctctattaaaaatagaaaaaattagccaggcatggtggcgggcacctatagtcccagctactcaggaggctgaggtaggagaattgcttgaacccaggagacagaggctgcattgagccaagatcacaccactgcactccagcctgggcagcagagcaagactccatctcaaaaaaaaaaaaaagaaaaagaaaaagaaggttaatccttcagttatggaggtgggatgaatagagcttgtttgatgttaaagtgggtaaggagggagtggccttgagacacttgtattccaaactctcctggaggtttccagtagcactactgttcctaaaagggtttcatttttaacttcatctgttttgttaacatccagtccaattgaggtgatctcagaggtgcatcaggacatctagcactggggaggccaccttgcccagatagttgaaaagaaaattggtctgggcagcctgttgtcttttgtcttcatgtaatgttttttctttgttttaaaggactaatgtttattacagtgttaaataaaagtgtaagatactaagtgtgtagaataaaagtgcaataacaaaagacaatgactttggcacacacttcagtctttatcctctctcctttcttgtgctacctggctctttccataatattgttacagcaggaccgtcttaattgtgtgcattttgaagagatgcgactctgggttaatcttcattagtgtaatattgaagggttgggtttggttttatagagtattctgtatacttgttgggatacacaaataccagatgtgctgtataataaagatcacattaacgttt

SEQ ID NO: 317403 - DNA, 1246 bp, Homo sapiens
gccatggggcagcgagcccgtctcgggtcccggccccggcggcggcggaatgatccgcgagctgtgccggggcttcggccgctaccgccgctacctgggacggctgcgacagaacctgcgcgagacccagaagttcttccgcgacatcaagtgctcccacaaccacacttgtctctcctccctcacgggcggcggcggggccgagcgcggccctgcaggcgatgtcgccgaaaccgggctgcaggcgggccaactgagctgcatttccttcccacctaaggaagagaagtacctccagcagattgtggactgcctcccttgcatactgatcctcggccaggattgtaacgtcaagtgccagctgttgaatctgctgttgggggtgcaggtgcttcccaccaccaagctgggcagtgaggagagctgtaagcttcggcgcctccgcttcacctatgggactcagactcgggtcagcctggcgctccctggacagtatgaactagtgcacacgctggttgctcatcagggcaactgggagaccatccctgaggaggatctggaggtccaagagaacaatgaggatgctgctcatgttttagcggaactggaggtaacgatgcaccatgctctcttacaggaagtggacgttgtggtagcaccatgccaaggcctccggcccacagtggatgttctgggtgacttggtgaatgatttcttgcctgtgataacctatgcactccacaaagatgaactctctgagagggatgagcaagagcttcaggaaatccgaaagtatttctcctttcctgtattctttttcaaagtgccgaaactgggctcggagataatagactcctcaaccaggagaatggagagcgaaagatcaccgctttatcgccagctaattgacctgggctatctgagcagcagtcactggaactgtggggctcctggccaggatactaaagctcagagcatgttggtggaacagagtgaaaagctgagacacttgagcacattttctcaccaggtgttacagactcgcctggtggatgcagccaaggccctgaacctggtgcactgccactgccttgacatctttattaaccaggcatttgacatgcagcgggacctgcagatcactcccaaacgtctggaatatactcgaaaaaaggagaatgagtgtatgaatcatatgatgaatattgccgaaagcaggaggaaatgaaggatatgattgtggaga

SEQ ID NO: 317404 - DNA, 1681 bp, Homo sapiens
ctgagggaaagcttcgtcggaaccctggaacgatgtctgcagagcctggagaagtctcaggatgtctcagttcacatcaccagtaattatctcaaacagatcttaaatgctgcctatcatgttgaagtcacgtttcactcagggtcgtcagttacaaggatgctatgggagcaaatcaaacagatcatccagcgcatcacatgggtgagcccacctgccatcactctggaatggaagaggaaggtggcccaggaagccattgagagcctcagcgcctccaaattggctaagagcatttgcagccaattccggactcggctcaatagttcccacgaggcttttgcagcctccttgcggcagctggaagctggccactcaggccggttagagaaaacggaagatctatggctgagggttcggaaagatcatgctccccgcctggcccgcctttctctggaaagccgttctttacaggatgtcttgcttcatcgtaaacctaaactgggacaggaactgggccggggccagtatggtgtggtatacctgtgtgacaactggggaggacacttcccttgtgccctcaaatcagttgtccctccagatgagaagcactggaatgatctggctttggaatttcactatatgaggtctctgccgaagcatgagcgattggtggatctccatggttcagtcattgactacaactatggtggtggctccagcattgctgtgctcctcattatggagcggctacaccgggatctctacacagggctgaaggctgggctgaccctggagacacgtttgcagatagcactagatgtggtggagggaatccgcttcctgcacagccagggacttgtccatcgtgatatcaaactgaaaaatgtgctgctggataagcagaaccgtgccaagatcactgacttaggattctgcaagccagaggccatgatgtcaggcagcattgtggggacaccaatccatatggcccctgaacttttcacaggggctcgcccagaacgtcttcctgtgtttgatgaggagtgctggcagttgatggaagcctgttgggatggcgaccccttgaagaggcctctcttgggcattgtccagcccatgctccagggcatcatgaatcggctctgcaagtccaattctgagcagccaaacagaggactagatgattctacttgaaagcaaagacctttctctttcactctctagttatttccttccccctcaccttttggccatggggagaatttgacatttattcactataggacacactcccaagggaactggtgcttgctgggaaacttggaaccttcccaggcagggatgactcctggacagtgaagagttgaatgactgagcatattcagcagctcactgaagcgccaagctatccctttagcctgctgtgtcactgctatgtgcttccaaccgcgccggggagtcccactggtctagaaaccggtctgaggcaccggctagttcccgacttgtttctcagtggtgaacacttctgggcctggtctggagtggcacaggtctcaaaagtggaacgtggaatggggggaaaaaaagcgtttgcccaaaaaaagaaaaaacacacaacaaaaagaaaaaaaagggggggaatacaagggggccacccttaagccaagaaaaaggg

SEQ ID NO: 317405 - DNA, 830 bp, Homo sapiens
ctgagggaaagcttcgtcggaaccctggaacgatgtctgcagagcctggagaagtctcaggatgtctcagttcacatcaccagtaattatctcaaacagatcttaaatgctgcctatcatgttgaagtcacgtttcactcagggtcgtcagttacaaggatgctatgggagcaaatcaaacagatcatccagcgcatcacatgggtgagcccacctgccatcactctggaatggaagaggaaggtggcccaggaagccattgagagcctcagcgcctccaaattggctaagagcatttgcagccaattccggactcggctcaatagttcccacgaggcttttgcagcctccttgcggcagctggaagctggccactcaggccggttagagaaaacggaagatctatggctgagggttcggaaagatcatgctccccgcctggcccgcctttctctggaaagccgttctttacaggatgtcttgcttcatcgtaaacctaaactgggacaggaactgggccggggccagtatggtgtggtatacctgtgtgacaactggggaggacacttcccttgtgccctcaaatcagttgtccctccagatgagaagcactggaatgatctggctttggaatttcactatatgaggtctctgccgaagcatgagcgattggtggatctccatggttcagtcattgactacaactatggtggtggctccagcattgctgtgctcctcattatggagcggctacaccgggatctctacacagggctgaaggctgggctgaccctggaggtcgacgcggccgcgaatttagtagtagtaga

SEQ ID NO: 317406 - DNA, 386 bp, Homo sapiens
gctgcggtgatctagaggatcccagttcgacggagactctcatgtaatgttttttctttgttttaaaggactaatgtttattacagtgttaaataaaagtgtaagatactaagtgtgtagaataaaagtgcaataacaaaagacaatgactttggcacacacttcagtctttatcctctctcctttcttgtgctacctggctctttccataatattgttacagcaggaccgtcttaattgtgtgcattttgaagagatgcgactctgggttaatcttcattagtgtaatattgaagggttgggtttggttttatagagtattctgtatacttgttgggatacacaaataccagatgtgctgtataataaagatcacattaacgttt

SEQ ID NO: 317407 - DNA, 347 bp, Homo sapiens
actgaggcaaggtggtgtagatgctgctgcctgactctctgtggctcattacgtttcatcctttcttgccatcagggaagtacgataattccgtggatgtctacgcttttggaattcttttctggtatatctgctcaggctctgtcaagctccctgaggcatttgagaggtgtgctagcaaagaccatctctggaacaatgtgcggaggggtaagagccacaagtactaccttgtcctaactcccctggctagcgcagactgagcccaggcaatgtcaccgggtctcctgtcatcccatctggccactccatagcagggccgtagatacgtttaaactgtcatgaat

SEQ ID NO: 317408 - DNA, 372 bp, Homo sapiens
ccattgtcttttcactgtatatacttctaagacagcaagcgggacactgcagtggcaatagtgttaaaaaatctcattctcatgatttttggctctagctaggaatagtttagtcaggactcagaaaatttgagcttagttctgggattatgaaaacatggggacaaaaacaataacttgtggatgtctggttcctgctgtctgcagccaggtatctcaggttgcaatggtcagaagtcccagtgagggagctagaaacagagctatctgttcctcatagtgccagtgtgtttacatttataggaccacatatccctggtttctgggggagggtttcactgttacatcaccaagaggccctgaaaagaggaa

SEQ ID NO: 317409 - DNA, 2684 bp, Homo sapiens
  misc_feature (30)..(30): n is a, c, g, or t
  misc_feature (36)..(36): n is a, c, g, or t
  misc_feature (103)..(103): n is a, c, g, or t
  misc_feature (117)..(117): n is a, c, g, or t
ccgccgccgccgccgccgccgcccggcgcnaccgcncccggccccggccccgcggggcctcccgcccccacccagggggcgtcgccgccgccgtcgccgcggnctccgcggcccgcnaggcgcccgaattccggctccctcccgccggccggggtgcgcgggccggcggggccggcccgggcgggccatgcgttcggcgcggcccagcccggccggccgggggcggcgccccgagcccgggccccgcgcggcccgcgcccccggcccccgctgagccctgggggccccgctgcggccgaggccatgttcccggtgtttccttgcacgctgctggccccccccttccccgtgctgggcctggactcccggggggtgggcggcctcatgaactccttcccgccacctcagggtcacgcccagaaccccctgcaggtcggggctgagctccagtcccgcttctttgcctcccagggctgcgcccagagtccattccaggccgcgccggcgcccccgcccacgccccaggccccggcggccgagcccctccaggtggacttgctcccggtgctcgccgccgcccaggagtccgccgcggctgctgcggccgctgccgccgctgctgccgccgtcgctgccgcgcccccggcccctgccgccgcctctacggtggacacagcggccctgaagcagcctccggcgccccctccgccacccccgccagtgtcggcgcccgcggccgaggccgcgccccccgcctccgccgccactatcgccgcggcggcggccaccgccgtcgtagccccaacctcgacggtcgccgtggccccggtcgcgtctgccttggagaagaagacaaagagcaaggggccctacatctgcgctctgtgcgccaaggagttcaagaacggctacaatctccggaggcacgaagccatccacacgggagccaaggccggccgggtcccctcgggtgctatgaagatgccgaccatggtgcccctgagcctcctgagcgtgccccagctgagcggagccggcgggggagggggagaggcgggtgccggcggcggcgctgccgcagtggccgccggtggcgtggtgaccacgaccgcctcggggaagcgcatccggaagaaccatgcctgcgagatgtgtggcaaggccttccgcgacgtctaccacctgaaccgacacaagctgtcgcactcggacgagaagccctaccagtgcccggtgtgccagcagcgcttcaagcgcaaggaccgcatgagctaccacgtgcgctcacatgacggcgctgtgcacaagccctacaactgctcccactgtggcaagagcttctcccggccggatcacctcaacagtcacgtcagacaagtgcactcaacagaacggcccttcaaatgtgagaaatgtgaggcagctttcgccacgaaggatcggctgcgggcgcacacagtacgacacgaggagaaagtgccatgtcacgtgtgtggcaagatgctgagctcggcttatatttcggaccacatgaaggtgcacagccagggtcctcaccatgtctgtgagctctgcaacaaaggtactggtgaggtttgtccaatggcggcggcagcggcagcggcggcagcggcagcagcggcagcagtagcagcccctcccacagctgtgggctccctctcgggggcggagggggtgcctgtgagctctcagccacttccctcccaaccctggtgagctccaagttggttgcgggggagaggggagaatggagtagagtcccttggtacaagctcctctcccccctcttttcccaccaactcctatttccctaccaaccaaggagcctccagaaggaaaggaggaagaaatgttttcttaggggaattcgctaggttttaacgatttgtttctcctgctcctcttctatcagacctgaccccacacaaacctgtcccctcggttgtgttgaagtcccctggacagtgggcaggggtggcagaggacacgagcagccactgcccgtaccccctctcctctctgtaagcccatgccctgtcttcccagggacttgtgagcctcttccctcgacggtcctcttctctccttccagtcctctccccctgctgtctgcagcccctccccggggagttggtgctttcttttccttttttttttttttccagggggagggaggagaggaaggagggggatcagagctgtcccaaagagggaaagcggtgaggtttgaggaggggcagaagcagggccggcaaaggttgtaccttcataaggtggtatggggggttggggtcaggccctgaacatcgtcctacttgagaatctgtcaggggaaaaagtcaaggggagcaggaggaagagccaggagggccagaggcagagaagagatggagtcttaggggccagggtgagcgaggggtccagggcctagaggtgcttcctgggggcgggggaatgcagccagtgtccccctcccctcttccaccccagctccagccctggtcttgtcttttcatccctcttccccacgacagaagaagttgtggccctggccatgtcatcgtgttcctgtgtcccctgcatgtaccccaccctccaccccttccttttgcgcggaccccattacaataaattttaaataaaatcctgtttctggctctgga

SEQ ID NO: 317410 - DNA, 2909 bp, Homo sapiens
  misc_feature (30)..(30): n is a, c, g, or t
  misc_feature (36)..(36): n is a, c, g, or t
  misc_feature (103)..(103): n is a, c, g, or t
  misc_feature (117)..(117): n is a, c, g, or t
ccgccgccgccgccgccgccgcccggcgcnaccgcncccggccccggccccgcggggcctcccgcccccacccagggggcgtcgccgccgccgtcgccgcggnctccgcggcccgcnaggcgcccgaattccggctccctcccgccggccggggtgcgcgggccggcggggccggcccgggcgggccatgcgttcggcgcggcccagcccggccggccgggggcggcgccccgagcccgggccccgcgcggcccgcgcccccggcccccgctgagccctgggggccccgctgcggccgaggccatgttcccggtgtttccttgcacgctgctggccccccccttccccgtgctgggcctggactcccggggggtgggcggcctcatgaactccttcccgccacctcagggtcacgcccagaaccccctgcaggtcggggctgagctccagtcccgcttctttgcctcccagggctgcgcccagagtccattccaggccgcgccggcgcccccgcccacgccccaggccccggcggccgagcccctccaggtggacttgctcccggtgctcgccgccgcccaggagtccgccgcggctgctgcggccgctgccgccgctgctgccgccgtcgctgccgcgcccccggcccctgccgccgcctctacggtggacacagcggccctgaagcagcctccggcgccccctccgccacccccgccagtgtcggcgcccgcggccgaggccgcgccccccgcctccgccgccactatcgccgcggcggcggccaccgccgtcgtagccccaacctcgacggtcgccgtggccccggtcgcgtctgccttggagaagaagacaaagagcaaggggccctacatctgcgctctgtgcgccaaggagttcaagaacggctacaatctccggaggcacgaagccatccacacgggagccaaggccggccgggtcccctcgggtgctatgaagatgccgaccatggtgcccctgagcctcctgagcgtgccccagctgagcggagccggcgggggagggggagaggcgggtgccggcggcggcgctgccgcagtggccgccggtggcgtggtgaccacgaccgcctcggggaagcgcatccggaagaaccatgcctgcgagatgtgtggcaaggccttccgcgacgtctaccacctgaaccgacacaagctgtcgcactcggacgagaagccctaccagtgcccggtgtgccagcagcgcttcaagcgcaaggaccgcatgagctaccacgtgcgctcacatgacggcgctgtgcacaagccctacaactgctcccactgtggcaagagcttctcccggccggatcacctcaacagtcacgtcagacaagtgcactcaacagaacggcccttcaaatgtgagaaatgtgaggcagctttcgccacgaaggatcggctgcgggcgcacacagtacgacacgaggagaaagtgccatgtcacgtgtgtggcaagatgctgagctcggcttatatttcggaccacatgaaggtgcacagccagggtcctcaccatgtctgtgagctctgcaacaaaggcttcaccacggcagcatacctgcgcatccacgcggtgaaggaccacgggctccaggccccgcgggctgaccgcatcctgtgcaagctgtgcagcgtgcactgcaagacccctgcccagctggccggccacatgcagacccatctggggggggccggcccccctgtcccgggagacgccccccagccacagcccacctgctgagggggacccccgcacccaccaggtactggtgaggtttgtccaatggcggcggcagcggcagcggcggcagcggcagcagcggcagcagtagcagcccctcccacagctgtgggctccctctcgggggcggagggggtgcctgtgagctctcagccacttccctcccaaccctggtgagctccaagttggttgcgggggagaggggagaatggagtagagtcccttggtacaagctcctctcccccctcttttcccaccaactcctatttccctaccaaccaaggagcctccagaaggaaaggaggaagaaatgttttcttaggggaattcgctaggttttaacgatttgtttctcctgctcctcttctatcagacctgaccccacacaaacctgtcccctcggttgtgttgaagtcccctggacagtgggcaggggtggcagaggacacgagcagccactgcccgtaccccctctcctctctgtaagcccatgccctgtcttcccagggacttgtgagcctcttccctcgacggtcctcttctctccttccagtcctctccccctgctgtctgcagcccctccccggggagttggtgctttcttttccttttttttttttttccagggggagggaggagaggaaggagggggatcagagctgtcccaaagagggaaagcggtgaggtttgaggaggggcagaagcagggccggcaaaggttgtaccttcataaggtggtatggggggttggggtcaggccctgaacatcgtcctacttgagaatctgtcaggggaaaaagtcaaggggagcaggaggaagagccaggagggccagaggcagagaagagatggagtcttaggggccagggtgagcgaggggtccagggcctagaggtgcttcctgggggcgggggaatgcagccagtgtccccctcccctcttccaccccagctccagccctggtcttgtcttttcatccctcttccccacgacagaagaagttgtggccctggccatgtcatcgtgttcctgtgtcccctgcatgtaccccaccctccaccccttccttttgcgcggaccccattacaataaattttaaataaaatcctgtttctggctctgga

SEQ ID NO: 317411 - DNA, 2537 bp, Homo sapiens
gaattccgggggttccggcgctccgcggccccaagcgccctcctttcctccctccgccggccggggttgcgggcgcggggcgccgcgggccatgcgatctcggcgcggcccagcccggccggcggcgccccgcccccgctggagcctggggccccgctgcggccgaggccatgttcccggtgtttccttgcacgctgctggccccccccttccccgtgctgggcctggactcccggggggtgggcggcctcatgaactccttcccgccacctcagggtcacgcccagaaccccctgcaggtcggggctgagctccagtcccgcttctttgcctcccagggctgcgcccagagtccattccaggccgcgccggcgcccccgcccacgccccaggccccggcggccgagcccctccaggtggacttgctcccggtgctcgccgccgcccaggagtccgccgcggctgctgcggccgctgccgccgctgctgccgccgtcgctgccgcgcccccggcccctgccgccgcctctacggtggacacagcggccctgaagcagcctccggcgccccctccgccacccccgccagtgtcggcgcccgcggccgaggccgcgccccccgcctccgccgccactatcgccgcggcggcggccaccgccgtcgtagccccaacctcgacggtcgccgtggccccggtcgcgtctgccttggagaagaagacaaagagcaaggggccctacatctgcgctctgtgcgccaaggagttcaagaacggctacaatctccggaggcacgaagccatccacacgggagccaaggccggccgggtcccctcgggtgctatgaagatgccgaccatggtgcccctgagcctcctgagcgtgccccagctgagcggagccggcgggggagggggagaggcgggtgccggcggcggcgctgccgcagtggccgccggtggcgtggtgaccacgaccgcctcggggaagcgcatccggaagaaccatgcctgcgagatgtgtggcaaggccttccgcgacgtctaccacctgaaccgacacaagctgtcgcactcggacgagaagccctaccagtgcccggtgtgccagcagcgcttcaagcgcaaggaccgcatgagctaccacgtgcgctcacatgacggcgctgtgcacaagccctacaactgctcccactgtggcaagagcttctcccggccggatcacctcaacagtcacgtcagacaagtgcactcaacagaacggcccttcaaatgtgagaaatgtgaggcagctttcgccacgaaggatcggctgcgggcgcacacagtacgacacgaggagaaagtgccatgtcacgtgtgtggcaagatgctgagctcggcttatatttcggaccacatgaaggtgcacagccagggtcctcaccatgtctgtgagctctgcaacaaaggtacatgccgagggctgccgggaggcggcggcagcggcagcagcggcagcagtagcagcccctcccacagctgtgggctccctctcgggggcggagggggtgcctgtgagctctcagccacttccctcccaaccctggtgagctccaagttggttgcgggggagaggggagaatggagtagagtcccttggtacaagctcctctcccccctcttttcccaccaactcctatttccctaccaaccaaggagcctccagaaggaaaggaggaagaaatgttttcttaggggaattcgctaggttttaacgatttgtttctcctgctcctcttctatcagacctgaccccacacaaacctgtcccctcggttgtgttgaagtcccctggacagtgggcaggggtggcagaggacacgagcagccactgcccgtaccccctctcctctctgtaagcccatgccctgtcttcccagggacttgtgagcctcttccctcgacggtcctcttctctccttccagtcctctccccctgctgtctgcagcccctccccggggagttggtgctttcttttccttttttttttttttccagggggagggaggagaggaaggagggggatcagagctgtcccaaagagggaaagcggtgaggtttgaggaggggcagaagcagggccggcaaaggttgtaccttcataaggtggtatggggggttggggtcaggccctgaacatcgtcctacttgagaatctgtcaggggaaaaagtcaaggggagcaggaggaagagccaggagggccagaggcagagaagagatggagtcttaggggccagggtgagcgaggggtccagggcctagaggtgcttcctgggggcgggggaatgcagccagtgtccccctcccctcttccaccccagctccagccctggtcttgtcttttcatccctcttccccacgacagaagaagttgtggccctggccatgtcatcgtgttcctgtgtcccctgcatgtaccccaccctccaccccttccttttgcgcggaccccattacaataaattttaaataaaatcctgtttctggctctgga

SEQ ID NO: 317412 - DNA, 3360 bp, Homo sapiens
  misc_feature (30)..(30): n is a, c, g, or t
  misc_feature (36)..(36): n is a, c, g, or t
  misc_feature (103)..(103): n is a, c, g, or t
  misc_feature (117)..(117): n is a, c, g, or t
ccgccgccgccgccgccgccgcccggcgcnaccgcncccggccccggccccgcggggcctcccgcccccacccagggggcgtcgccgccgccgtcgccgcggnctccgcggcccgcnaggcgcccgaattccggctccctcccgccggccggggtgcgcgggccggcggggccggcccgggcgggccatgcgttcggcgcggcccagcccggccggccgggggcggcgccccgagcccgggccccgcgcggcccgcgcccccggcccccgctgagccctgggggccccgctgcggccgaggccatgttcccggtgtttccttgcacgctgctggccccccccttccccgtgctgggcctggactcccggggggtgggcggcctcatgaactccttcccgccacctcagggtcacgcccagaaccccctgcaggtcggggctgagctccagtcccgcttctttgcctcccagggctgcgcccagagtccattccaggccgcgccggcgcccccgcccacgccccaggccccggcggccgagcccctccaggtggacttgctcccggtgctcgccgccgcccaggagtccgccgcggctgctgcggccgctgccgccgctgctgccgccgtcgctgccgcgcccccggcccctgccgccgcctctacggtggacacagcggccctgaagcagcctccggcgccccctccgccacccccgccagtgtcggcgcccgcggccgaggccgcgccccccgcctccgccgccactatcgccgcggcggcggccaccgccgtcgtagccccaacctcgacggtcgccgtggccccggtcgcgtctgccttggagaagaagacaaagagcaaggggccctacatctgcgctctgtgcgccaaggagttcaagaacggctacaatctccggaggcacgaagccatccacacgggagccaaggccggccgggtcccctcgggtgctatgaagatgccgaccatggtgcccctgagcctcctgagcgtgccccagctgagcggagccggcgggggagggggagaggcgggtgccggcggcggcgctgccgcagtggccgccggtggcgtggtgaccacgaccgcctcggggaagcgcatccggaagaaccatgcctgcgagatgtgtggcaaggccttccgcgacgtctaccacctgaaccgacacaagctgtcgcactcggacgagaagccctaccagtgcccggtgtgccagcagcgcttcaagcgcaaggaccgcatgagctaccacgtgcgctcacatgacggcgctgtgcacaagccctacaactgctcccactgtggcaagagcttctcccggtgtgcacggggcctcggccgcccgctaggccgtggggagggagggacgcgacggaggtggcctggccgtggctggcggggagggaggcggctgctgaggctggggaaggggagccactcccagggcggagggaggaagcctctcccggttaccagggagcaaggggtggtcctttgtcgaggaggtgggccttggggttgacggaagcttcgcgtgggaggaggcggcggcggcggcagcggctgctgggctccagggagggatttcctgcttaagtgtcgctgtgacggcctgggctccgggaggaggcgcagggatcctcggaaaggcctgtggtgcggtttggtggatttggggcgcaccacctccgccctaaccccaaccccaacgtgtccccaggccggatcacctcaacagtcacgtcagacaagtgcactcaacagaacggcccttcaaatgtgaggtaggaagcccgcctcctcctgtcttggttttcatgattttgatcctcatggtagctgtctgagtcagtctctcagaccccctttttctctctcttctttttgcctttttgctccattttctcatcccttcttcaaggcctcatcatgtcactcccatttcctacagatcaaagatccccaaggctctgattcctttaatctcttgctcccccctccccagcccaccaagctttaactctcctgtgacaccccccacgcccctcccccctcctcagaaatgtgaggcagctttcgccacgaaggatcggctgcgggcgcacacagtacgacacgaggagaaagtgccatgtcacgtgtgtggcaagatgctgagctcggcttatatttcggaccacatgaaggtgcacagccagggtcctcaccatgtctgtgagctctgcaacaaaggtactggtgaggtttgtccaatggcggcggcagcggcagcggcggcagcggcagcagcggcagcagtagcagcccctcccacagctgtgggctccctctcgggggcggagggggtgcctgtgagctctcagccacttccctcccaaccctggtgagctccaagttggttgcgggggagaggggagaatggagtagagtcccttggtacaagctcctctcccccctcttttcccaccaactcctatttccctaccaaccaaggagcctccagaaggaaaggaggaagaaatgttttcttaggggaattcgctaggttttaacgatttgtttctcctgctcctcttctatcagacctgaccccacacaaacctgtcccctcggttgtgttgaagtcccctggacagtgggcaggggtggcagaggacacgagcagccactgcccgtaccccctctcctctctgtaagcccatgccctgtcttcccagggacttgtgagcctcttccctcgacggtcctcttctctccttccagtcctctccccctgctgtctgcagcccctccccggggagttggtgctttcttttccttttttttttttttccagggggagggaggagaggaaggagggggatcagagctgtcccaaagagggaaagcggtgaggtttgaggaggggcagaagcagggccggcaaaggttgtaccttcataaggtggtatggggggttggggtcaggccctgaacatcgtcctacttgagaatctgtcaggggaaaaagtcaaggggagcaggaggaagagccaggagggccagaggcagagaagagatggagtcttaggggccagggtgagcgaggggtccagggcctagaggtgcttcctgggggcgggggaatgcagccagtgtccccctcccctcttccaccccagctccagccctggtcttgtcttttcatccctcttccccacgacagaagaagttgtggccctggccatgtcatcgtgttcctgtgtcccctgcatgtaccccaccctccaccccttccttttgcgcggaccccattacaataaattttaaataaaatcctgtttctggctctgga

SEQ ID NO: 317413 - DNA, 3309 bp, Homo sapiens
  misc_feature (30)..(30): n is a, c, g, or t
  misc_feature (36)..(36): n is a, c, g, or t
  misc_feature (103)..(103): n is a, c, g, or t
  misc_feature (117)..(117): n is a, c, g, or t
ccgccgccgccgccgccgccgcccggcgcnaccgcncccggccccggccccgcggggcctcccgcccccacccagggggcgtcgccgccgccgtcgccgcggnctccgcggcccgcnaggcgcccgaattccggctccctcccgccggccggggtgcgcgggccggcggggccggcccgggcgggccatgcgttcggcgcggcccagcccggccggccgggggcggcgccccgagcccgggccccgcgcggcccgcgcccccggcccccgctgagccctgggggccccgctgcggccgaggccatgttcccggtgtttccttgcacgctgctggccccccccttccccgtgctgggcctggactcccggggggtgggcggcctcatgaactccttcccgccacctcagggtcacgcccagaaccccctgcaggtcggggctgagctccagtcccgcttctttgcctcccagggctgcgcccagagtccattccaggccgcgccggcgcccccgcccacgccccaggccccggcggccgagcccctccaggtggacttgctcccggtgctcgccgccgcccaggagtccgccgcggctgctgcggccgctgccgccgctgctgccgccgtcgctgccgcgcccccggcccctgccgccgcctctacggtggacacagcggccctgaagcagcctccggcgccccctccgccacccccgccagtgtcggcgcccgcggccgaggccgcgccccccgcctccgccgccactatcgccgcggcggcggccaccgccgtcgtagccccaacctcgacggtcgccgtggccccggtcgcgtctgccttggagaagaagacaaagagcaaggggccctacatctgcgctctgtgcgccaaggagttcaagaacggctacaatctccggaggcacgaagccatccacacgggagccaaggccggccgggtcccctcgggtgctatgaagatgccgaccatggtgcccctgagcctcctgagcgtgccccagctgagcggagccggcgggggagggggagaggcgggtgccggcggcggcgctgccgcagtggccgccggtggcgtggtgaccacgaccgcctcggggaagcgcatccggaagaaccatgcctgcgagatgtgtggcaaggccttccgcgacgtctaccacctgaaccgacacaagctgtcgcactcggacgagaagccctaccagtgcccggtgtgccagcagcgcttcaagcgcaaggaccgcatgagctaccacgtgcgctcacatgacggcgctgtgcacaagccctacaactgctcccactgtggcaagagcttctcccggtgtgcacggggcctcggccgcccgctaggccgtggggagggagggacgcgacggaggtggcctggccgtggctggcggggagggaggcggctgctgaggctggggaaggggagccactcccagggcggagggaggaagcctctcccggttaccagggagcaaggggtggtcctttgtcgaggaggtgggccttggggttgacggaagcttcgcgtgggaggaggcggcggcggcggcagcggctgctgggctccagggagggatttcctgcttaagtgtcgctgtgacggcctgggctccgggaggaggcgcagggatcctcggaaaggcctgtggtgcggtttggtggatttggggcgcaccacctccgccctaaccccaaccccaacgtgtccccaggccggatcacctcaacagtcacgtcagacaagtgcactcaacagaacggcccttcaaatgtgagaaatgtgaggcagctttcgccacgaaggatcggctgcgggcgcacacagtacgacacgaggagaaagtgccatgtcacgtgtgtggcaagatgctgagctcggcttatatttcggaccacatgaaggtgcacagccagggtcctcaccatgtctgtgagctctgcaacaaaggcttcaccacggcagcatacctgcgcatccacgcggtgaaggaccacgggctccaggccccgcgggctgaccgcatcctgtgcaagctgtgcagcgtgcactgcaagacccctgcccagctggccggccacatgcagacccatctggggggggccggcccccctgtcccgggagacgccccccagccacagcccacctgctgagggggacccccgcacccaccaggtactggtgaggtttgtccaatggcggcggcagcggcagcggcggcagcggcagcagcggcagcagtagcagcccctcccacagctgtgggctccctctcgggggcggagggggtgcctgtgagctctcagccacttccctcccaaccctggtgagctccaagttggttgcgggggagaggggagaatggagtagagtcccttggtacaagctcctctcccccctcttttcccaccaactcctatttccctaccaaccaaggagcctccagaaggaaaggaggaagaaatgttttcttaggggaattcgctaggttttaacgatttgtttctcctgctcctcttctatcagacctgaccccacacaaacctgtcccctcggttgtgttgaagtcccctggacagtgggcaggggtggcagaggacacgagcagccactgcccgtaccccctctcctctctgtaagcccatgccctgtcttcccagggacttgtgagcctcttccctcgacggtcctcttctctccttccagtcctctccccctgctgtctgcagcccctccccggggagttggtgctttcttttccttttttttttttttccagggggagggaggagaggaaggagggggatcagagctgtcccaaagagggaaagcggtgaggtttgaggaggggcagaagcagggccggcaaaggttgtaccttcataaggtggtatggggggttggggtcaggccctgaacatcgtcctacttgagaatctgtcaggggaaaaagtcaaggggagcaggaggaagagccaggagggccagaggcagagaagagatggagtcttaggggccagggtgagcgaggggtccagggcctagaggtgcttcctgggggcgggggaatgcagccagtgtccccctcccctcttccaccccagctccagccctggtcttgtcttttcatccctcttccccacgacagaagaagttgtggccctggccatgtcatcgtgttcctgtgtcccctgcatgtaccccaccctccaccccttccttttgcgcggaccccattacaataaattttaaataaaatcctgtttctggctctgga

SEQ ID NO: 317414 - DNA, 1833 bp, Homo sapiens
  misc_feature (30)..(30): n is a, c, g, or t
  misc_feature (36)..(36): n is a, c, g, or t
  misc_feature (103)..(103): n is a, c, g, or t
  misc_feature (117)..(117): n is a, c, g, or t
ccgccgccgccgccgccgccgcccggcgcnaccgcncccggccccggccccgcggggcctcccgcccccacccagggggcgtcgccgccgccgtcgccgcggnctccgcggcccgcnaggcgcccgaattccggctccctcccgccggccggggtgcgcgggccggcggggccggcccgggcgggccatgcgttcggcgcggcccagcccggccggccgggggcggcgccccgagcccgggccccgcgcggcccgcgcccccggcccccgctgagccctgggggccccgctgcggccgaggccatgttcccggtgtttccttgcacgctgctggccccccccttccccgtgctgggcctggactcccggggggtgggcggcctcatgaactccttcccgccacctcagggtcacgcccagaaccccctgcaggtcggggctgagctccagtcccgcttctttgcctcccagggctgcgcccagagtccattccaggccggatcacctcaacagtcacgtcagacaagtgcactcaacagaacggcccttcaaatgtgagaaatgtgaggcagctttcgccacgaaggatcggctgcgggcgcacacagtacgacacgaggagaaagtgccatgtcacgtgtgtggcaagatgctgagctcggcttatatttcggaccacatgaaggtgcacagccagggtcctcaccatgtctgtgagctctgcaacaaaggtactggtgaggtttgtccaatggcggcggcagcggcagcggcggcagcggcagcagcggcagcagtagcagcccctcccacagctgtgggctccctctcgggggcggagggggtgcctgtgagctctcagccacttccctcccaaccctggtgagctccaagttggttgcgggggagaggggagaatggagtagagtcccttggtacaagctcctctcccccctcttttcccaccaactcctatttccctaccaaccaaggagcctccagaaggaaaggaggaagaaatgttttcttaggggaattcgctaggttttaacgatttgtttctcctgctcctcttctatcagacctgaccccacacaaacctgtcccctcggttgtgttgaagtcccctggacagtgggcaggggtggcagaggacacgagcagccactgcccgtaccccctctcctctctgtaagcccatgccctgtcttcccagggacttgtgagcctcttccctcgacggtcctcttctctccttccagtcctctccccctgctgtctgcagcccctccccggggagttggtgctttcttttccttttttttttttttccagggggagggaggagaggaaggagggggatcagagctgtcccaaagagggaaagcggtgaggtttgaggaggggcagaagcagggccggcaaaggttgtaccttcataaggtggtatggggggttggggtcaggccctgaacatcgtcctacttgagaatctgtcaggggaaaaagtcaaggggagcaggaggaagagccaggagggccagaggcagagaagagatggagtcttaggggccagggtgagcgaggggtccagggcctagaggtgcttcctgggggcgggggaatgcagccagtgtccccctcccctcttccaccccagctccagccctggtcttgtcttttcatccctcttccccacgacagaagaagttgtggccctggccatgtcatcgtgttcctgtgtcccctgcatgtaccccaccctccaccccttccttttgcgcggaccccattacaataaattttaaataaaatcctgtttctggctctgga

SEQ ID NO: 317415 - DNA, 3118 bp, Homo sapiens
  misc_feature (30)..(30): n is a, c, g, or t
  misc_feature (36)..(36): n is a, c, g, or t
  misc_feature (103)..(103): n is a, c, g, or t
  misc_feature (117)..(117): n is a, c, g, or t
ccgccgccgccgccgccgccgcccggcgcnaccgcncccggccccggccccgcggggcctcccgcccccacccagggggcgtcgccgccgccgtcgccgcggnctccgcggcccgcnaggcgcccgaattccggctccctcccgccggccggggtgcgcgggccggcggggccggcccgggcgggccatgcgttcggcgcggcccagcccggccggccgggggcggcgccccgagcccgggccccgcgcggcccgcgcccccggcccccgctgagccctgggggccccgctgcggccgaggccatgttcccggtgtttccttgcacgctgctggccccccccttccccgtgctgggcctggactcccggggggtgggcggcctcatgaactccttcccgccacctcagggtcacgcccagaaccccctgcaggtcggggctgagctccagtcccgcttctttgcctcccagggctgcgcccagagtccattccaggccgcgccggcgcccccgcccacgccccaggccccggcggccgagcccctccaggtggacttgctcccggtgctcgccgccgcccaggagtccgccgcggctgctgcggccgctgccgccgctgctgccgccgtcgctgccgcgcccccggcccctgccgccgcctctacggtggacacagcggccctgaagcagcctccggcgccccctccgccacccccgccagtgtcggcgcccgcggccgaggccgcgccccccgcctccgccgccactatcgccgcggcggcggccaccgccgtcgtagccccaacctcgacggtcgccgtggccccggtcgcgtctgccttggagaagaagacaaagagcaaggggccctacatctgcgctctgtgcgccaaggagttcaagaacggctacaatctccggaggcacgaagccatccacacgggagccaaggccggccgggtcccctcgggtgctatgaagatgccgaccatggtgcccctgagcctcctgagcgtgccccagctgagcggagccggcgggggagggggagaggcgggtgccggcggcggcgctgccgcagtggccgccggtggcgtggtgaccacgaccgcctcggggaagcgcatccggaagaaccatgcctgcgagatgtgtggcaaggccttccgcgacgtctaccacctgaaccgacacaagctgtcgcactcggacgagaagccctaccagtgcccggtgtgccagcagcgcttcaagcgcaaggaccgcatgagctaccacgtgcgctcacatgacggcgctgtgcacaagccctacaactgctcccactgtggcaagagcttctcccggccggatcacctcaacagtcacgtcagacaagtgcactcaacagaacggcccttcaaatgtgagaaatgtgaggcagctttcgccacgaaggatcggctgcgggcgcacacagtacgacacgaggagaaagtgccatgtcacgtgtgtggcaagatgctgagctcggcttatatttcggaccacatgaaggtgcacagccagggtcctcaccatgtctgtgagctctgcaacaaaggtacatgccgagggctgccgggagggccaggggcagagggtgggcgcctggccagacgccttgccacggatacgggttaagggtgctgtagccaagagctcgtggcgtctagattcctacaagaggtcaagggagcagcggggggacacctgaatgaacatcattagactctaagaagtcctggttggaagagatgatctgccagagaggttgaacctcctggtaatgtgtggggaaagcgggagtggaacttggctgctctggggaaggagtagtcaagaaagccagttccaggggtcacaaggcaaggtttccgctgcgcagccacaaggtcttgtctccagctcctggggcaggtggagtacacgggccgggctttaccagcacgcacccattcagatcgcgctgtgatccgtggtgtttctcctgtgcaggtactggtgaggtttgtccaatggcggcggcagcggcagcggcggcagcggcagcagcggcagcagtagcagcccctcccacagctgtgggctccctctcgggggcggagggggtgcctgtgagctctcagccacttccctcccaaccctggtgagctccaagttggttgcgggggagaggggagaatggagtagagtcccttggtacaagctcctctcccccctcttttcccaccaactcctatttccctaccaaccaaggagcctccagaaggaaaggaggaagaaatgttttcttaggggaattcgctaggttttaacgatttgtttctcctgctcctcttctatcagacctgaccccacacaaacctgtcccctcggttgtgttgaagtcccctggacagtgggcaggggtggcagaggacacgagcagccactgcccgtaccccctctcctctctgtaagcccatgccctgtcttcccagggacttgtgagcctcttccctcgacggtcctcttctctccttccagtcctctccccctgctgtctgcagcccctccccggggagttggtgctttcttttccttttttttttttttccagggggagggaggagaggaaggagggggatcagagctgtcccaaagagggaaagcggtgaggtttgaggaggggcagaagcagggccggcaaaggttgtaccttcataaggtggtatggggggttggggtcaggccctgaacatcgtcctacttgagaatctgtcaggggaaaaagtcaaggggagcaggaggaagagccaggagggccagaggcagagaagagatggagtcttaggggccagggtgagcgaggggtccagggcctagaggtgcttcctgggggcgggggaatgcagccagtgtccccctcccctcttccaccccagctccagccctggtcttgtcttttcatccctcttccccacgacagaagaagttgtggccctggccatgtcatcgtgttcctgtgtcccctgcatgtaccccaccctccaccccttccttttgcgcggaccccattacaataaattttaaataaaatcctgtttctggctctgga

SEQ ID NO: 317416 - DNA, 2715 bp, Homo sapiens
  misc_feature (30)..(30): n is a, c, g, or t
  misc_feature (36)..(36): n is a, c, g, or t
  misc_feature (103)..(103): n is a, c, g, or t
  misc_feature (117)..(117): n is a, c, g, or t
ccgccgccgccgccgccgccgcccggcgcnaccgcncccggccccggccccgcggggcctcccgcccccacccagggggcgtcgccgccgccgtcgccgcggnctccgcggcccgcnaggcgcccgaattccggctccctcccgccggccggggtgcgcgggccggcggggccggcccgggcgggccatgcgttcggcgcggcccagcccggccggccgggggcggcgccccgagcccgggccccgcgcggcccgcgcccccggcccccgctgagccctgggggccccgctgcggccgaggccatgttcccggtgtttccttgcacgctgctggccccccccttccccgtgctgggcctggactcccggggggtgggcggcctcatgaactccttcccgccacctcagggtcacgcccagaaccccctgcaggtcggggctgagctccagtcccgcttctttgcctcccagggctgcgcccagagtccattccaggccgcgccggcgcccccgcccacgccccaggccccggcggccgagcccctccaggtggacttgctcccggtgctcgccgccgcccaggagtccgccgcggctgctgcggccgctgccgccgctgctgccgccgtcgctgccgcgcccccggcccctgccgccgcctctacggtggacacagcggccctgaagcagcctccggcgccccctccgccacccccgccagtgtcggcgcccgcggccgaggccgcgccccccgcctccgccgccactatcgccgcggcggcggccaccgccgtcgtagccccaacctcgacggtcgccgtggccccggtcgcgtctgccttggagaagaagacaaagagcaaggggccctacatctgcgctctgtgcgccaaggagttcaagaacggctacaatctccggaggcacgaagccatccacacgggagccaaggccggccgggtcccctcgggtgctatgaagatgccgaccatggtgcccctgagcctcctgagcgtgccccagctgagcggagccggcgggggagggggagaggcgggtgccggcggcggcgctgccgcagtggccgccggtggcgtggtgaccacgaccgcctcggggaagcgcatccggaagaaccatgcctgcgagatgtgtggcaaggccttccgcgacgtctaccacctgaaccgacacaagctgtcgcactcggacgagaagccctaccagtgcccggtgtgccagcagcgcttcaagcgcaaggaccgcatgagctaccacgtgcgctcacatgacggcgctgtgcacaagccctacaactgctcccactgtggcaagagcttctcccggccggatcacctcaacagtcacgtcagacaagtgcactcaacagaacggcccttcaaatgtgagaaatgtgaggcagctttcgccacgaaggatcggctgcgggcgcacacagtacgacacgaggagaaagtgccatgtcacgtgtgtggcaagatgctgagctcggcttatatttcggaccacatgaaggtgcacagccagggtcctcaccatgtctgtgagctctgcaacaaaggtactggtgaggtttgtccaatggcggcggcagcggcagcggcggcagcggcagcagcggcagcagtagcagcccctcccacagctgtgggctccctctcgggggcggagggggtgcctgtgagctctcagccacttccctcccaaccctggtgagctccaagttggttgcgggggagaggggagaatggagtagagtcccttggtacaagctcctctcccccctcttttcccaccaactcctatttccctaccaaccaaggagcctccagaaggaaaggaggaagaaatgttttcttaggggaattcgctaggttttaacgatttgtttctcctgctcctcttctatcagacctgaccccacacaaacctgtcccctcggttgtgttgaagtcccctggacagtgggcaggggtggcagaggacacgagcagccactgcccgtaccccctctcctctctgtaagcccatgccctgtcttcccagggacttgtgagcctcttccctcgacggtcctcttctctccttccagtcctctccccctgctgtctgcagcccctccccggggagttggtgctttcttttccttttttttttttttccagggggagggaggagaggaaggagggggatcagagctgtcccaaagagggaaagcggtgaggtttgaggaggggcagaagcagggccggcaaaggttgtaccttcataaggtggtatggggggttggggtcaggccctgaacatcgtcctacttgagaatctgtcaggggaaaaagtcaaggggagcaggaggaagagccaggagggccagaggcagagaagagatggagtcttaggggccagggtgagcgaggggtccagggcctagaggtgcttcctgggggcgggggaatgcagccagtgtccccctcccctcttccaccccagctccagccctggtcttgtcttttcatccctcttccccacgacagaagaagttgtggccctggccatgtcatcgtgttcctgtgtcccctgcatgtaccccaccctccaccccttccttttgcgcggaccccattacaataaattttaaataaaatcctgtttctggctctggatctgggagacagacacagacacaaacgcaga

SEQ ID NO: 317417 - DNA, 2834 bp, Homo sapiens
  misc_feature (30)..(30): n is a, c, g, or t
  misc_feature (36)..(36): n is a, c, g, or t
  misc_feature (103)..(103): n is a, c, g, or t
  misc_feature (117)..(117): n is a, c, g, or t
ccgccgccgccgccgccgccgcccggcgcnaccgcncccggccccggccccgcggggcctcccgcccccacccagggggcgtcgccgccgccgtcgccgcggnctccgcggcccgcnaggcgcccgaattccggctccctcccgccggccggggtgcgcgggccggcggggccggcccgggcgggccatgcgttcggcgcggcccagcccggccggccgggggcggcgccccgagcccgggccccgcgcggcccgcgcccccggcccccgctgagccctgggggccccgctgcggccgaggccatgttcccggtgtttccttgcacgctgctggccccccccttccccgtgctgggcctggactcccggggggtgggcggcctcatgaactccttcccgccacctcagggtcacgcccagaaccccctgcaggtcggggctgagctccagtcccgcttctttgcctcccagggctgcgcccagagtccattccaggccgcgccggcgcccccgcccacgccccaggccccggcggccgagcccctccaggtggacttgctcccggtgctcgccgccgcccaggagtccgccgcggctgctgcggccgctgccgccgctgctgccgccgtcgctgccgcgcccccggcccctgccgccgcctctacggtggacacagcggccctgaagcagcctccggcgccccctccgccacccccgccagtgtcggcgcccgcggccgaggccgcgccccccgcctccgccgccactatcgccgcggcggcggccaccgccgtcgtagccccaacctcgacggtcgccgtggccccggtcgcgtctgccttggagaagaagacaaagagcaaggggccctacatctgcgctctgtgcgccaaggagttcaagaacggctacaatctccggaggcacgaagccatccacacgggagccaaggccggccgggtcccctcgggtgctatgaagatgccgaccatggtgcccctgagcctcctgagcgtgccccagctgagcggagccggcgggggagggggagaggcgggtgccggcggcggcgctgccgcagtggccgccggtggcgtggtgaccacgaccgcctcggggaagcgcatccggaagaaccatgcctgcgagatgtgtggcaaggccttccgcgacgtctaccacctgaaccgacacaagctgtcgcactcggacgagaagccctaccagtgcccggtgtgccagcagcgcttcaagcgcaaggaccgcatgagctaccacgtgcgctcacatgacggcgctgtgcacaagccctacaactgctcccactgtggcaagagcttctcccggccggatcacctcaacagtcacgtcagacaagtgcactcaacagaacggcccttcaaatgtgagaaatgtgaggcagctttcgccacgaaggatcggctgcgggcgcacacagtacgacacgaggagaaagtgccatgtcacgtgtgtggcaagatgctgagctcggcttatatttcggaccacatgaaggtgcacagccagggtcctcaccatgtctgtgagctctgcaacaaaggtactggtgaggtttgtccaatggcggcggcagcggcagcggcggcagcggcagcagcggcagcagtagcagcccctcccacagctgtgggctccctctcgggggcggagggggtgcctgtgagctctcagccacttccctcccaaccctggtgagctccaagttggttgcgggggagaggggagaatggagtagagtcccttggtacaagctcctctcccccctcttttcccaccaactcctatttccctaccaaccaaggagcctccagaaggaaaggaggaagaaatgttttcttaggggaattcgctaggttttaacgatttgtttctcctgctcctcttctatcagacctgaccccacacaaacctgtcccctcggttgtgttgaagtcccctggacagtgggcaggggtggcagaggacacgagcagccactgcccgtaccccctctcctctctgtaagcccatgccctgtcttcccagggacttgtgagcctcttccctcgacggtcctcttctctccttccagtcctctccccctgctgtctgcagcccctccccggggagttggtgctttcttttccttttttttttttttccagggggagggaggagaggaaggagggggatcagagctgtcccaaagagggaaagcggtgaggtttgaggaggggcagaagcagggccggcaaaggttgtaccttcataaggtggtatggggggttggggtcaggccctgaacatcgtcctacttgagaatctgtcaggggaaaaagtcaaggggagcaggaggaagagccaggagggccagaggcagagaagagatggagtcttaggggccagggtgagcgaggggtccagggcctagaggtgcttcctgggggcgggggaatgcagccagtgtccccctcccctcttccaccccagctccagccctggtcttgtcttttcatccctcttccccacgacagaagaagttgtggccctggccatgtcatcgtgttcctgtgtcccctgcatgtaccccaccctccaccccttccttttgcgcggaccccagttttcgcagtataaattttaaagtataaaaaaaaacaacacacaagaaaaacaaccacccggaggaccacacataatggcaggggtcagcggaaaaaaagggggtaatgctgagtgggcagccggtggccaataagctgatacccgtgaccaagcattactggtacaagggtgtgaaatagaggggtccc

SEQ ID NO: 317418 - DNA, 2726 bp, Homo sapiens
  misc_feature (30)..(30): n is a, c, g, or t
  misc_feature (36)..(36): n is a, c, g, or t
  misc_feature (103)..(103): n is a, c, g, or t
  misc_feature (117)..(117): n is a, c, g, or t
ccgccgccgccgccgccgccgcccggcgcnaccgcncccggccccggccccgcggggcctcccgcccccacccagggggcgtcgccgccgccgtcgccgcggnctccgcggcccgcnaggcgcccgaattccggctccctcccgccggccggggtgcgcgggccggcggggccggcccgggcgggccatgcgttcggcgcggcccagcccggccggccgggggcggcgccccgagcccgggccccgcgcggcccgcgcccccggcccccgctgagccctgggggccccgctgcggccgaggccatgttcccggtgtttccttgcacgctgctggccccccccttccccgtgctgggcctggactcccggggggtgggcggcctcatgaactccttcccgccacctcagggtcacgcccagaaccccctgcaggtcggggctgagctccagtcccgcttctttgcctcccagggctgcgcccagagtccattccaggccgcgccggcgcccccgcccacgccccaggccccggcggccgagcccctccaggtggacttgctcccggtgctcgccgccgcccaggagtccgccgcggctgctgcggccgctgccgccgctgctgccgccgtcgctgccgcgcccccggcccctgccgccgcctctacggtggacacagcggccctgaagcagcctccggcgccccctccgccacccccgccagtgtcggcgcccgcggccgaggccgcgccccccgcctccgccgccactatcgccgcggcggcggccaccgccgtcgtagccccaacctcgacggtcgccgtggccccggtcgcgtctgccttggagaagaagacaaagagcaaggggccctacatctgcgctctgtgcgccaaggagttcaagaacggctacaatctccggaggcacgaagccatccacacgggagccaaggccggccgggtcccctcgggtgctatgaagatgccgaccatggtgcccctgagcctcctgagcgtgccccagctgagcggagccggcgggggagggggagaggcgggtgccggcggcggcgctgccgcagtggccgccggtggcgtggtgaccacgaccgcctcggggaagcgcatccggaagaaccatgcctgcgagatgtgtggcaaggccttccgcgacgtctaccacctgaaccgacacaagctgtcgcactcggacgagaagccctaccagtgcccggtgtgccagcagcgcttcaagcgcaaggaccgcatgagctaccacgtgcgctcacatgacggcgctgtgcacaagccctacaactgctcccactgtggcaagagcttctcccggccggatcacctcaacagtcacgtcagacaagtgcactcaacagaacggcccttcaaatgtgagaaatgtgaggcagctttcgccacgaaggatcggctgcgggcgcacacagtacgacacgaggagaaagtgccatgtcacgtgtgtggcaagatgctgagctcggcttatatttcggaccacatgaaggtgcacagccagggtcctcaccatgtctgtgagctctgcaacaaaggtactggtgaggtttgtccaatggcggcggcagcggcagcggcggcagcggcagcagcggcagcagtagcagcccctcccacagctgtgggctccctctcgggggcggagggggtgcctgtgagctctcagccacttccctcccaaccctggtgagctccaagttggttgcgggggagaggggagaatggagtagagtcccttggtacaagctcctctcccccctcttttcccaccaactcctatttccctaccaaccaaggagcctccagaaggaaaggaggaagaaatgttttcttaggggaattcgctaggttttaacgatttgtttctcctgctcctcttctatcagacctgaccccacacaaacctgtcccctcggttgtgttgaagtcccctggacagtgggcaggggtggcagaggacacgagcagccactgcccgtaccccctctcctctctgtaagcccatgccctgtcttcccagggacttgtgagcctcttccctcgacggtcctcttctctccttccagtcctctccccctgctgtctgcagcccctccccggggagttggtgctttcttttccttttttttttttttccagggggagggaggagaggaaggagggggatcagagctgtcccaaagagggaaagcggtgaggtttgaggaggggcagaagcagggccggcaaaggttgtaccttcataaggtggtatggggggttggggtcaggccctgaacatcgtcctacttgagaatctgtcaggggaaaaagtcaaggggagcaggaggaagagccaggagggccagaggcagagaagagatggagtcttaggggccagggtgagcgaggggtccagggcctagaggtgcttcctgggggcgggggaatgcagccagtgtccccctcccctcttccaccccagctccagccctggtcttgtcttttcatccctcttccccacgacagaagaagttgtggccctggccatgtcatcgtgttcctgtgtcccctgcatgtaccccaccctccaccccttccttttgcgcggaccccattacaataaattttaaataaaatcctgtttctggctctggaaaaaaaaaaaatacttaacaaaaaaaaaagtcgtatcgatgt

SEQ ID NO: 317419 - DNA, 2884 bp, Homo sapiens
  misc_feature (30)..(30): n is a, c, g, or t
  misc_feature (36)..(36): n is a, c, g, or t
  misc_feature (103)..(103): n is a, c, g, or t
  misc_feature (117)..(117): n is a, c, g, or t
ccgccgccgccgccgccgccgcccggcgcnaccgcncccggccccggccccgcggggcctcccgcccccacccagggggcgtcgccgccgccgtcgccgcggnctccgcggcccgcnaggcgcccgaattccggctccctcccgccggccggggtgcgcgggccggcggggccggcccgggcgggccatgcgttcggcgcggcccagcccggccggccgggggcggcgccccgagcccgggccccgcgcggcccgcgcccccggcccccgctgagccctgggggccccgctgcggccgaggccatgttcccggtgtttccttgcacgctgctggccccccccttccccgtgctgggcctggactcccggggggtgggcggcctcatgaactccttcccgccacctcagggtcacgcccagaaccccctgcaggtcggggctgagctccagtcccgcttctttgcctcccagggctgcgcccagagtccattccaggccgcgccggcgcccccgcccacgccccaggccccggcggccgagcccctccaggtggacttgctcccggtgctcgccgccgcccaggagtccgccgcggctgctgcggccgctgccgccgctgctgccgccgtcgctgccgcgcccccggcccctgccgccgcctctacggtggacacagcggccctgaagcagcctccggcgccccctccgccacccccgccagtgtcggcgcccgcggccgaggccgcgccccccgcctccgccgccactatcgccgcggcggcggccaccgccgtcgtagccccaacctcgacggtcgccgtggccccggtcgcgtctgccttggagaagaagacaaagagcaaggggccctacatctgcgctctgtgcgccaaggagttcaagaacggctacaatctccggaggcacgaagccatccacacgggagccaaggccggccgggtcccctcgggtgctatgaagatgccgaccatggtgcccctgagcctcctgagcgtgccccagctgagcggagccggcgggggagggggagaggcgggtgccggcggcggcgctgccgcagtggccgccggtggcgtggtgaccacgaccgcctcggggaagcgcatccggaagaaccatgcctgcgagatgtgtggcaaggccttccgcgacgtctaccacctgaaccgacacaagctgtcgcactcggacgagaagccctaccagtgcccggtgtgccagcagcgcttcaagcgcaaggaccgcatgagctaccacgtgcgctcacatgacggcgctgtgcacaagccctacaactgctcccactgtggcaagagcttctcccggccggatcacctcaacagtcacgtcagacaagtgcactcaacagaacggcccttcaaatgtgagaaatgtgaggcagctttcgccacgaaggatcggctgcgggcgcacacagtacgacacgaggagaaagtgccatgtcacgtgtgtggcaagatgctgagctcggcttatatttcggaccacatgaaggtgcacagccagggtcctcaccatgtctgtgagctctgcaacaaaggtactggtgaggtttgtccaatggcggcggcagcggcagcggcggcagcggcagcagcggcagcagtagcagcccctcccacagctgtgggctccctctcgggggcggagggggtgcctgtgagctctcagccacttccctcccaaccctggtgagctccaagttggttgcgggggagaggggagaatggagtagagtcccttggtacaagctcctctcccccctcttttcccaccaactcctatttccctaccaaccaaggagcctccagaaggaaaggaggaagaaatgttttcttaggggaattcgctaggttttaacgatttgtttctcctgctcctcttctatcagacctgaccccacacaaacctgtcccctcggttgtgttgaagtcccctggacagtgggcaggggtggcagaggacacgagcagccactgcccgtaccccctctcctctctgtaagcccatgccctgtcttcccagggacttgtgagcctcttccctcgacggtcctcttctctccttccagtcctctccccctgctgtctgcagcccctccccggggagttggtgctttcttttccttttttttttttttccagggggagggaggagaggaaggagggggatcagagctgtcccaaagagggaaagcggtgaggtttgaggaggggcagaagcagggccggcaaaggttgtaccttcataaggtggtatggggggttggggtcaggccctgaacatcgtcctacttgagaatctgtcaggggaaaaagtcaaggggagcaggaggaagagccaggagggccagaggcagagaagagatggagtcttaggggccagggtgagcgaggggtccagggcctagaggtgcttcctgggggcgggggaatgcagccagtgtccccctcccctcttccaccccagctccagccctggtcttgtcttttcatccctcttccccacgacagaagaagttgtggccctggccatgtcatcgtgttcctgtgtcccctgcatgtaccccaccctccaccccttccttttgcgcggaccccattacaataaattttaaataaaatcctgtttctggctctggaaaaaaaaaaagaaaaaaaaaaaaaaaaaaaaaaaaaaaaaaaaaaaaaaaacaaaaaaaaaaaaaaaaaaaaaaaaaaaaaaaaaaattcaattgactgcccgtcctcatccaagggactgactgaaccttgcctgaactcacccaacttaatcggcttgaagtacatcctactttagctagctgtcgtaagagcgagca

SEQ ID NO: 317420 - DNA, 1655 bp, Homo sapiens
  misc_feature (30)..(30): n is a, c, g, or t
  misc_feature (36)..(36): n is a, c, g, or t
  misc_feature (103)..(103): n is a, c, g, or t
  misc_feature (117)..(117): n is a, c, g, or t
ccgccgccgccgccgccgccgcccggcgcnaccgcncccggccccggccccgcggggcctcccgcccccacccagggggcgtcgccgccgccgtcgccgcggnctccgcggcccgcnaggcgcccgaattccggctccctcccgccggccggggtgcgcgggccggcggggccggcccgggcgggccatgcgttcggcgcggcccagcccggccggccgggggcggcgccccgagcccgggccccgcgcggcccgcgcccccggcccccgctgagccctgggggccccgctgcggccgaggccatgttcccggtgtttccttgcacgctgctggccccccccttccccgtgctgggcctggactcccggggggtgggcggcctcatgaactccttcccgccacctcagggtcacgcccagaaccccctgcaggtcggggctgagctccagtcccgcttctttgcctcccagggctgcgcccagagtccattccaggccgcgccggcgcccccgcccacgccccaggccccggcggccgagcccctccaggtggacttgctcccggtgctcgccgccgcccaggagtccgccgcggcggcagcggcagcagcggcagcagtagcagcccctcccacagctgtgggctccctctcgggggcggagggggtgcctgtgagctctcagccacttccctcccaaccctggtgagctccaagttggttgcgggggagaggggagaatggagtagagtcccttggtacaagctcctctcccccctcttttcccaccaactcctatttccctaccaaccaaggagcctccagaaggaaaggaggaagaaatgttttcttaggggaattcgctaggttttaacgatttgtttctcctgctcctcttctatcagacctgaccccacacaaacctgtcccctcggttgtgttgaagtcccctggacagtgggcaggggtggcagaggacacgagcagccactgcccgtaccccctctcctctctgtaagcccatgccctgtcttcccagggacttgtgagcctcttccctcgacggtcctcttctctccttccagtcctctccccctgctgtctgcagcccctccccggggagttggtgctttcttttccttttttttttttttccagggggagggaggagaggaaggagggggatcagagctgtcccaaagagggaaagcggtgaggtttgaggaggggcagaagcagggccggcaaaggttgtaccttcataaggtggtatggggggttggggtcaggccctgaacatcgtcctacttgagaatctgtcaggggaaaaagtcaaggggagcaggaggaagagccaggagggccagaggcagagaagagatggagtcttaggggccagggtgagcgaggggtccagggcctagaggtgcttcctgggggcgggggaatgcagccagtgtccccctcccctcttccaccccagctccagccctggtcttgtcttttcatccctcttccccacgacagaagaagttgtggccctggccatgtcatcgtgttcctgtgtcccctgcatgtaccccaccctccaccccttccttttgcgcggaccccattacaataaattttaaataaaatcctgtttctggctctgga

SEQ ID NO: 317421 - DNA, 1476 bp, Homo sapiens
  misc_feature (30)..(30): n is a, c, g, or t
  misc_feature (36)..(36): n is a, c, g, or t
  misc_feature (103)..(103): n is a, c, g, or t
  misc_feature (117)..(117): n is a, c, g, or t
ccgccgccgccgccgccgccgcccggcgcnaccgcncccggccccggccccgcggggcctcccgcccccacccagggggcgtcgccgccgccgtcgccgcggnctccgcggcccgcnaggcgcccgaattccggctccctcccgccggccggggtgcgcgggccggcggggccggcccgggcgggccatgcgttcggcgcggcccagcccggccggccgggggcggcgccccgagcccgggccccgcgcggcccgcgcccccggcccccgctgagccctgggggccccgctgcggccgaggccatgttcccggtgtttccttgcacgctgctggccccccccttccccgtgctgggcctggactcccggggggtgggcggcctcatgaactccttcccgccacctcagggtcacgcccagaaccccctgcaggtcggggctgagctccagtcccgcttctgtgggctccctctcgggggcggagggggtgcctgtgagctctcagccacttccctcccaaccctggtgagctccaagttggttgcgggggagaggggagaatggagtagagtcccttggtacaagctcctctcccccctcttttcccaccaactcctatttccctaccaaccaaggagcctccagaaggaaaggaggaagaaatgttttcttaggggaattcgctaggttttaacgatttgtttctcctgctcctcttctatcagacctgaccccacacaaacctgtcccctcggttgtgttgaagtcccctggacagtgggcaggggtggcagaggacacgagcagccactgcccgtaccccctctcctctctgtaagcccatgccctgtcttcccagggacttgtgagcctcttccctcgacggtcctcttctctccttccagtcctctccccctgctgtctgcagcccctccccggggagttggtgctttcttttccttttttttttttttccagggggagggaggagaggaaggagggggatcagagctgtcccaaagagggaaagcggtgaggtttgaggaggggcagaagcagggccggcaaaggttgtaccttcataaggtggtatggggggttggggtcaggccctgaacatcgtcctacttgagaatctgtcaggggaaaaagtcaaggggagcaggaggaagagccaggagggccagaggcagagaagagatggagtcttaggggccagggtgagcgaggggtccagggcctagaggtgcttcctgggggcgggggaatgcagccagtgtccccctcccctcttccaccccagctccagccctggtcttgtcttttcatccctcttccccacgacagaagaagttgtggccctggccatgtcatcgtgttcctgtgtcccctgcatgtaccccaccctccaccccttccttttgcgcggaccccattacaataaattttaaataaaatcctgtttctggctctgga

SEQ ID NO: 317422 - DNA, 2118 bp, Homo sapiens
  misc_feature (30)..(30): n is a, c, g, or t
  misc_feature (36)..(36): n is a, c, g, or t
  misc_feature (103)..(103): n is a, c, g, or t
  misc_feature (117)..(117): n is a, c, g, or t
ccgccgccgccgccgccgccgcccggcgcnaccgcncccggccccggccccgcggggcctcccgcccccacccagggggcgtcgccgccgccgtcgccgcggnctccgcggcccgcnaggcgcccgaattccggctccctcccgccggccggggtgcgcgggccggcggggccggcccgggcgggccatgcgttcggcgcggcccagcccggccggccgggggcggcgccccgagcccgggccccgcgcggcccgcgcccccggcccccgctgagccctgggggccccgctgcggccgaggccatgttcccggtgtttccttgcacgctgctggccccccccttccccgtgctgggcctggactcccggggggtgggcggcctcatgaactccttcccgccacctcagggtcacgcccagaaccccctgcaggtcggggctgagctccagtcccgcttctttgcctcccagggctgcgcccagagtccattccaggccgcgccggcgcccccgcccacgccccaggccccggcggccgagcccctccaggtggacttgctcccggtgctcgccgccgcccaggagtccgccgcggctgctgcggccgctgccgccgctgctgccgccgtcgctgccgcgcccccggcccctgccgccgcctctacggtggacacagcggccctgaagcagcctccggcgccccctccgccacccccgccagtgtcggcgcccgcggccgaggccgcgccccccgcctccgccgccactatcgccgcggcggcggccaccgccgtcgtagccccaacctcgacggtcgccgtggccccggtcgcgtctgccttggagaagaagacaaagagcaaggggccctacatctgcgctctgtgcgccaaggagttcaagaacggctacaatctccggaggcacgaagccatccacacgggagccaaggccggccgggtcccctcgggtgctatgaagatgccgaccatggtgcccctgagcctcctgagcgtgccccagctgagcggagccggcgggggagggggagaggcgggtgccggcggcggcgctgccgcagtggccgccggtggcgtggtgaccacgaccgcctcggggaagcgcatccggaagaaccatgcctgcgagatgtgtggcaaggccttccgcgacgtctaccacctgaaccgacacaagctgtcgcactcggacgagaagccctaccagtgcccggtgtgccagcagcgcttcaagcgcaaggaccgcatgagctaccacgtgcgctcacatgacggcgctgtgcacaagccctacaactgctcccactgtggcaagagcttctcccggccggatcacctcaacagtcacgtcagacaagtgcactcaacagaacggcccttcaaatgtgagaaatgtgaggcagctttcgccacgaaggatcggctgcgggcgcacacagtacgacacgaggagaaagtgccatgtcacgtgtgtggcaagatgctgagctcggcttatatttcggaccacatgaaggtgcacagccagggtcctcaccatgtctgtgagctctgcaacaaaggcttcaccacggcagcatacctgcgcatccacgcggtgaaggaccacgggctccaggccccgcgggctgaccgcatcctgtgcaagctgtgcagcgtgcactgcaagacccctgcccagctggccggccacatgcagacccatctggggggggccggcccccctgtcccgggagacgccccccagccacagcccacctgctgagggggacccccgcacccaccaggtactggtgaggtttgtccaatggcggcggcagcggcagcggcggcagcggcagcagcggcagcagtagcagcccctcccacagctgtgggctccctctcgggggcggagggggtgcctgtgagctctcagccacttcctccagccctggtcttgtcttttcatccctcttccccacgacagaagaagttgtggccctggccatgtcatcgtgttcctgtgtcccctgcatgtaccccaccctccaccccttccttttgcgcggaccccattacaataaattttaaataaaatcctgtttctggctctgga

SEQ ID NO: 317423 - DNA, 1893 bp, Homo sapiens
  misc_feature (30)..(30): n is a, c, g, or t
  misc_feature (36)..(36): n is a, c, g, or t
  misc_feature (103)..(103): n is a, c, g, or t
  misc_feature (117)..(117): n is a, c, g, or t
ccgccgccgccgccgccgccgcccggcgcnaccgcncccggccccggccccgcggggcctcccgcccccacccagggggcgtcgccgccgccgtcgccgcggnctccgcggcccgcnaggcgcccgaattccggctccctcccgccggccggggtgcgcgggccggcggggccggcccgggcgggccatgcgttcggcgcggcccagcccggccggccgggggcggcgccccgagcccgggccccgcgcggcccgcgcccccggcccccgctgagccctgggggccccgctgcggccgaggccatgttcccggtgtttccttgcacgctgctggccccccccttccccgtgctgggcctggactcccggggggtgggcggcctcatgaactccttcccgccacctcagggtcacgcccagaaccccctgcaggtcggggctgagctccagtcccgcttctttgcctcccagggctgcgcccagagtccattccaggccgcgccggcgcccccgcccacgccccaggccccggcggccgagcccctccaggtggacttgctcccggtgctcgccgccgcccaggagtccgccgcggctgctgcggccgctgccgccgctgctgccgccgtcgctgccgcgcccccggcccctgccgccgcctctacggtggacacagcggccctgaagcagcctccggcgccccctccgccacccccgccagtgtcggcgcccgcggccgaggccgcgccccccgcctccgccgccactatcgccgcggcggcggccaccgccgtcgtagccccaacctcgacggtcgccgtggccccggtcgcgtctgccttggagaagaagacaaagagcaaggggccctacatctgcgctctgtgcgccaaggagttcaagaacggctacaatctccggaggcacgaagccatccacacgggagccaaggccggccgggtcccctcgggtgctatgaagatgccgaccatggtgcccctgagcctcctgagcgtgccccagctgagcggagccggcgggggagggggagaggcgggtgccggcggcggcgctgccgcagtggccgccggtggcgtggtgaccacgaccgcctcggggaagcgcatccggaagaaccatgcctgcgagatgtgtggcaaggccttccgcgacgtctaccacctgaaccgacacaagctgtcgcactcggacgagaagccctaccagtgcccggtgtgccagcagcgcttcaagcgcaaggaccgcatgagctaccacgtgcgctcacatgacggcgctgtgcacaagccctacaactgctcccactgtggcaagagcttctcccggccggatcacctcaacagtcacgtcagacaagtgcactcaacagaacggcccttcaaatgtgagaaatgtgaggcagctttcgccacgaaggatcggctgcgggcgcacacagtacgacacgaggagaaagtgccatgtcacgtgtgtggcaagatgctgagctcggcttatatttcggaccacatgaaggtgcacagccagggtcctcaccatgtctgtgagctctgcaacaaaggtactggtgaggtttgtccaatggcggcggcagcggcagcggcggcagcggcagcagcggcagcagtagcagcccctcccacagctgtgggctccctctcgggggcggagggggtgcctgtgagctctcagccacttcctccagccctggtcttgtcttttcatccctcttccccacgacagaagaagttgtggccctggccatgtcatcgtgttcctgtgtcccctgcatgtaccccaccctccaccccttccttttgcgcggaccccattacaataaattttaaataaaatcctgtttctggctctgga

SEQ ID NO: 317424 - DNA, 321 bp, Homo sapiens
aggtttgagggggaatgctggagattgtaatgggtatggagacatatcatataagtaatgctagggtgagcgaggggtccagggcctagaggtgcttcctgggggcgggggaatgcagccagtgtccccctcccctcttccaccccagctccagccctggtcttgtcttttcatccctcttccccacgacagaagaagttgtggccctggccatgtcatcgtgttcctgtgtcccctgcatgtaccccaccctccaccccttccttttgcgcggaccccattacaataaattttaaataaaatcctgtttctggctctgga

SEQ ID NO: 317425 - DNA, 335 bp, Homo sapiens
tgggcgcgtgggttgtgcgcgtgggttgtgggcgcacacagtacgacacgaggagaaagtgccatgtcacgtgtgtggcaagatgctgagctcggcttatatttcggaccacatgaaggtgcacagccagggtcctcaccatgtctgtgagctctgcaacaaaggcttcaccacggcagcatacctgcgcatccacgcggtgaaggaccacgggctccaggccccgcgggctgaccgcatcctgtgcaagctgtgcagcgtgcactgcaagacccctgcccagctggccggcccacaaccacgacgggggatcctgctagagatcgaccagcaag

SEQ ID NO: 317426 - DNA, 3084 bp, Homo sapiens
  misc_feature (30)..(30): n is a, c, g, or t
  misc_feature (36)..(36): n is a, c, g, or t
  misc_feature (103)..(103): n is a, c, g, or t
  misc_feature (117)..(117): n is a, c, g, or t
ccgccgccgccgccgccgccgcccggcgcnaccgcncccggccccggccccgcggggcctcccgcccccacccagggggcgtcgccgccgccgtcgccgcggnctccgcggcccgcnaggcgcccgaattccggctccctcccgccggccggggtgcgcgggccggcggggccggcccgggcgggccatgcgttcggcgcggcccagcccggccggccgggggcggcgccccgagcccgggccccgcgcggcccgcgcccccggcccccgctgagccctgggggccccgctgcggccgaggccatgttcccggtgtttccttgcacgctgctggccccccccttccccgtgctgggcctggactcccggggggtgggcggcctcatgaactccttcccgccacctcagggtcacgcccagaaccccctgcaggtcggggctgagctccagtcccgcttctttgcctcccagggctgcgcccagagtccattccaggccgcgccggcgcccccgcccacgccccaggccccggcggccgagcccctccaggtggacttgctcccggtgctcgccgccgcccaggagtccgccgcggctgctgcggccgctgccgccgctgctgccgccgtcgctgccgcgcccccggcccctgccgccgcctctacggtggacacagcggccctgaagcagcctccggcgccccctccgccacccccgccagtgtcggcgcccgcggccgaggccgcgccccccgcctccgccgccactatcgccgcggcggcggccaccgccgtcgtagccccaacctcgacggtcgccgtggccccggtcgcgtctgccttggagaagaagacaaagagcaaggggccctacatctgcgctctgtgcgccaaggagttcaagaacggctacaatctccggaggcacgaagccatccacacgggagccaaggccggccgggtcccctcgggtgctatgaagatgccgaccatggtgcccctgagcctcctgagcgtgccccagctgagcggagccggcgggggagggggagaggcgggtgccggcggcggcgctgccgcagtggccgccggtggcgtggtgaccacgaccgcctcggggaagcgcatccggaagaaccatgcctgcgagatgtgtggcaaggccttccgcgacgtctaccacctgaaccgacacaagctgtcgcactcggacgagaagccctaccagtgcccggtgtgccagcagcgcttcaagcgcaaggaccgcatgagctaccacgtgcgctcacatgacggcgctgtgcacaagccctacaactgctcccactgtggcaagagcttctcccggtgtgcacggggcctcggccgcccgctaggccgtggggagggagggacgcgacggaggtggcctggccgtggctggcggggagggaggcggctgctgaggctggggaaggggagccactcccagggcggagggaggaagcctctcccggttaccagggagcaaggggtggtcctttgtcgaggaggtgggccttggggttgacggaagcttcgcgtgggaggaggcggcggcggcggcagcggctgctgggctccagggagggatttcctgcttaagtgtcgctgtgacggcctgggctccgggaggaggcgcagggatcctcggaaaggcctgtggtgcggtttggtggatttggggcgcaccacctccgccctaaccccaaccccaacgtgtccccaggccggatcacctcaacagtcacgtcagacaagtgcactcaacagaacggcccttcaaatgtgagaaatgtgaggcagctttcgccacgaaggatcggctgcgggcgcacacagtacgacacgaggagaaagtgccatgtcacgtgtgtggcaagatgctgagctcggcttatatttcggaccacatgaaggtgcacagccagggtcctcaccatgtctgtgagctctgcaacaaaggtactggtgaggtttgtccaatggcggcggcagcggcagcggcggcagcggcagcagcggcagcagtagcagcccctcccacagctgtgggctccctctcgggggcggagggggtgcctgtgagctctcagccacttccctcccaaccctggtgagctccaagttggttgcgggggagaggggagaatggagtagagtcccttggtacaagctcctctcccccctcttttcccaccaactcctatttccctaccaaccaaggagcctccagaaggaaaggaggaagaaatgttttcttaggggaattcgctaggttttaacgatttgtttctcctgctcctcttctatcagacctgaccccacacaaacctgtcccctcggttgtgttgaagtcccctggacagtgggcaggggtggcagaggacacgagcagccactgcccgtaccccctctcctctctgtaagcccatgccctgtcttcccagggacttgtgagcctcttccctcgacggtcctcttctctccttccagtcctctccccctgctgtctgcagcccctccccggggagttggtgctttcttttccttttttttttttttccagggggagggaggagaggaaggagggggatcagagctgtcccaaagagggaaagcggtgaggtttgaggaggggcagaagcagggccggcaaaggttgtaccttcataaggtggtatggggggttggggtcaggccctgaacatcgtcctacttgagaatctgtcaggggaaaaagtcaaggggagcaggaggaagagccaggagggccagaggcagagaagagatggagtcttaggggccagggtgagcgaggggtccagggcctagaggtgcttcctgggggcgggggaatgcagccagtgtccccctcccctcttccaccccagctccagccctggtcttgtcttttcatccctcttccccacgacagaagaagttgtggccctggccatgtcatcgtgttcctgtgtcccctgcatgtaccccaccctccaccccttccttttgcgcggaccccattacaataaattttaaataaaatcctgtttctggctctgga

SEQ ID NO: 317427 - DNA, 2741 bp, Homo sapiens
  misc_feature (30)..(30): n is a, c, g, or t
  misc_feature (36)..(36): n is a, c, g, or t
  misc_feature (103)..(103): n is a, c, g, or t
  misc_feature (117)..(117): n is a, c, g, or t
ccgccgccgccgccgccgccgcccggcgcnaccgcncccggccccggccccgcggggcctcccgcccccacccagggggcgtcgccgccgccgtcgccgcggnctccgcggcccgcnaggcgcccgaattccggctccctcccgccggccggggtgcgcgggccggcggggccggcccgggcgggccatgcgttcggcgcggcccagcccggccggccgggggcggcgccccgagcccgggccccgcgcggcccgcgcccccggcccccgctgagccctgggggccccgctgcggccgaggccatgttcccggtgtttccttgcacgctgctggccccccccttccccgtgctgggcctggactcccggggggtgggcggcctcatgaactccttcccgccacctcagggtcacgcccagaaccccctgcaggtcggggctgagctccagtcccgcttctttgcctcccagggctgcgcccagagtccattccaggccgcgccggcgcccccgcccacgccccaggccccggcggccgagcccctccaggtggacttgctcccggtgctcgccgccgcccaggagtccgccgcggctgctgcggccgctgccgccgctgctgccgccgtcgctgccgcgcccccggcccctgccgccgcctctacggtggacacagcggccctgaagcagcctccggcgccccctccgccacccccgccagtgtcggcgcccgcggccgaggccgcgccccccgcctccgccgccactatcgccgcggcggcggccaccgccgtcgtagccccaacctcgacggtcgccgtggccccggtcgcgtctgccttggagaagaagacaaagagcaaggggccctacatctgcgctctgtgcgccaaggagttcaagaacggctacaatctccggaggcacgaagccatccacacgggagccaaggccggccgggtcccctcgggtgctatgaagatgccgaccatggtgcccctgagcctcctgagcgtgccccagctgagcggagccggcgggggagggggagaggcgggtgccggcggcggcgctgccgcagtggccgccggtggcgtggtgaccacgaccgcctcggggaagcgcatccggaagaaccatgcctgcgagatgtgtggcaaggccttccgcgacgtctaccacctgaaccgacacaagctgtcgcactcggacgagaagccctaccagtgcccggtgtgccagcagcgcttcaagcgcaaggaccgcatgagctaccacgtgcgctcacatgacggcgctgtgcacaagccctacaactgctcccactgtggcaagagcttctcccggtgtgcacggggcctcggccgcccgctaggccgtggggagggagggacgcgacggaggccggatcacctcaacagtcacgtcagacaagtgcactcaacagaacggcccttcaaatgtgagaaatgtgaggcagctttcgccacgaaggatcggctgcgggcgcacacagtacgacacgaggagaaagtgccatgtcacgtgtgtggcaagatgctgagctcggcttatatttcggaccacatgaaggtgcacagccagggtcctcaccatgtctgtgagctctgcaacaaaggtactggtgaggtttgtccaatggcggcggcagcggcagcggcggcagcggcagcagcggcagcagtagcagcccctcccacagctgtgggctccctctcgggggcggagggggtgcctgtgagctctcagccacttccctcccaaccctggtgagctccaagttggttgcgggggagaggggagaatggagtagagtcccttggtacaagctcctctcccccctcttttcccaccaactcctatttccctaccaaccaaggagcctccagaaggaaaggaggaagaaatgttttcttaggggaattcgctaggttttaacgatttgtttctcctgctcctcttctatcagacctgaccccacacaaacctgtcccctcggttgtgttgaagtcccctggacagtgggcaggggtggcagaggacacgagcagccactgcccgtaccccctctcctctctgtaagcccatgccctgtcttcccagggacttgtgagcctcttccctcgacggtcctcttctctccttccagtcctctccccctgctgtctgcagcccctccccggggagttggtgctttcttttccttttttttttttttccagggggagggaggagaggaaggagggggatcagagctgtcccaaagagggaaagcggtgaggtttgaggaggggcagaagcagggccggcaaaggttgtaccttcataaggtggtatggggggttggggtcaggccctgaacatcgtcctacttgagaatctgtcaggggaaaaagtcaaggggagcaggaggaagagccaggagggccagaggcagagaagagatggagtcttaggggccagggtgagcgaggggtccagggcctagaggtgcttcctgggggcgggggaatgcagccagtgtccccctcccctcttccaccccagctccagccctggtcttgtcttttcatccctcttccccacgacagaagaagttgtggccctggccatgtcatcgtgttcctgtgtcccctgcatgtaccccaccctccaccccttccttttgcgcggaccccattacaataaattttaaataaaatcctgtttctggctctgga

SEQ ID NO: 317428 - DNA, 2823 bp, Homo sapiens
  misc_feature (30)..(30): n is a, c, g, or t
  misc_feature (36)..(36): n is a, c, g, or t
  misc_feature (103)..(103): n is a, c, g, or t
  misc_feature (117)..(117): n is a, c, g, or t
ccgccgccgccgccgccgccgcccggcgcnaccgcncccggccccggccccgcggggcctcccgcccccacccagggggcgtcgccgccgccgtcgccgcggnctccgcggcccgcnaggcgcccgaattccggctccctcccgccggccggggtgcgcgggccggcggggccggcccgggcgggccatgcgttcggcgcggcccagcccggccggccgggggcggcgccccgagcccgggccccgcgcggcccgcgcccccggcccccgctgagccctgggggccccgctgcggccgaggccatgttcccggtgtttccttgcacgctgctggccccccccttccccgtgctgggcctggactcccggggggtgggcggcctcatgaactccttcccgccacctcagggtcacgcccagaaccccctgcaggtcggggctgagctccagtcccgcttctttgcctcccagggctgcgcccagagtccattccaggccgcgccggcgcccccgcccacgccccaggccccggcggccgagcccctccaggtggacttgctcccggtgctcgccgccgcccaggagtccgccgcggctgctgcggccgctgccgccgctgctgccgccgtcgctgccgcgcccccggcccctgccgccgcctctacggtggacacagcggccctgaagcagcctccggcgccccctccgccacccccgccagtgtcggcgcccgcggccgaggccgcgccccccgcctccgccgccactatcgccgcggcggcggccaccgccgtcgtagccccaacctcgacggtcgccgtggccccggtcgcgtctgccttggagaagaagacaaagagcaaggggccctacatctgcgctctgtgcgccaaggagttcaagaacggctacaatctccggaggcacgaagccatccacacgggagccaaggccggccgggtcccctcgggtgctatgaagatgccgaccatggtgcccctgagcctcctgagcgtgccccagctgagcggagccggcgggggagggggagaggcgggtgccggcggcggcgctgccgcagtggccgccggtggcgtggtgaccacgaccgcctcggggaagcgcatccggaagaaccatgcctgcgagatgtgtggcaaggccttccgcgacgtctaccacctgaaccgacacaagctgtcgcactcggacgagaagccctaccagtgcccggtgtgccagcagcgcttcaagcgcaaggaccgcatgagctaccacgtgcgctcacatgacggcgctgtgcacaagccctacaactgctcccactgtggcaagagcttctcccggccggatcacctcaacagtcacgtcagacaagtgcactcaacagaacggcccttcaaatgtgaggcctcatcatgtcactcccatttcctacagatcaaagatccccaaggctctgattcctttaatctcttgctcccccctccccagcccaccaagctttaactctcctgtgacaccccccacgcccctcccccctcctcagaaatgtgaggcagctttcgccacgaaggatcggctgcgggcgcacacagtacgacacgaggagaaagtgccatgtcacgtgtgtggcaagatgctgagctcggcttatatttcggaccacatgaaggtgcacagccagggtcctcaccatgtctgtgagctctgcaacaaaggtactggtgaggtttgtccaatggcggcggcagcggcagcggcggcagcggcagcagcggcagcagtagcagcccctcccacagctgtgggctccctctcgggggcggagggggtgcctgtgagctctcagccacttccctcccaaccctggtgagctccaagttggttgcgggggagaggggagaatggagtagagtcccttggtacaagctcctctcccccctcttttcccaccaactcctatttccctaccaaccaaggagcctccagaaggaaaggaggaagaaatgttttcttaggggaattcgctaggttttaacgatttgtttctcctgctcctcttctatcagacctgaccccacacaaacctgtcccctcggttgtgttgaagtcccctggacagtgggcaggggtggcagaggacacgagcagccactgcccgtaccccctctcctctctgtaagcccatgccctgtcttcccagggacttgtgagcctcttccctcgacggtcctcttctctccttccagtcctctccccctgctgtctgcagcccctccccggggagttggtgctttcttttccttttttttttttttccagggggagggaggagaggaaggagggggatcagagctgtcccaaagagggaaagcggtgaggtttgaggaggggcagaagcagggccggcaaaggttgtaccttcataaggtggtatggggggttggggtcaggccctgaacatcgtcctacttgagaatctgtcaggggaaaaagtcaaggggagcaggaggaagagccaggagggccagaggcagagaagagatggagtcttaggggccagggtgagcgaggggtccagggcctagaggtgcttcctgggggcgggggaatgcagccagtgtccccctcccctcttccaccccagctccagccctggtcttgtcttttcatccctcttccccacgacagaagaagttgtggccctggccatgtcatcgtgttcctgtgtcccctgcatgtaccccaccctccaccccttccttttgcgcggaccccattacaataaattttaaataaaatcctgtttctggctctgga

SEQ ID NO: 317429 - DNA, 3707 bp, Homo sapiens
  misc_feature (30)..(30): n is a, c, g, or t
  misc_feature (36)..(36): n is a, c, g, or t
  misc_feature (103)..(103): n is a, c, g, or t
  misc_feature (117)..(117): n is a, c, g, or t
ccgccgccgccgccgccgccgcccggcgcnaccgcncccggccccggccccgcggggcctcccgcccccacccagggggcgtcgccgccgccgtcgccgcggnctccgcggcccgcnaggcgcccgaattccggctccctcccgccggccggggtgcgcgggccggcggggccggcccgggcgggccatgcgttcggcgcggcccagcccggccggccgggggcggcgccccgagcccgggccccgcgcggcccgcgcccccggcccccgctgagccctgggggccccgctgcggccgaggccatgttcccggtgtttccttgcacgctgctggccccccccttccccgtgctgggcctggactcccggggggtgggcggcctcatgaactccttcccgccacctcagggtcacgcccagaaccccctgcaggtcggggctgagctccagtcccgcttctttgcctcccagggctgcgcccagagtccattccaggccgcgccggcgcccccgcccacgccccaggccccggcggccgagcccctccaggtggacttgctcccggtgctcgccgccgcccaggagtccgccgcggctgctgcggccgctgccgccgctgctgccgccgtcgctgccgcgcccccggcccctgccgccgcctctacggtggacacagcggccctgaagcagcctccggcgccccctccgccacccccgccagtgtcggcgcccgcggccgaggccgcgccccccgcctccgccgccactatcgccgcggcggcggccaccgccgtcgtagccccaacctcgacggtcgccgtggccccggtcgcgtctgccttggagaagaagacaaagagcaaggggccctacatctgcgctctgtgcgccaaggagttcaagaacggctacaatctccggaggcacgaagccatccacacgggagccaaggccggccgggtcccctcgggtgctatgaagatgccgaccatggtgcccctgagcctcctgagcgtgccccagctgagcggagccggcgggggagggggagaggcgggtgccggcggcggcgctgccgcagtggccgccggtggcgtggtgaccacgaccgcctcggggaagcgcatccggaagaaccatgcctgcgagatgtgtggcaaggccttccgcgacgtctaccacctgaaccgacacaagctgtcgcactcggacgagaagccctaccagtgcccggtgtgccagcagcgcttcaagcgcaaggaccgcatgagctaccacgtgcgctcacatgacggcgctgtgcacaagccctacaactgctcccactgtggcaagagcttctcccggccggatcacctcaacagtcacgtcagacaagtgcactcaacagaacggcccttcaaatgtgagaaatgtgaggcagctttcgccacgaaggatcggctgcgggcgcacacagtacgacacgaggagaaagtgccatgtcacgtgtgtggcaagatgctgagctcggcttatatttcggaccacatgaaggtgcacagccagggtcctcaccatgtctgtgagctctgcaacaaaggtacatgccgagggctgccgggagggccaggggcagagggtgggcgcctggccagacgccttgccacggatacgggttaagggtgctgtagccaagagctcgtggcgtctagattcctacaagaggtcaagggagcagcggggggacacctgaatgaacatcattagactctaagaagtcctggttggaagagatgatctgccagagaggttgaacctcctggtaatgtgtggggaaagcgggagtggaacttggctgctctggggaaggagtagtcaagaaagccagttccaggggtcacaaggcaaggtttccgctgcgcagccacaaggtcttgtctccagctcctggggcaggtggagtacacgggccgggctttaccagcacgcaccctgcacgggtagcagagaaagctgccttcagtcagactcaccggttaactgggttgagaccgcggggcactggagggaaggggacacagccgtctctgctgagggtcaaccctgcaagtggctaggagtcagtgtctcgtcatcctgggagaggtctcccggccatggagaatgagttctgtaggtaccaaggctgagaagcgggcaccacacaagccaggccccaggctcagggaggggctgtgtctaccagccccaacagagcagttggccccaggctaccaaggataccgtgggaggaggacagggccatctgaggagggcatcccccgcctaggagatcagccccgtctctggggtctccgcctggctgacccccgccccatcccaatccaccccccaataggcttcaccacggcagcatacctgcgcatccacgcggtgaaggaccacgggctccaggccccgcgggctgaccgcatcctgtgcaagctgtgcagcgtgcactgcaagacccctgcccagctggccggccacatgcagacccatctggggggggccggcccccctgtcccgggagacgccccccagccacagcccacctgctgagggggacccccgcacccaccaggtactggtgaggtttgtccaatggcggcggcagcggcagcggcggcagcggcagcagcggcagcagtagcagcccctcccacagctgtgggctccctctcgggggcggagggggtgcctgtgagctctcagccacttccctcccaaccctggtgagctccaagttggttgcgggggagaggggagaatggagtagagtcccttggtacaagctcctctcccccctcttttcccaccaactcctatttccctaccaaccaaggagcctccagaaggaaaggaggaagaaatgttttcttaggggaattcgctaggttttaacgatttgtttctcctgctcctcttctatcagacctgaccccacacaaacctgtcccctcggttgtgttgaagtcccctggacagtgggcaggggtggcagaggacacgagcagccactgcccgtaccccctctcctctctgtaagcccatgccctgtcttcccagggacttgtgagcctcttccctcgacggtcctcttctctccttccagtcctctccccctgctgtctgcagcccctccccggggagttggtgctttcttttccttttttttttttttccagggggagggaggagaggaaggagggggatcagagctgtcccaaagagggaaagcggtgaggtttgaggaggggcagaagcagggccggcaaaggttgtaccttcataaggtggtatggggggttggggtcaggccctgaacatcgtcctacttgagaatctgtcaggggaaaaagtcaaggggagcaggaggaagagccaggagggccagaggcagagaagagatggagtcttaggggccagggtgagcgaggggtccagggcctagaggtgcttcctgggggcgggggaatgcagccagtgtccccctcccctcttccaccccagctccagccctggtcttgtcttttcatccctcttccccacgacagaagaagttgtggccctggccatgtcatcgtgttcctgtgtcccctgcatgtaccccaccctccaccccttccttttgcgcggaccccattacaataaattttaaataaaatcctgtttctggctctgga

SEQ ID NO: 317430 - DNA, 2862 bp, Homo sapiens
  misc_feature (30)..(30): n is a, c, g, or t
  misc_feature (36)..(36): n is a, c, g, or t
  misc_feature (103)..(103): n is a, c, g, or t
  misc_feature (117)..(117): n is a, c, g, or t
ccgccgccgccgccgccgccgcccggcgcnaccgcncccggccccggccccgcggggcctcccgcccccacccagggggcgtcgccgccgccgtcgccgcggnctccgcggcccgcnaggcgcccgaattccggctccctcccgccggccggggtgcgcgggccggcggggccggcccgggcgggccatgcgttcggcgcggcccagcccggccggccgggggcggcgccccgagcccgggccccgcgcggcccgcgcccccggcccccgctgagccctgggggccccgctgcggccgaggccatgttcccggtgtttccttgcacgctgctggccccccccttccccgtgctgggcctggactcccggggggtgggcggcctcatgaactccttcccgccacctcagggtcacgcccagaaccccctgcaggtcggggctgagctccagtcccgcttctttgcctcccagggctgcgcccagagtccattccaggccgcgccggcgcccccgcccacgccccaggccccggcggccgagcccctccaggtggacttgctcccggtgctcgccgccgcccaggagtccgccgcggctgctgcggccgctgccgccgctgctgccgccgtcgctgccgcgcccccggcccctgccgccgcctctacggtggacacagcggccctgaagcagcctccggcgccccctccgccacccccgccagtgtcggcgcccgcggccgaggccgcgccccccgcctccgccgccactatcgccgcggcggcggccaccgccgtcgtagccccaacctcgacggtcgccgtggccccggtcgcgtctgccttggagaagaagacaaagagcaaggggccctacatctgcgctctgtgcgccaaggagttcaagaacggctacaatctccggaggcacgaagccatccacacgggagccaaggccggccgggtcccctcgggtgctatgaagatgccgaccatggtgcccctgagcctcctgagcgtgccccagctgagcggagccggcgggggagggggagaggcgggtgccggcggcggcgctgccgcagtggccgccggtggcgtggtgaccacgaccgcctcggggaagcgcatccggaagaaccatgcctgcgagatgtgtggcaaggccttccgcgacgtctaccacctgaaccgacacaagctgtcgcactcggacgagaagccctaccagtgcccggtgtgccagcagcgcttcaagcgcaaggaccgcatgagctaccacgtgcgctcacatgacggcgctgtgcacaagccctacaactgctcccactgtggcaagagcttctcccggccggatcacctcaacagtcacgtcagacaagtgcactcaacagaacggcccttcaaatgtgagaaatgtgaggcagctttcgccacgaaggatcggctgcgggcgcacacagtacgacacgaggagaaagtgccatgtcacgtgtgtggcaagatgctgagctcggcttatatttcggaccacatgaaggtgcacagccagggtcctcaccatgtctgtgagctctgcaacaaaggtactggtgaggtttgtccaatggcggcggcagcggcagcggcggcagcggcagcagcggcagcagtagcagcccctcccacagctgtgggctccctctcgggggcggagggggtgcctgtgagctctcagccacttccctcccaaccctggtgagctccaagttggttgcgggggagaggggagaatggagtagagtcccttggtacaagctcctctcccccctcttttcccaccaactcctatttccctaccaaccaaggagcctccagaaggaaaggaggaagaaatgttttcttaggggaattcgctaggttttaacgatttgtttctcctgctcctcttctatcagacctgaccccacacaaacctgtcccctcggttgtgttgaagtcccctggacagtgggcaggggtggcagaggacacgagcagccactgcccgtaccccctctcctctctgtaagcccatgccctgtcttcccagggacttgtgagcctcttccctcgacggtcctcttctctccttccagtcctctccccctgctgtctgcagcccctccccggggagttggtgctttcttttccttttttttttttttccagggggagggaggagaggaaggagggggatcagagctgtcccaaagagggaaagcggtgaggtttgaggaggggcagaagcagggccggcaaaggttgtaccttcataaggtggtatggggggttggggtcaggccctgaacatcgtcctacttgagaatctgtcaggggaaaaagtcaaggggagcaggaggaagagccaggagggccagaggcagagaagagatggagtcttaggggccagggtgagcgaggggtccagggcctagaggtgcttcctgggggcgggggaatgcagccagtgtccccctcccctcttccaccccagctccagccctggtcttgtcttttcatccctcttccccacgacagaagaagttgtggccctggccatgtcatcgtgttcctgtgtcccctgcatgtaccccaccctccaccccttccttttgcgcggaccccattacaataaattttaaataaaatcctgtttctggctctggaaaaaaaaaaaaaaaaaaaaaaaaaaaaaacaaaaaaaaaaaaaaaaaaaaaaaaaaaaaaaaaaattcaattgactgcccgtcctcatccaagggactgactgaaccttgcctgaactcacccaacttaatcggcttgaagtacatcctactttagctagctgtcgtaagagcgagca

SEQ ID NO: 317431 - DNA, 4107 bp, Homo sapiens
  misc_feature (30)..(30): n is a, c, g, or t
  misc_feature (36)..(36): n is a, c, g, or t
  misc_feature (103)..(103): n is a, c, g, or t
  misc_feature (117)..(117): n is a, c, g, or t
ccgccgccgccgccgccgccgcccggcgcnaccgcncccggccccggccccgcggggcctcccgcccccacccagggggcgtcgccgccgccgtcgccgcggnctccgcggcccgcnaggcgcccgaattccggctccctcccgccggccggggtgcgcgggccggcggggccggcccgggcgggccatgcgttcggcgcggcccagcccggccggccgggggcggcgccccgagcccgggccccgcgcggcccgcgcccccggcccccgctgagccctgggggccccgctgcggccgaggccatgttcccggtgtttccttgcacgctgctggccccccccttccccgtgctgggcctggactcccggggggtgggcggcctcatgaactccttcccgccacctcagggtcacgcccagaaccccctgcaggtcggggctgagctccagtcccgcttctttgcctcccagggctgcgcccagagtccattccaggccgcgccggcgcccccgcccacgccccaggccccggcggccgagcccctccaggtggacttgctcccggtgctcgccgccgcccaggagtccgccgcggctgctgcggccgctgccgccgctgctgccgccgtcgctgccgcgcccccggcccctgccgccgcctctacggtggacacagcggccctgaagcagcctccggcgccccctccgccacccccgccagtgtcggcgcccgcggccgaggccgcgccccccgcctccgccgccactatcgccgcggcggcggccaccgccgtcgtagccccaacctcgacggtcgccgtggccccggtcgcgtctgccttggagaagaagacaaagagcaaggggccctacatctgcgctctgtgcgccaaggagttcaagaacggctacaatctccggaggcacgaagccatccacacgggagccaaggccggccgggtcccctcgggtgctatgaagatgccgaccatggtgcccctgagcctcctgagcgtgccccagctgagcggagccggcgggggagggggagaggcgggtgccggcggcggcgctgccgcagtggccgccggtggcgtggtgaccacgaccgcctcggggaagcgcatccggaagaaccatgcctgcgagatgtgtggcaaggccttccgcgacgtctaccacctgaaccgacacaagctgtcgcactcggacgagaagccctaccagtgcccggtgtgccagcagcgcttcaagcgcaaggaccgcatgagctaccacgtgcgctcacatgacggcgctgtgcacaagccctacaactgctcccactgtggcaagagcttctcccggtgtgcacggggcctcggccgcccgctaggccgtggggagggagggacgcgacggaggtggcctggccgtggctggcggggagggaggcggctgctgaggctggggaaggggagccactcccagggcggagggaggaagcctctcccggttaccagggagcaaggggtggtcctttgtcgaggaggtgggccttggggttgacggaagcttcgcgtgggaggaggcggcggcggcggcagcggctgctgggctccagggagggatttcctgcttaagtgtcgctgtgacggcctgggctccgggaggaggcgcagggatcctcggaaaggcctgtggtgcggtttggtggatttggggcgcaccacctccgccctaaccccaaccccaacgtgtccccaggccggatcacctcaacagtcacgtcagacaagtgcactcaacagaacggcccttcaaatgtgagaaatgtgaggcagctttcgccacgaaggatcggctgcgggcgcacacagtacgacacgaggagaaagtgccatgtcacgtgtgtggcaagatgctgagctcggcttatatttcggaccacatgaaggtgcacagccagggtcctcaccatgtctgtgagctctgcaacaaaggtacatgccgagggctgccgggagggccaggggcagagggtgggcgcctggccagacgccttgccacggatacgggttaagggtgctgtagccaagagctcgtggcgtctagattcctacaagaggtcaagggagcagcggggggacacctgaatgaacatcattagactctaagaagtcctggttggaagagatgatctgccagagaggttgaacctcctggtaatgtgtggggaaagcgggagtggaacttggctgctctggggaaggagtagtcaagaaagccagttccaggggtcacaaggcaaggtttccgctgcgcagccacaaggtcttgtctccagctcctggggcaggtggagtacacgggccgggctttaccagcacgcaccctgcacgggtagcagagaaagctgccttcagtcagactcaccggttaactgggttgagaccgcggggcactggagggaaggggacacagccgtctctgctgagggtcaaccctgcaagtggctaggagtcagtgtctcgtcatcctgggagaggtctcccggccatggagaatgagttctgtaggtaccaaggctgagaagcgggcaccacacaagccaggccccaggctcagggaggggctgtgtctaccagccccaacagagcagttggccccaggctaccaaggataccgtgggaggaggacagggccatctgaggagggcatcccccgcctaggagatcagccccgtctctggggtctccgcctggctgacccccgccccatcccaatccaccccccaataggcttcaccacggcagcatacctgcgcatccacgcggtgaaggaccacgggctccaggccccgcgggctgaccgcatcctgtgcaagctgtgcagcgtgcactgcaagacccctgcccagctggccggccacatgcagacccatctggggggggccggcccccctgtcccgggagacgccccccagccacagcccacctgctgagggggacccccgcacccaccaggtactggtgaggtttgtccaatggcggcggcagcggcagcggcggcagcggcagcagcggcagcagtagcagcccctcccacagctgtgggctccctctcgggggcggagggggtgcctgtgagctctcagccacttccctcccaaccctggtgagctccaagttggttgcgggggagaggggagaatggagtagagtcccttggtacaagctcctctcccccctcttttcccaccaactcctatttccctaccaaccaaggagcctccagaaggaaaggaggaagaaatgttttcttaggggaattcgctaggttttaacgatttgtttctcctgctcctcttctatcagacctgaccccacacaaacctgtcccctcggttgtgttgaagtcccctggacagtgggcaggggtggcagaggacacgagcagccactgcccgtaccccctctcctctctgtaagcccatgccctgtcttcccagggacttgtgagcctcttccctcgacggtcctcttctctccttccagtcctctccccctgctgtctgcagcccctccccggggagttggtgctttcttttccttttttttttttttccagggggagggaggagaggaaggagggggatcagagctgtcccaaagagggaaagcggtgaggtttgaggaggggcagaagcagggccggcaaaggttgtaccttcataaggtggtatggggggttggggtcaggccctgaacatcgtcctacttgagaatctgtcaggggaaaaagtcaaggggagcaggaggaagagccaggagggccagaggcagagaagagatggagtcttaggggccagggtgagcgaggggtccagggcctagaggtgcttcctgggggcgggggaatgcagccagtgtccccctcccctcttccaccccagctccagccctggtcttgtcttttcatccctcttccccacgacagaagaagttgtggccctggccatgtcatcgtgttcctgtgtcccctgcatgtaccccaccctccaccccttccttttgcgcggaccccattacaataaattttaaataaaatcctgtttctggctctgga

SEQ ID NO: 317432 - DNA, 2840 bp, Homo sapiens
  misc_feature (30)..(30): n is a, c, g, or t
  misc_feature (36)..(36): n is a, c, g, or t
  misc_feature (103)..(103): n is a, c, g, or t
  misc_feature (117)..(117): n is a, c, g, or t
ccgccgccgccgccgccgccgcccggcgcnaccgcncccggccccggccccgcggggcctcccgcccccacccagggggcgtcgccgccgccgtcgccgcggnctccgcggcccgcnaggcgcccgaattccggctccctcccgccggccggggtgcgcgggccggcggggccggcccgggcgggccatgcgttcggcgcggcccagcccggccggccgggggcggcgccccgagcccgggccccgcgcggcccgcgcccccggcccccgctgagccctgggggccccgctgcggccgaggccatgttcccggtgtttccttgcacgctgctggccccccccttccccgtgctgggcctggactcccggggggtgggcggcctcatgaactccttcccgccacctcagggtcacgcccagaaccccctgcaggtcggggctgagctccagtcccgcttctttgcctcccagggctgcgcccagagtccattccaggccgcgccggcgcccccgcccacgccccaggccccggcggccgagcccctccaggtggacttgctcccggtgctcgccgccgcccaggagtccgccgcggctgctgcggccgctgccgccgctgctgccgccgtcgctgccgcgcccccggcccctgccgccgcctctacggtggacacagcggccctgaagcagcctccggcgccccctccgccacccccgccagtgtcggcgcccgcggccgaggccgcgccccccgcctccgccgccactatcgccgcggcggcggccaccgccgtcgtagccccaacctcgacggtcgccgtggccccggtcgcgtctgccttggagaagaagacaaagagcaaggggccctacatctgcgctctgtgcgccaaggagttcaagaacggctacaatctccggaggcacgaagccatccacacgggagccaaggccggccgggtcccctcgggtgctatgaagatgccgaccatggtgcccctgagcctcctgagcgtgccccagctgagcggagccggcgggggagggggagaggcgggtgccggcggcggcgctgccgcagtggccgccggtggcgtggtgaccacgaccgcctcggggaagcgcatccggaagaaccatgcctgcgagatgtgtggcaaggccttccgcgacgtctaccacctgaaccgacacaagctgtcgcactcggacgagaagccctaccagtgcccggtgtgccagcagcgcttcaagcgcaaggaccgcatgagctaccacgtgcgctcacatgacggcgctgtgcacaagccctacaactgctcccactgtggcaagagcttctcccggccggatcacctcaacagtcacgtcagacaagtgcactcaacagaacggcccttcaaatgtgagaaatgtgaggcagctttcgccacgaaggatcggctgcgggcgcacacagtacgacacgaggagaaagtgccatgtcacgtgtgtggcaagatgctgagctcggcttatatttcggaccacatgaaggtgcacagccagggtcctcaccatgtctgtgagctctgcaacaaaggtactggtgaggtttgtccaatggcggcggcagcggcagcggcggcagcggcagcagcggcagcagtagcagcccctcccacagctgtgggctccctctcgggggcggagggggtgcctgtgagctctcagccacttccctcccaaccctggtgagctccaagttggttgcgggggagaggggagaatggagtagagtcccttggtacaagctcctctcccccctcttttcccaccaactcctatttccctaccaaccaaggagcctccagaaggaaaggaggaagaaatgttttcttaggggaattcgctaggttttaacgatttgtttctcctgctcctcttctatcagacctgaccccacacaaacctgtcccctcggttgtgttgaagtcccctggacagtgggcaggggtggcagaggacacgagcagccactgcccgtaccccctctcctctctgtaagcccatgccctgtcttcccagggacttgtgagcctcttccctcgacggtcctcttctctccttccagtcctctccccctgctgtctgcagcccctccccggggagttggtgctttcttttccttttttttttttttccagggggagggaggagaggaaggagggggatcagagctgtcccaaagagggaaagcggtgaggtttgaggaggggcagaagcagggccggcaaaggttgtaccttcataaggtggtatggggggttggggtcaggccctgaacatcgtcctacttgagaatctgtcaggggaaaaagtcaaggggagcaggaggaagagccaggagggccagaggcagagaagagatggagtcttaggggccagggtgagcgaggggtccagggcctagaggtgcttcctgggggcgggggaatgcagccagtgtccccctcccctcttccaccccagctccagccctggtcttgtcttttcatccctcttccccacgacagaagaagttgtggccctggccatgtcatcgtgttcctgtgtcccctgcatgtaccccaccctccaccccttccttttgcgcggaccccattacaataaattttaaataaaatcctgtttctggctctggaaaaaaaacaaaaaaaaaaaaaaaaaaaaaaaaaaaaaaaaaaattcaattgactgcccgtcctcatccaagggactgactgaaccttgcctgaactcacccaacttaatcggcttgaagtacatcctactttagctagctgtcgtaagagcgagca

SEQ ID NO: 317433 - DNA, 2665 bp, Homo sapiens
  misc_feature (30)..(30): n is a, c, g, or t
  misc_feature (36)..(36): n is a, c, g, or t
  misc_feature (103)..(103): n is a, c, g, or t
  misc_feature (117)..(117): n is a, c, g, or t
ccgccgccgccgccgccgccgcccggcgcnaccgcncccggccccggccccgcggggcctcccgcccccacccagggggcgtcgccgccgccgtcgccgcggnctccgcggcccgcnaggcgcccgaattccggctccctcccgccggccggggtgcgcgggccggcggggccggcccgggcgggccatgcgttcggcgcggcccagcccggccggccgggggcggcgccccgagcccgggccccgcgcggcccgcgcccccggcccccgctgagccctgggggccccgctgcggccgaggccatgttcccggtgtttccttgcacgctgctggccccccccttccccgtgctgggcctggactcccggggggtgggcggcctcatgaactccttcccgccacctcagggtcacgcccagaaccccctgcaggtcggggctgagctccagtcccgcttctttgcctcccagggctgcgcccagagtccattccaggccgcgccggcgcccccgcccacgccccaggccccggcggccgagcccctccaggtggacttgctcccggtgctcgccgccgcccaggagtccgccgcggctgctgcggccgctgccgccgctgctgccgccgtcgctgccgcgcccccggcccctgccgccgcctctacggtggacacagcggccctgaagcagcctccggcgccccctccgccacccccgccagtgtcggcgcccgcggccgaggccgcgccccccgcctccgccgccactatcgccgcggcggcggccaccgccgtcgtagccccaacctcgacggtcgccgtggccccggtcgcgtctgccttggagaagaagacaaagagcaaggggccctacatctgcgctctgtgcgccaaggagttcaagaacggctacaatctccggaggcacgaagccatccacacgggagccaaggccggccgggtcccctcgggtgctatgaagatgccgaccatggtgcccctgagcctcctgagcgtgccccagctgagcggagccggcgggggagggggagaggcgggtgccggcggcggcgctgccgcagtggccgccggtggcgtggtgaccacgaccgcctcggggaagcgcatccggaagaaccatgcctgcgagatgtgtggcaaggccttccgcgacgtctaccacctgaaccgacacaagctgtcgcactcggacgagaagccctaccagtgcccggtgtgccagcagcgcttcaagcgcaaggaccgcatgagctaccacgtgcgctcacatgacggcgctgtgcacaagccctacaactgctcccactgtggcaagagcttctcccggccggatcacctcaacagtcacgtcagacaagtgcactcaacagaacggcccttcaaatgtgagaaatgtgaggcagctttcgccacgaaggatcggctgcgggcgcacacagtacgacacgaggagaaagtgccatgtcacgtgtgtggcaagatgctgagctcggcttatatttcggaccacatgaaggtgcacagccagggtcctcaccatgtctgtgagctctgcaacaaaggtactggtgaggtttgtccaatggcggcggcagcggcagcggcggcagcggcagcagcggcagcagtagcagcccctcccacagctgtgggctccctctcgggggcggagggggtgcctgtgagctctcagccacttccctcccaaccctggtgagctccaagttggttgcgggggagaggggagaatggagtagagtcccttggtacaagctcctctcccccctcttttcccaccaactcctatttccctaccaaccaaggagcctccagaaggaaaggaggaagaaatgttttcttaggggaattcgctaggttttaacgatttgtttctcctgctcctcttctatcagacctgaccccacacaaacctgtcccctcggttgtgttgaagtcccctggacagtgggcaggggtggcagaggacacgagcagccactgcccgtaccccctctcctctctgtaagcccatgccctgtcttcccagggacttgtgagcctcttccctcgacggtcctcttctctccttccagtcctctccccctgctgtctgcagcccctccccggggagttggtgctttcttttccttttttttttttttccagggggagggaggagaggaaggagggggatcagagctgtcccaaagagggaaagcggtgaggtttgaggaggggcagaagcagggccggcaaaggttgtaccttcataaggtggtatggggggttggggtcaggccctgaacatcgtcctacttgagaatctgtcaggggaaaaagtcaaggggagcaggaggaagagccaggagggccagaggcagagaagagatggagtcttaggggccagggtgagcgaggggtccagggcctagaggtgcttcctgggggcgggggaatgcagccagtgtccccctcccctcttccaccccagctccagccctggtcttgtcttttcatccctcttccccacgacagaagaagttgtggccctggccatgtcatcgtgttcctgtgtcccctgcatgtaccccaccctccaccccattacaataaattttaaataaaatcctgtttctggctctgga

SEQ ID NO: 317434 - DNA, 2557 bp, Homo sapiens
  misc_feature (30)..(30): n is a, c, g, or t
  misc_feature (36)..(36): n is a, c, g, or t
  misc_feature (103)..(103): n is a, c, g, or t
  misc_feature (117)..(117): n is a, c, g, or t
ccgccgccgccgccgccgccgcccggcgcnaccgcncccggccccggccccgcggggcctcccgcccccacccagggggcgtcgccgccgccgtcgccgcggnctccgcggcccgcnaggcgcccgaattccggctccctcccgccggccggggtgcgcgggccggcggggccggcccgggcgggccatgcgttcggcgcggcccagcccggccggccgggggcggcgccccgagcccgggccccgcgcggcccgcgcccccggcccccgctgagccctgggggccccgctgcggccgaggccatgttcccggtgtttccttgcacgctgctggccccccccttccccgtgctgggcctggactcccggggggtgggcggcctcatgaactccttcccgccacctcagggtcacgcccagaaccccctgcaggtcggggctgagctccagtcccgcttctttgcctcccagggctgcgcccagagtccattccaggccgcgccggcgcccccgcccacgccccaggccccggcggccgagcccctccaggtggacttgctcccggtgctcgccgccgcccaggagtccgccgcggctgctgcggccgctgccgccgctgctgccgccgtcgctgccgcgcccccggcccctgccgccgcctctacggtggacacagcggccctgaagcagcctccggcgccccctccgccacccccgccagtgtcggcgcccgcggccgaggccgcgccccccgcctccgccgccactatcgccgcggcggcggccaccgccgtcgtagccccaacctcgacggtcgccgtggccccggtcgcgtctgccttggagaagaagacaaagagcaaggggccctacatctgcgctctgtgcgccaaggagttcaagaacggctacaatctccggaggcacgaagccatccacacgggagccaaggccggccgggtcccctcgggtgctatgaagatgccgaccatggtgcccctgagcctcctgagcgtgccccagctgagcggagccggcgggggagggggagaggcgggtgccggcggcggcgctgccgcagtggccgccggtggcgtggtgaccacgaccgcctcggggaagcgcatccggaagaaccatgcctgcgagatgtgtggcaaggccttccgcgacgtctaccacctgaaccgacacaagctgtcgcactcggacgagaagccctaccagtgcccggtgtgccagcagcgcttcaagcgcaaggaccgcatgagctaccacgtgcgctcacatgacggcgctgtgcacaagccctacaactgctcccactgtggcaagagcttctcccggccggatcacctcaacagtcacgtcagacaagtgcactcaacagaacggcccttcaaatgtgagaaatgtgaggcagctttcgccacgaaggatcggctgcgggcgcacacagtacgacacgaggagaaagtgccatgtcacgtgtgtggcaagatgctgagctcggcttatatttcggaccacatgaaggtgcacagccagggtcctcaccatgtctgtgagctctgcaacaaaggtactggtgaggtttgtccaatggcggcggcagcggcagcggcggcagcggcagcagcggcagcagtagcagcccctcccacagctgtgggctccctctcgggggcggagggggtgcctgtgagctctcagccacttcctccagaaggaaaggaggaagaaatgttttcttaggggaattcgctaggttttaacgatttgtttctcctgctcctcttctatcagacctgaccccacacaaacctgtcccctcggttgtgttgaagtcccctggacagtgggcaggggtggcagaggacacgagcagccactgcccgtaccccctctcctctctgtaagcccatgccctgtcttcccagggacttgtgagcctcttccctcgacggtcctcttctctccttccagtcctctccccctgctgtctgcagcccctccccggggagttggtgctttcttttccttttttttttttttccagggggagggaggagaggaaggagggggatcagagctgtcccaaagagggaaagcggtgaggtttgaggaggggcagaagcagggccggcaaaggttgtaccttcataaggtggtatggggggttggggtcaggccctgaacatcgtcctacttgagaatctgtcaggggaaaaagtcaaggggagcaggaggaagagccaggagggccagaggcagagaagagatggagtcttaggggccagggtgagcgaggggtccagggcctagaggtgcttcctgggggcgggggaatgcagccagtgtccccctcccctcttccaccccagctccagccctggtcttgtcttttcatccctcttccccacgacagaagaagttgtggccctggccatgtcatcgtgttcctgtgtcccctgcatgtaccccaccctccaccccttccttttgcgcggaccccattacaataaattttaaataaaatcctgtttctggctctgga

SEQ ID NO: 317435 - DNA, 2414 bp, Homo sapiens
  misc_feature (30)..(30): n is a, c, g, or t
  misc_feature (36)..(36): n is a, c, g, or t
  misc_feature (103)..(103): n is a, c, g, or t
  misc_feature (117)..(117): n is a, c, g, or t
ccgccgccgccgccgccgccgcccggcgcnaccgcncccggccccggccccgcggggcctcccgcccccacccagggggcgtcgccgccgccgtcgccgcggnctccgcggcccgcnaggcgcccgaattccggctccctcccgccggccggggtgcgcgggccggcggggccggcccgggcgggccatgcgttcggcgcggcccagcccggccggccgggggcggcgccccgagcccgggccccgcgcggcccgcgcccccggcccccgctgagccctgggggccccgctgcggccgaggccatgttcccggtgtttccttgcacgctgctggccccccccttccccgtgctgggcctggactcccggggggtgggcggcctcatgaactccttcccgccacctcagggtcacgcccagaaccccctgcaggtcggggctgagctccagtcccgcttctttgcctcccagggctgcgcccagagtccattccaggccgcgccggcgcccccgcccacgccccaggccccggcggccgagcccctccaggtggacttgctcccggtgctcgccgccgcccaggagtccgccgcggctgctgcggccgctgccgccgctgctgccgccgtcgctgccgcgcccccggcccctgccgccgcctctacggtggacacagcggccctgaagcagcctccggcgccccctccgccacccccgccagtgtcggcgcccgcggccgaggccgcgccccccgcctccgccgccactatcgccgcggcggcggccaccgccgtcgtagccccaacctcgacggtcgccgtggccccggtcgcgtctgccttggagaagaagacaaagagcaaggggccctacatctgcgctctgtgcgccaaggagttcaagaacggctacaatctccggaggcacgaagccatccacacgggagccaaggccggccgggtcccctcgggtgctatgaagatgccgaccatggtgcccctgagcctcctgagcgtgccccagctgagcggagccggcgggggagggggagaggcgggtgccggcggcggcgctgccgcagtggccgccggtggcgtggtgaccacgaccgcctcggggaagcgcatccggaagaaccatgcctgcgagatgtgtggcaaggccttccgcgacgtctaccacctgaaccgacacaagctgtcgcactcggacgagaagccctaccagtgcccggtgtgccagcagcgcttcaagcgcaaggaccgcatgagctaccacgtgcgctcacatgacggcgctgtgcacaagccctacaactgctcccactgtggcaagagcttctcccggccggatcacctcaacagtcacgtcagacaagtgcactcaacagaacggcccttcaaatgtgagaaatgtgaggcagctttcgccacgaaggatcggctgcgggcgcacacagtacgacacgaggagaaagtgccatgtcacgtgtgtggcaagatgctgagctcggcttatatttcggaccacatgaaggtgcacagccagggtcctcaccatgtctgtgagctctgcaacaaaggtactggtgaggtttgtccaatggcggcggcagcggcagcggcggcagcggcagcagcggcagcagtagcagcccctcccacagctgtgggctccctctcgggggcggagggggtgcctgtgagctctcagccacttccctcccaaccctggtgagctccaagttggttgcgggggagaggggagaatggagtagagtcccttggtacaagctcctctcccccctcttttcccaccaactcctatttccctaccaaccaaggagcctccagaaggaaaggaggaagaaatgttttcttaggggaattcgctaggttttaacgatttgtttctcctgctcctcttctatcagacctgaccccacacaaacgtcccaaagagggaaagcggtgaggtttgaggaggggcagaagcagggccggcaaaggttgtaccttcataaggtggtatggggggttggggtcaggccctgaacatcgtcctacttgagaatctgtcaggggaaaaagtcaaggggagcaggaggaagagccaggagggccagaggcagagaagagatggagtcttaggggccagggtgagcgaggggtccagggcctagaggtgcttcctgggggcgggggaatgcagccagtgtccccctcccctcttccaccccagctccagccctggtcttgtcttttcatccctcttccccacgacagaagaagttgtggccctggccatgtcatcgtgttcctgtgtcccctgcatgtaccccaccctccaccccttccttttgcgcggaccccattacaataaattttaaataaaatcctgtttctggctctgga

SEQ ID NO: 317436 - DNA, 1713 bp, Homo sapiens
cggcaaaaaaaaaaggcgtaagaattttgaagctatgttcaaaggtatccttcagagtggattggataacttcgtgataaaccacatgctaaagaacaacgtggctggacaaacatctatccagaccctagtacctaatacggatcaaaagtcgaccagtgtaaaaaaagacaaccacaaaaaaaaaacagttaagatgttggaatacctgggcaaagatgttcttcatggtgtttttaattatttggcaaaacacgatgttctgacattgaaggaagaggaaaagaaaaaatattatgatgccaaaattgaagacaaggccctgatcttggtagactctttgcgaaagaatcgcgtggctcatcaaatgtttacccaaacacttctcaatatggaccaaaagatcaccagtgtaaaacctcttctgcaaatcgaggctggaccacctgagtcagcagaatctacaaatatactcaaactttgtcctcgtgaagaattcctgagactgtgtaaaaaaaatcatgatgagatctatccaataaaaaagagagaggaccgcagacgcctggctctcatcatatgcaatacaaagtttgatcacctgcctgcaaggaatggggctcactatgacatcgtggggatgaaaaggctgcttcaaggcctgggctacactgtggttgacgaaaagaatctcacagccagggatatggagtcagtgctgagggcatttgctgccagaccagagcacaagtcctctgacagcacgttcttggtactcatgtctcatggcatcctagagggaatctgcggaactgcgcataaaaagaaaaaaccggatgtgctgctttatgacaccatcttccagatattcaacaaccgcaactgcctcagtctaaaggacaaacccaaggtcatcattgtccaggcctgcagaggtgaaaaacatggggaactctgggtcagagactctccagcatccttggcagtcatctcttcacagtcatctgagaacctggaggcagattctgtttgcaagatccacgaggagaaggacttcattgctttctgttcttcaacaccacataacgtgtcctggagagaccgcacaaggggctccatcttcattacggaactcatcacatgcttccagaaatattcttgctgctgccacctaatggaaatatttcggaaggtacagaaatcatttgaagttccacaggctaaagcccagatgcccaccatagaacgagcaaccttgacaagagatttctacctctttcctggcaattgaaaatgaaaccacaggcagcccagccctcctctgtcaacatcaaagagcacatttaccagtatagcttgcatagtcaatatttggtatttcaataaaagtaaagactgtatctttttagattgtatgaactgtatctttttagattctctaatagacaatataatttcaatgaaaatggtggacgagtgaaaatgaagtggaagaaactaactagattttcgagttttatggctcatgtaacatctatacttggctgatgaagacgactggctgtgacttaccgccaacaatagaatgaaagaagatggtgttaaaagtataagataccacctcatacccattagaatgactcccatcaaaacatacaaacaaacacaaaataacaggtgtttgcagggatgtagaataatcggaaccctgtg

SEQ ID NO: 317437 - DNA, 460 bp, Homo sapiens
ttccagtgctgtacaaagagacagaggctgttagctatggctgaagacaaccacaaaaaaaaaacagttaagatgttggaatacctgggcaaagatgttcttcatggtgtttttaattatttggcaaaacacgatgttctgacattgaaggaagaggaaaagaaaaaatattatgatgccaaaattgaagacaaggccctgatcttggtagactctttgcgaaagaatcgcgtggctcatcaaatgtttacccaaacacttctcaatatggaccaaaagatcaccagtgtaaaacaataaacgtgctccacttttaacccttttccgcttcagtaaaaagaagtaacatgcaccaagtttctgctaccagaatgtaactggtttcttcaccaattaataagagtaattaatggagatcctggcacatagcagatacctaattaatgtgtgatgaataaac

SEQ ID NO: 317438 - DNA, 209 bp, Homo sapiens
ctttatgacaccatcttccagatattcaacaaccgcaactgcctcagtctaaaggacaaacccaaggtcatcattgtccaggcctgcagaggtggtgagtgctgaggctgaacatctaacagttttgaaggtgtatgcagaggattgtgatgtttggtttatatttaggggaaacaatgttagaccccatccagtgcaaataaagtaca

SEQ ID NO: 317439 - DNA, 445 bp, Homo sapiens
cattctccctagtcatcagtcttaccacctgtgaaatgtgggcaattccagcactttctcacaagactgtctacagccagaaacattgtaatgccaggcaccacatgccaacaacttccaagataccagctctcattcaggactctctcatctgagctccagactcatttagctctagcggcatataaaacaattctgctccagtgtttcactggcatcacaaaatgaatacagctaaaattaaatgctttgttttccagaataaacgtgctccacttttaacccttttccgcttcagtaaaaagaagtaacatgcaccaagtttctgctaccagaatgtaactggtttcttcaccaattaataagagtaattaatggagatcctggcacatagcagatacctaattaatgtgtgatgaataaacaaatgaagtatacgcatgca

SEQ ID NO: 317440 - DNA, 1654 bp, Homo sapiens
ttccagtgctgtacaaagagacagaggctgttagctatggctgaagacaaccacaaaaaaaaaacagttaagatgttggaatacctgggcaaagatgttcttcatggtgtttttaattatttggcaaaacacgatgttctgacattgaaggaagaggaaaagaaaaaatattatgatgccaaaattgaagacaaggccctgatcttggtagactctttgcgaaagaatcgcgtggctcatcaaatgtttacccaaacacttctcaatatggaccaaaagatcaccagtgtaaaacctcttctgcaaatcgaggctggaccacctgagtcagcagaatctacaaatatactcaaactttgtcctcgtgaagaattcctgagactgtgtaaaaaaaatcatgatgagatctatccaataaaaaagagagaggaccgcagacgcctggctctcatcatatgcaatacaaagtttgatcacctgcctgcaaggaatggggctcactatgacatcgtggggatgaaaaggctgcttcaaggcctgggctacactgtggttgacgaaaagaatctcacagccagggatatggagtcagtgctgagggcatttgctgccagaccagagcacaagtcctctgacagcacgttcttggtactcatgtctcatggcatcctagagggaatctgcggaactgcgcataaaaagaaaaaaccggatgtgctgctttatgacaccatcttccagatattcaacaaccgcaactgcctcagtctaaaggacaaacccaaggtcatcattgtccaggcctgcagaggtgaaaaacatggggaactctgggtcagagactctccagcatccttggcagtcatctcttcacagtcatctgagaacctggaggcagattctgtttgcaagatccacgaggagaaggacttcattgctttctgttcttcaacaccacataacgtgtcctggagagaccgcacaaggggctccatcttcattacggaactcatcacatgcttccagaaatattcttgctgctgccacctaatggaaatatttcggaaggtacagaaatcatttgaagttccacaggctaaagcccagatgcccaccatagaacgagcaaccttgacaagagatttctacctctttcctggcaattgaaaatttcagctaaagatggggtccttgtcacacgaccatgagaaattagactcacagacaatctgaaaggaaaccacaggcagcccagccctcctctgtcaacatcaaagagcacatttaccagtatagcttgcatagtcaatatttggtatttcaataaaagtaaagactgtatctttttagattgtatgaactgtatctttttagattctctaatagacaatataatttcaatgaaaatggtggacgagtgaaaatgaagtggaagaaactaactagattttcgagttttatggctcatgtaacatctatacttggctgatgaagacgactggctgtgacttaccgccaacaatagaatgaaagaagatggtgttaaaagtataagataccacctcatacccattagaatgactcccatcaaaacatacaaacaaacacaaaataacaggtgtttgcagggatgtagaataatcggaaccctgtg

SEQ ID NO: 317441 - DNA, 477 bp, Homo sapiens
gcaagagcacaaggaaacaagcagaaggaattcagagaaacagctccaggctccagctcaaaggccgacaccaaaagcgaacacctctgggcgctcttgccttcaagaaggtggggaggctcacagacgcagcatccacccctcgcagggaacctcagttcctggcctgtggtcccatgaaggacatcaggctggcagattggagcacaccccttctttctaacccctcttgaaagcttccttgaatctgccagtcctgccccctggagcaggaaggaaaacagaaggcctaggacgctagaggggtcccgagctttccggagctccagccaccatcaggtctgactgctcagggacagacacaccgaccacatcctgacctcaggatgacctgcggaagtacttggcatttcttcttagccaaatcccttcattaaaagacgggtgagggttccagcgctgccctcttccttctca

SEQ ID NO: 317442 - DNA, 838 bp, Homo sapiens
cgtaggcgctcccgggcgctggcggcggcggaggagagggagcagcgtcacgggcgcccggcccgttaaaacgctgctggctggagccacctccctccctgcagcccgcaacgggaatggagtaaagggagacccgtcgacctggccacggggatcagcgatggaattaaagcaatctttgtccacccatctggaagccgagaagcctctgaggcgctatggggcggtggaggagacggcttggaaaacggagagactggggagaaatcagctggacatcatctccatggcggagacaaccatgatgccagaggagattgagctggagatggcaaaaattcagcgtctccgggaagtcttggtccgccgggagtctgagctcaggttcatgatggatgacatccagctctgcaaggacatcatggacttgaagcaggagctgcagaacttggtcgccatcccagaaaaagaaaaaaccaaactgcagaagcagagagaggatgagctaatccagaagatccacaaactggtgcagaagagagacttcctggtggacgatgcggaggtcgagcggttaagggagcaagaagaagacaaggaaatggctgatttcctgagaatcaagttaaaacctctagacaaagtaaccaaatctccagccagtctggaatctctggagaagccagaagcatatgtctcagaatattaacctcatcagatcctcagagcaaagagggttttatatgaaataagtttgagaaatgctgtttacttgaccctgtatttggagagtcccagtgtccattaggatattaaagtgatgatggatcctgctgtc

SEQ ID NO: 317443 - DNA, 554 bp, Homo sapiens
ggggcgcaacaaaatgctttctagagatcagatctagagatcagatttcagcatgggatgacagcaggcaggaccagcctcacgggcctgcaggcagttgcctggggcctcatgcctgaccagcctcatgggcctgtaggcagttgcctggggcctcatgcctagaagggtgccatgcttggtttaatgttctcctgttgctgtctagaaattgttaatacgtttggaacatggggccctacattttcatattggattgaactctgcaaactacgtacctggtcctggtagttgttcctccctaattgcaaagtttggtgcatttcatagaaagaattgggtagctactgaggctcagggagctctggcctctcttaggtctggaatctctggagaagccagaagcatatgtctcagaatattaacctcatcagatcctcagagcaaagagggttttatatgaaataagtttgagaaatgctgtttacttgaccctgtatttggagagtcccagtgtccattaggatattaaagtgatgatggatcctgctgtc

SEQ ID NO: 317444 - DNA, 502 bp, Homo sapiens
ccagactccgtctaaaaacaaaacaaaacaaagcaaacgaagtaaattactttggaaaacacattttctggttcccaaagggtgtgctcacgaatacacatttgcggcacaggctgaagtctgtcctcaaggtgtatgatggtcgcagagcaaggctgtgccctggaaccatgtcagggtctgtcccatggtgcagccttggggtcctgatggttgtatttcctgtctcctgcacagatcagctggacatcatctccatggcggagacaaccatgatgccagaggagattgagctggagatggcaaaaattcagcgtctccgggaagtcttggtccgccgggagtctgagctcaggttcatgtgagtgttttggggatgtggccaaggaaagaagtgtgtggaggagagaggaaaacctaatatttgttgatcgtctactgtgtgccaggcactgagataaaggcattatgcacgtttttaaaagcctcatttgattctcac

SEQ ID NO: 317445 - DNA, 2423 bp, Homo sapiens
cgtaggcgctcccgggcgctggcggcggcggaggagagggagcagcgtcacgggcgcccggcccgttaaaacgctgctggctggagccacctccctccctgcagcccgcaacgggaatggagtaaagggagacccgtcgacctggccacggggatcagcgatggaattaaagcaatctttgtccacccatctggaagccgagaagcctctgaggcgctatggggcggtggaggagacggcttggaaaacggagagactggggagaaatcagctggacatcatctccatggcggagacaaccatgatgccagaggagattgagctggagatggcaaaaattcagcgtctccgggaagtcttggtccgccgggagtctgagctcaggttcatgatggatgacatccagctctgcaaggacatcatggacttgaagcaggagctgcagaacttggtcgccatcccagaaaaagaaaaaaccaaactgcagaagcagagagaggatgagctaatccagaagatccacaaactggtgcagaagagagacttcctggtggacgatgcggaggtcgagcggttaagggagcaagaagaagacaaggaaatggctgatttcctgagaatcaagttaaaacctctagacaaagtaaccaaatctccagccagctcccgggcagagaagaaagcagagcccccacctagcaagcccacggtggccaagacggggctggcactgatcaaggattgttgcggggccacccagtgcaacatcatgtagcccccacgtggggtgccctgggccatggggacccccccccaccctcttgtctttatagcccccatttcaccggggcccaagagctctccaaggcagaaggggttgaaggcaagcccgtgactgtcaccagaggccatgggcacggcaggcgggcctggccaccctgtacagagtgtagcagtagggagtctctcaccgtcgcatggtcctccccagagcatgccgaacccaggagtctgtctcactgtttatccaaacaccaggaaaggtcctccctcaaaaaagcatatctccacttctctctagctgtatctaacccaccgtgtgaatgaactgggagaggggcatgctccccagctgtgtgtagtcgtgacttctcaacaatctagcaccatgtcggacacgttccccatccaccctcctagctctgctctcagagctaggcacatgggcacaggtcccctcccgtctgtcctctcccagcaactgtgccctggagggctccacatggcccccgtgtctctcgggcaccacccatatagcagtcccagagggcccatctgtaaagatcgagcttgtgtgtggtgtcgtggtcacatctcccgcttccccccatcctgtgtctgggcacagttcacatcaggacagcgtccattgtgctctcagtctgcctcaggtgtgtgcctggagggggcctggactggcatggatccagtgtgcagaagagccagcagggaaccggaagctctgatgtcaaggccagagcagttgagaatgggacccagagtagatgctgacctgggcactccaccattccggggccaccacagagatgccagcaggatgccactttgccagcccgacacacggacctttgtaaagaacagcaacaggcaggagaggcagcgtgtgaccagattgtgtcccgtcattgggtggcatatgttaactagctgccaaacaacttcaacccgtgtaattcatgtacatttgcaacagccagcccggtacagcctgtgtgacttctctgtatgtgtgtgtgtgtcgtgaccagcctaagtagttagcataactcaagatgctgatgtgcagtcacccatcagagaaaataaaaatggaaaccacgttcacagcattttaaaagtttttactttttttcttgattatggaagtaatccatgtacatagtaaatcattttaaaagtacaaaaagtatgaagaagtttgtcttaaaaaaaaaaaaaattattcctccaactagagaccactctgatgtttcgacgttttaaaaaagtctttttttgtgcattttttcatcgttgacatcatattgtgatatcatttataaccagttttttcctacttattataccaccatcttccacatcattaaaagctctttgtaaacattaaacactcttcataaatcaaaaaaatgtctgtttagtaatccatcttgtggatgtactgtaattcatctaatcatttcctcactattggatgtgtagactggttctaggttttcttataaatagtgtcttggattagccaggcatggtaatgggtgcctgtaatcccagctaatttttgtatttttagtagagatggggtttcaccatattggccaggctggtctcaaactcctgac

SEQ ID NO: 317446 - DNA, 2340 bp, Homo sapiens
cgtaggcgctcccgggcgctggcggcggcggaggagagggagcagcgtcacgggcgcccggcccgttaaaacgctgctggctggagccacctccctccctgcagcccgcaacgggaatggagtaaagggagacccgtcgacctggccacggggatcagcgatggaattaaagcaatctttgtccacccatctggaagccgagaagcctctgaggcgctatggggcggtggaggagacggcttggaaaacggagagactggggagaaatcagctggacatcatctccatggcggagacaaccatgatgccagaggagattgagctggagatggcaaaaattcagcgtctccgggaagtcttggtccgccgggagtctgagctcaggttcatgatggatgacatccagctctgcaaggacatcatggacttgaagcaggagctgcagaacttggtcgccatcccagaaaaagaaaaaaccaaactgcagaagcagagagaggatgagctaatccagaagatccacaaactggtgcagaagagagacttcctggtggacgatgcggaggtcgagcggttaaggctcccgggcagagaagaaagcagagcccccacctagcaagcccacggtggccaagacggggctggcactgatcaaggattgttgcggggccacccagtgcaacatcatgtagcccccacgtggggtgccctgggccatggggacccccccccaccctcttgtctttatagcccccatttcaccggggcccaagagctctccaaggcagaaggggttgaaggcaagcccgtgactgtcaccagaggccatgggcacggcaggcgggcctggccaccctgtacagagtgtagcagtagggagtctctcaccgtcgcatggtcctccccagagcatgccgaacccaggagtctgtctcactgtttatccaaacaccaggaaaggtcctccctcaaaaaagcatatctccacttctctctagctgtatctaacccaccgtgtgaatgaactgggagaggggcatgctccccagctgtgtgtagtcgtgacttctcaacaatctagcaccatgtcggacacgttccccatccaccctcctagctctgctctcagagctaggcacatgggcacaggtcccctcccgtctgtcctctcccagcaactgtgccctggagggctccacatggcccccgtgtctctcgggcaccacccatatagcagtcccagagggcccatctgtaaagatcgagcttgtgtgtggtgtcgtggtcacatctcccgcttccccccatcctgtgtctgggcacagttcacatcaggacagcgtccattgtgctctcagtctgcctcaggtgtgtgcctggagggggcctggactggcatggatccagtgtgcagaagagccagcagggaaccggaagctctgatgtcaaggccagagcagttgagaatgggacccagagtagatgctgacctgggcactccaccattccggggccaccacagagatgccagcaggatgccactttgccagcccgacacacggacctttgtaaagaacagcaacaggcaggagaggcagcgtgtgaccagattgtgtcccgtcattgggtggcatatgttaactagctgccaaacaacttcaacccgtgtaattcatgtacatttgcaacagccagcccggtacagcctgtgtgacttctctgtatgtgtgtgtgtgtcgtgaccagcctaagtagttagcataactcaagatgctgatgtgcagtcacccatcagagaaaataaaaatggaaaccacgttcacagcattttaaaagtttttactttttttcttgattatggaagtaatccatgtacatagtaaatcattttaaaagtacaaaaagtatgaagaagtttgtcttaaaaaaaaaaaaaattattcctccaactagagaccactctgatgtttcgacgttttaaaaaagtctttttttgtgcattttttcatcgttgacatcatattgtgatatcatttataaccagttttttcctacttattataccaccatcttccacatcattaaaagctctttgtaaacattaaacactcttcataaatcaaaaaaatgtctgtttagtaatccatcttgtggatgtactgtaattcatctaatcatttcctcactattggatgtgtagactggttctaggttttcttataaatagtgtcttggattagccaggcatggtaatgggtgcctgtaatcccagctaatttttgtatttttagtagagatggggtttcaccatattggccaggctggtctcaaactcctgac

SEQ ID NO: 317447 - DNA, 2328 bp, Homo sapiens
ggctggggaaacagaaactcgcagaagttaaaaaaatgtgcttgaggtgccactggagaataacaatcatagccaggatctgaagcctgtcagtttcctcagccgcaaattcttccatgtggggcgacctcacagagacgggatgtatgggacggcggagtgcaaagaaagatcagctggacatcatctccatggcggagacaaccatgatgccagaggagattgagctggagatggcaaaaattcagcgtctccgggaagtcttggtccgccgggagtctgagctcaggttcatgatggatgacatccagctctgcaaggacatcatggacttgaagcaggagctgcagaacttggtcgccatcccagaaaaagaaaaaaccaaactgcagaagcagagagaggatgagctaatccagaagatccacaaactggtgcagaagagagacttcctggtggacgatgcggaggtcgagcggttaagggagcaagaagaagacaaggaaatggctgatttcctgagaatcaagttaaaacctctagacaaagtaaccaaatctccagccagctcccgggcagagaagaaagcagagcccccacctagcaagcccacggtggccaagacggggctggcactgatcaaggattgttgcggggccacccagtgcaacatcatgtagcccccacgtggggtgccctgggccatggggacccccccccaccctcttgtctttatagcccccatttcaccggggcccaagagctctccaaggcagaaggggttgaaggcaagcccgtgactgtcaccagaggccatgggcacggcaggcgggcctggccaccctgtacagagtgtagcagtagggagtctctcaccgtcgcatggtcctccccagagcatgccgaacccaggagtctgtctcactgtttatccaaacaccaggaaaggtcctccctcaaaaaagcatatctccacttctctctagctgtatctaacccaccgtgtgaatgaactgggagaggggcatgctccccagctgtgtgtagtcgtgacttctcaacaatctagcaccatgtcggacacgttccccatccaccctcctagctctgctctcagagctaggcacatgggcacaggtcccctcccgtctgtcctctcccagcaactgtgccctggagggctccacatggcccccgtgtctctcgggcaccacccatatagcagtcccagagggcccatctgtaaagatcgagcttgtgtgtggtgtcgtggtcacatctcccgcttccccccatcctgtgtctgggcacagttcacatcaggacagcgtccattgtgctctcagtctgcctcaggtgtgtgcctggagggggcctggactggcatggatccagtgtgcagaagagccagcagggaaccggaagctctgatgtcaaggccagagcagttgagaatgggacccagagtagatgctgacctgggcactccaccattccggggccaccacagagatgccagcaggatgccactttgccagcccgacacacggacctttgtaaagaacagcaacaggcaggagaggcagcgtgtgaccagattgtgtcccgtcattgggtggcatatgttaactagctgccaaacaacttcaacccgtgtaattcatgtacatttgcaacagccagcccggtacagcctgtgtgacttctctgtatgtgtgtgtgtgtcgtgaccagcctaagtagttagcataactcaagatgctgatgtgcagtcacccatcagagaaaataaaaatggaaaccacgttcacagcattttaaaagtttttactttttttcttgattatggaagtaatccatgtacatagtaaatcattttaaaagtacaaaaagtatgaagaagtttgtcttaaaaaaaaaaaaaattattcctccaactagagaccactctgatgtttcgacgttttaaaaaagtctttttttgtgcattttttcatcgttgacatcatattgtgatatcatttataaccagttttttcctacttattataccaccatcttccacatcattaaaagctctttgtaaacattaaacactcttcataaatcaaaaaaatgtctgtttagtaatccatcttgtggatgtactgtaattcatctaatcatttcctcactattggatgtgtagactggttctaggttttcttataaatagtgtcttggattagccaggcatggtaatgggtgcctgtaatcccagctaatttttgtatttttagtagagatggggtttcaccatattggccaggctggtctcaaactcctgac

SEQ ID NO: 317448 - DNA, 2299 bp, Homo sapiens
cgtaggcgctcccgggcgctggcggcggcggaggagagggagcagcgtcacgggcgcccggcccgttaaaacgctgctggctggagccacctccctccctgcagcccgcaacgggaatggagtaaagggagacccgtcgacctggccacggggatcagcgatggaattaaagcaatctttgtccacccatctggaagccgagaagcctctgaggcgctatggggcggtggaggagacggcttggaaaacggagagactggggagaagatggatgacatccagctctgcaaggacatcatggacttgaagcaggagctgcagaacttggtcgccatcccagaaaaagaaaaaaccaaactgcagaagcagagagaggatgagctaatccagaagatccacaaactggtgcagaagagagacttcctggtggacgatgcggaggtcgagcggttaagggagcaagaagaagacaaggaaatggctgatttcctgagaatcaagttaaaacctctagacaaagtaaccaaatctccagccagctcccgggcagagaagaaagcagagcccccacctagcaagcccacggtggccaagacggggctggcactgatcaaggattgttgcggggccacccagtgcaacatcatgtagcccccacgtggggtgccctgggccatggggacccccccccaccctcttgtctttatagcccccatttcaccggggcccaagagctctccaaggcagaaggggttgaaggcaagcccgtgactgtcaccagaggccatgggcacggcaggcgggcctggccaccctgtacagagtgtagcagtagggagtctctcaccgtcgcatggtcctccccagagcatgccgaacccaggagtctgtctcactgtttatccaaacaccaggaaaggtcctccctcaaaaaagcatatctccacttctctctagctgtatctaacccaccgtgtgaatgaactgggagaggggcatgctccccagctgtgtgtagtcgtgacttctcaacaatctagcaccatgtcggacacgttccccatccaccctcctagctctgctctcagagctaggcacatgggcacaggtcccctcccgtctgtcctctcccagcaactgtgccctggagggctccacatggcccccgtgtctctcgggcaccacccatatagcagtcccagagggcccatctgtaaagatcgagcttgtgtgtggtgtcgtggtcacatctcccgcttccccccatcctgtgtctgggcacagttcacatcaggacagcgtccattgtgctctcagtctgcctcaggtgtgtgcctggagggggcctggactggcatggatccagtgtgcagaagagccagcagggaaccggaagctctgatgtcaaggccagagcagttgagaatgggacccagagtagatgctgacctgggcactccaccattccggggccaccacagagatgccagcaggatgccactttgccagcccgacacacggacctttgtaaagaacagcaacaggcaggagaggcagcgtgtgaccagattgtgtcccgtcattgggtggcatatgttaactagctgccaaacaacttcaacccgtgtaattcatgtacatttgcaacagccagcccggtacagcctgtgtgacttctctgtatgtgtgtgtgtgtcgtgaccagcctaagtagttagcataactcaagatgctgatgtgcagtcacccatcagagaaaataaaaatggaaaccacgttcacagcattttaaaagtttttactttttttcttgattatggaagtaatccatgtacatagtaaatcattttaaaagtacaaaaagtatgaagaagtttgtcttaaaaaaaaaaaaaattattcctccaactagagaccactctgatgtttcgacgttttaaaaaagtctttttttgtgcattttttcatcgttgacatcatattgtgatatcatttataaccagttttttcctacttattataccaccatcttccacatcattaaaagctctttgtaaacattaaacactcttcataaatcaaaaaaatgtctgtttagtaatccatcttgtggatgtactgtaattcatctaatcatttcctcactattggatgtgtagactggttctaggttttcttataaatagtgtcttggattagccaggcatggtaatgggtgcctgtaatcccagctaatttttgtatttttagtagagatggggtttcaccatattggccaggctggtctcaaactcctgac

SEQ ID NO: 317449 - DNA, 1928 bp, Homo sapiens
cgtaggcgctcccgggcgctggcggcggcggaggagagggagcagcgtcacgggcgcccggcccgttaaaacgctgctggctggagccacctccctccctgcagcccgcaacgggaatggagtaaagggagacccgtcgacctggccacggggatcagcgatggaattaaagcaatctttgtccacccatctggaagccgagaagcctctgaggcgctatggggcggtggaggagacggcttggaaaacggagagactggggagaaatcagctggacatcatctccatggcggagacaaccatgatgccagaggagattgagctggagatggcaaaaattcagcgtctccgggaagtcttggtccgccgggagtctgagctcaggttcatgctgtgcaatcttgcacaaatatcttaccttctctgagcctcggtggcctcatctgttaaatagccatgcatccagtatctcgcagggtggtcatgaggagtaaaagagatcaagcgtattaagtgctcagtccagtgcctgctaccacgatggatgacatccagctctgcaaggacatcatggacttgaagcaggagctgcagaacttggtcgccatcccagaaaaagaaaaaaccaaactgcagaagcagagagaggatgagctaatccagaagatccacaaactggtgcagaagagagacttcctggtggacgatgcggaggtcgagcggttaagggagcaagaagaagacaaggaaatggctgatttcctgagaatcaagttaaaacctctagacaaagtaaccaaatctccagccacacccatatagcagtcccagagggcccatctgtaaagatcgagcttgtgtgtggtgtcgtggtcacatctcccgcttccccccatcctgtgtctgggcacagttcacatcaggacagcgtccattgtgctctcagtctgcctcaggtgtgtgcctggagggggcctggactggcatggatccagtgtgcagaagagccagcagggaaccggaagctctgatgtcaaggccagagcagttgagaatgggacccagagtagatgctgacctgggcactccaccattccggggccaccacagagatgccagcaggatgccactttgccagcccgacacacggacctttgtaaagaacagcaacaggcaggagaggcagcgtgtgaccagattgtgtcccgtcattgggtggcatatgttaactagctgccaaacaacttcaacccgtgtaattcatgtacatttgcaacagccagcccggtacagcctgtgtgacttctctgtatgtgtgtgtgtgtcgtgaccagcctaagtagttagcataactcaagatgctgatgtgcagtcacccatcagagaaaataaaaatggaaaccacgttcacagcattttaaaagtttttactttttttcttgattatggaagtaatccatgtacatagtaaatcattttaaaagtacaaaaagtatgaagaagtttgtcttaaaaaaaaaaaaaattattcctccaactagagaccactctgatgtttcgacgttttaaaaaagtctttttttgtgcattttttcatcgttgacatcatattgtgatatcatttataaccagttttttcctacttattataccaccatcttccacatcattaaaagctctttgtaaacattaaacactcttcataaatcaaaaaaatgtctgtttagtaatccatcttgtggatgtactgtaattcatctaatcatttcctcactattggatgtgtagactggttctaggttttcttataaatagtgtcttggattagccaggcatggtaatgggtgcctgtaatcccagctaatttttgtatttttagtagagatggggtttcaccatattggccaggctggtctcaaactcctgac

SEQ ID NO: 317450 - DNA, 1615 bp, Homo sapiens
ccagactccgtctaaaaacaaaacaaaacaaagcaaacgaagtaaattactttggaaaacacattttctggttcccaaagggtgtgctcacgaatacacatttgcggcacaggctgaagtctgtcctcaaggtgtatgatggtcgcagagcaaggctgtgccctggaaccatgtcagggtctgtcccatggtgcagccttggggtcctgatggttgtatttcctgtctcctgcacagatcagctggacatcatctccatggcggagacaaccatgatgccagaggagattgagctggagatggcaaaaattcagcgtctccgggaagtcttggtccgccgggagtctgagctcaggttcatgatggatgacatccagctctgcaaggacatcatggacttgaagcaggagctgcagaacttggtcgccatcccagaaaaagaaaaaaccaaactgcagaagcagagagaggatgagctaatccagaagatccacaaactggtgcagaagagagacttcctggtggacgatgcggaggtcgagcggttaagggagcaagaagaagacaaggaaatggctgatttcctgagaatcaagttaaaacctctagacaaagtaaccaaatctccagccatctgcctcaggtgtgtgcctggagggggcctggactggcatggatccagtgtgcagaagagccagcagggaaccggaagctctgatgtcaaggccagagcagttgagaatgggacccagagtagatgctgacctgggcactccaccattccggggccaccacagagatgccagcaggatgccactttgccagcccgacacacggacctttgtaaagaacagcaacaggcaggagaggcagcgtgtgaccagattgtgtcccgtcattgggtggcatatgttaactagctgccaaacaacttcaacccgtgtaattcatgtacatttgcaacagccagcccggtacagcctgtgtgacttctctgtatgtgtgtgtgtgtcgtgaccagcctaagtagttagcataactcaagatgctgatgtgcagtcacccatcagagaaaataaaaatggaaaccacgttcacagcattttaaaagtttttactttttttcttgattatggaagtaatccatgtacatagtaaatcattttaaaagtacaaaaagtatgaagaagtttgtcttaaaaaaaaaaaaaattattcctccaactagagaccactctgatgtttcgacgttttaaaaaagtctttttttgtgcattttttcatcgttgacatcatattgtgatatcatttataaccagttttttcctacttattataccaccatcttccacatcattaaaagctctttgtaaacattaaacactcttcataaatcaaaaaaatgtctgtttagtaatccatcttgtggatgtactgtaattcatctaatcatttcctcactattggatgtgtagactggttctaggttttcttataaatagtgtcttggattagccaggcatggtaatgggtgcctgtaatcccagctaatttttgtatttttagtagagatggggtttcaccatattggccaggctggtctcaaactcctgac

SEQ ID NO: 317451 - DNA, 714 bp, Homo sapiens
  misc_feature (61)..(61): n is a, c, g, or t
tacctagctgcactgtcatatgttattatcccaaatcttgtcaaatgcatcagtaagcagnacagccagcccggtacagcctgtgtgacttctctgtatgtgtgtgtgtgtcgtgaccagcctaagtagttagcataactcaagatgctgatgtgcagtcacccatcagagaaaataaaaatggaaaccacgttcacagcattttaaaagtttttactttttttcttgattatggaagtaatccatgtacatagtaaatcattttaaaagtacaaaaagtatgaagaagtttgtcttaaaaaaaaaaaaaattattcctccaactagagaccactctgatgtttcgacgttttaaaaaagtctttttttgtgcattttttcatcgttgacatcatattgtgatatcatttataaccagttttttcctacttattataccaccatcttccacatcattaaaagctctttgtaaacattaaacactcttcataaatcaaaaaaatgtctgtttagtaatccatcttgtggatgtactgtaattcatctaatcatttcctcactattggatgtgtagactggttctaggttttcttataaatagtgtcttggattagccaggcatggtaatgggtgcctgtaatcccagctaatttttgtatttttagtagagatggggtttcaccatattggccaggctggtctcaaactcctgac

SEQ ID NO: 317452 - DNA, 864 bp, Homo sapiens
tttcgtttctggtcctttttcctcagagatcacttcaataaaaaaatgtatgaggaatttagacaacttgcttgggaagatgcaaaagaaaattacaggtcagatattttcttttacacttcaagggagttttattattttcttcttctttttttctttacccaggtagatccgatagagggagtttttagaaaataatttttaaaactagtactgaagtagcctgattttgaaccgtgaaagtagcacaatataactagagggagacctgtattagttttctatttctgcattgcaaattaccccaaaactccataggttaaaacaataaacatttgttagttcacagcattttaaaagtttttactttttttcttgattatggaagtaatccatgtacatagtaaatcattttaaaagtacaaaaagtatgaagaagtttgtcttaaaaaaaaaaaaaattattcctccaactagagaccactctgatgtttcgacgttttaaaaaagtctttttttgtgcattttttcatcgttgacatcatattgtgatatcatttataaccagttttttcctacttattataccaccatcttccacatcattaaaagctctttgtaaacattaaacactcttcataaatcaaaaaaatgtctgtttagtaatccatcttgtggatgtactgtaattcatctaatcatttcctcactattggatgtgtagactggttctaggttttcttataaatagtgtcttggattagccaggcatggtaatgggtgcctgtaatcccagctaatttttgtatttttagtagagatggggtttcaccatattggccaggctggtctcaaactcctgac

SEQ ID NO: 317453 - DNA, 176 bp, Homo sapiens
gggaaaacctctacaatgagcatgtatggcctcttcaaaagataacccacctttaatagcttctttgtgttaaccgggtgatgctcagggcgtaatgctctgctgatgtaacctgctgttgatggtgtcctgtttccccaggatggatgacatccagctctgcaaggacatcatgg

SEQ ID NO: 317454 - DNA, 488 bp, Homo sapiens
tgatttttttaaaaaaagaaaacattaaaaaatccaatttatttaagctgtcacagacgcttccagattaccagggccaccttccaagctgggaaaccttgcagactgtggggtcctgcacacctagacttgctccttttagaagccatggaggaggttgataatgggaataacatttattgtagcttatctctatgccttgagcaatgtgctcacactggctggttccctcctcacatcagcctgatgagtcagatcctgttattacttctcactttacagatgaggaagtagcagtaaatccattacccttttcaagcggaggttgcaagaggttgcaagcggaggcagaataaacacttgaaacagtgagtcagatcctgttatcacttctcactttacagatgaggaagtggcagtaaatccactgcccacggtcccaggggttgttagtgacagagtcatcattcatctccctccctccccac

SEQ ID NO: 317455 - DNA, 352 bp, Homo sapiens
agagagaggatgagctaatccagaagatccacaaactggtgcagaagagagacttcctggtggacgatgcggaggtcgagcggttaaggtgagtgcactgcgggtacccgatcactgggctgcaggacagcaaccttctgcttccttccagaacccatcttctgctcctgggactcacagccttgcctaacaggcatggccttgatccacagtctctggacactgaatcccaaggaaccccagccttctggcttgagaattcattttgtatataagagaatttcaaatctgtgcctcttgagggaatgttgttccaggaagtgaccagggaggagtcacatcccataataca

SEQ ID NO: 317456 - DNA, 533 bp, Homo sapiens
ggcctggactggcatggatccagtgtgcagaagagccagcagggaaccggaagctctgatgtcaaggccagagcagttgagaatgggacccagagtagatgctgacctgggcactccaccattccggggccaccacagagatgccagcaggatgccactttgccagcccgacacacggacctttgtaaagaacagcaacaggcaggagaggcagcgtgtgaccagattgtgtcccgtcattgggtggcatatgttaactagctgccaaacaacttcaacccgtgtaattcatgtacatttgcaacagccagcccggtacagcctgtgtgacttctctgtatgtgtgtgtgtgtcgtgaccagcctaagtagttagcataactcaagatgctgatgtgcagtcacccatcagagaaaataaaaatggaaaccacgttcacagcattttaaaagtttttactttttttcttgattatggaagtaatccatgtacatagtaaatcattttaaaagtacaaaaagtatgaagaagtt

SEQ ID NO: 317457 - DNA, 751 bp, Homo sapiens
cgtaggcgctcccgggcgctggcggcggcggaggagagggagcagcgtcacgggcgcccggcccgttaaaacgctgctggctggagccacctccctccctgcagcccgcaacgggaatggagtaaagggagacccgtcgacctggccacggggatcagcgatggaattaaagcaatctttgtccacccatctggaagccgagaagcctctgaggcgctatggggcggtggaggagacggcttggaaaacggagagactggggagaaatcagctggacatcatctccatggcggagacaaccatgatgccagaggagattgagctggagatggcaaaaattcagcgtctccgggaagtcttggtccgccgggagtctgagctcaggttcatgatggatgacatccagctctgcaaggacatcatggacttgaagcaggagctgcagaacttggtcgccatcccagaaaaagaaaaaaccaaactgcagaagcagagagaggatgagctaatccagaagatccacaaactggtgcagaagagagacttcctggtggacgatgcggaggtcgagcggttaagggagcaagaagaagacaaggaaatggctgatttcctgagaatcaagttaaaacctctagacaaagtaaccaaatctccagccaatgaggaagtagcagtaaatccattacccttttcaagcggaggttgcaagaggttgcaagcggaggcagaataaacacttgaaacagtg

SEQ ID NO: 317458 - DNA, 981 bp, Homo sapiens
  misc_feature (854)..(854): n is a, c, g, or t
  misc_feature (859)..(859): n is a, c, g, or t
  misc_feature (863)..(863): n is a, c, g, or t
  misc_feature (867)..(868): n is a, c, g, or t
  misc_feature (876)..(876): n is a, c, g, or t
cgtaggcgctcccgggcgctggcggcggcggaggagagggagcagcgtcacgggcgcccggcccgttaaaacgctgctggctggagccacctccctccctgcagcccgcaacgggaatggagtaaagggagacccgtcgacctggccacggggatcagcgatggaattaaagcaatctttgtccacccatctggaagccgagaagcctctgaggcgctatggggcggtggaggagacggcttggaaaacggagagactggggagaaatcagctggacatcatctccatggcggagacaaccatgatgccagaggagattgagctggagatggcaaaaattcagcgtctccgggaagtcttggtccgccgggagtctgagctcaggttcatgctgtgcaatcttgcacaaatatcttaccttctctgagcctcggtggcctcatctgttaaatagccatgcatccagtatctcgcagggtggtcatgaggagtaaaagagatcaagcgtattaagtgctcagtccagtgcctgctaccacgatggatgacatccagctctgcaaggacatcatggacttgaagcaggagctgcagaacttggtcgccatcccagaaaaagaaaaaaccaaactgcagaagcagagagaggatgagctaatccagaagatccacaaactggtgcagaagagagacttcctggtggacgatgcggaggtcgagcggttaagggagcaagaagaagacaaggaaatggctgatttcctgagaatcaagttaaaacctctagacaaagtaaccaaatctccagccactccgggcagagaagaagcagagcccactagcagccacggggncagangggncggnntgacaggntgtggggccccggacgcctggtgcccacgggggcggcggggaccccccctggttatcctcccggcacagcccggaagggtagaccctgcaccgccgggcggccag

SEQ ID NO: 317459 - DNA, 2380 bp, Homo sapiens
cgtaggcgctcccgggcgctggcggcggcggaggagagggagcagcgtcacgggcgcccggcccgttaaaacgctgctggctggagccacctccctccctgcagcccgcaacgggaatggagtaaagggagacccgtcgacctggccacggggatcagcgatggaattaaagcaatctttgtccacccatctggaagccgagaagcctctgaggcgctatggggcggtggaggagacggcttggaaaacggagagactggggagaaatcagctggacatcatctccatggcggagacaaccatgatgccagaggagattgagctggagatggcaaaaattcagcgtctccgggaagtcttggtccgccgggagtctgagctcaggttcatgatggatgacatccagctctgcaaggacatcatggacttgaagcaggagctgcagaacttggtcgccatcccagaaaaagaaaaaaccaaactgcagaagcagagagaggatgagctaatccagaagatccacaaactggtgcagaagagagacttcctggtggacgatgcggaggtcgagcggttaagggagcaagaagaagacaaggaaatggctgatttcctgagaatcaagttaaaacctctagacaaagtaaccaaatctccagccagctcccgggcagagaagaaagcagagcccccacctagcaagcccacggtggccaagacggggctggcactgatcaaggattgttgcggggccacccagtgcaacatcatgtagcccccacgtggggtgccctgggccatggggacccccccccaccctcttgtctttatagcccccatttcaccggggcccaagagctctccaaggcagaaggggttgaaggcaagcccgtgactgtcaccagaggccatgggcacggcaggcgggcctggccaccctgtacagagtgtagcagtagggagtctctcaccctcactgtttatccaaacaccaggaaaggtcctccctcaaaaaagcatatctccacttctctctagctgtatctaacccaccgtgtgaatgaactgggagaggggcatgctccccagctgtgtgtagtcgtgacttctcaacaatctagcaccatgtcggacacgttccccatccaccctcctagctctgctctcagagctaggcacatgggcacaggtcccctcccgtctgtcctctcccagcaactgtgccctggagggctccacatggcccccgtgtctctcgggcaccacccatatagcagtcccagagggcccatctgtaaagatcgagcttgtgtgtggtgtcgtggtcacatctcccgcttccccccatcctgtgtctgggcacagttcacatcaggacagcgtccattgtgctctcagtctgcctcaggtgtgtgcctggagggggcctggactggcatggatccagtgtgcagaagagccagcagggaaccggaagctctgatgtcaaggccagagcagttgagaatgggacccagagtagatgctgacctgggcactccaccattccggggccaccacagagatgccagcaggatgccactttgccagcccgacacacggacctttgtaaagaacagcaacaggcaggagaggcagcgtgtgaccagattgtgtcccgtcattgggtggcatatgttaactagctgccaaacaacttcaacccgtgtaattcatgtacatttgcaacagccagcccggtacagcctgtgtgacttctctgtatgtgtgtgtgtgtcgtgaccagcctaagtagttagcataactcaagatgctgatgtgcagtcacccatcagagaaaataaaaatggaaaccacgttcacagcattttaaaagtttttactttttttcttgattatggaagtaatccatgtacatagtaaatcattttaaaagtacaaaaagtatgaagaagtttgtcttaaaaaaaaaaaaaattattcctccaactagagaccactctgatgtttcgacgttttaaaaaagtctttttttgtgcattttttcatcgttgacatcatattgtgatatcatttataaccagttttttcctacttattataccaccatcttccacatcattaaaagctctttgtaaacattaaacactcttcataaatcaaaaaaatgtctgtttagtaatccatcttgtggatgtactgtaattcatctaatcatttcctcactattggatgtgtagactggttctaggttttcttataaatagtgtcttggattagccaggcatggtaatgggtgcctgtaatcccagctaatttttgtatttttagtagagatggggtttcaccatattggccaggctggtctcaaactcctgac

SEQ ID NO: 317460 - DNA, 2572 bp, Homo sapiens
cgtaggcgctcccgggcgctggcggcggcggaggagagggagcagcgtcacgggcgcccggcccgttaaaacgctgctggctggagccacctccctccctgcagcccgcaacgggaatggagtaaagggagacccgtcgacctggccacggggatcagcgatggaattaaagcaatctttgtccacccatctggaagccgagaagcctctgaggcgctatggggcggtggaggagacggcttggaaaacggagagactggggagaaatcagctggacatcatctccatggcggagacaaccatgatgccagaggagattgagctggagatggcaaaaattcagcgtctccgggaagtcttggtccgccgggagtctgagctcaggttcatgctgtgcaatcttgcacaaatatcttaccttctctgagcctcggtggcctcatctgttaaatagccatgcatccagtatctcgcagggtggtcatgaggagtaaaagagatcaagcgtattaagtgctcagtccagtgcctgctaccacgatggatgacatccagctctgcaaggacatcatggacttgaagcaggagctgcagaacttggtcgccatcccagaaaaagaaaaaaccaaactgcagaagcagagagaggatgagctaatccagaagatccacaaactggtgcagaagagagacttcctggtggacgatgcggaggtcgagcggttaagggagcaagaagaagacaaggaaatggctgatttcctgagaatcaagttaaaacctctagacaaagtaaccaaatctccagccagctcccgggcagagaagaaagcagagcccccacctagcaagcccacggtggccaagacggggctggcactgatcaaggattgttgcggggccacccagtgcaacatcatgtagcccccacgtggggtgccctgggccatggggacccccccccaccctcttgtctttatagcccccatttcaccggggcccaagagctctccaaggcagaaggggttgaaggcaagcccgtgactgtcaccagaggccatgggcacggcaggcgggcctggccaccctgtacagagtgtagcagtagggagtctctcaccgtcgcatggtcctccccagagcatgccgaacccaggagtctgtctcactgtttatccaaacaccaggaaaggtcctccctcaaaaaagcatatctccacttctctctagctgtatctaacccaccgtgtgaatgaactgggagaggggcatgctccccagctgtgtgtagtcgtgacttctcaacaatctagcaccatgtcggacacgttccccatccaccctcctagctctgctctcagagctaggcacatgggcacaggtcccctcccgtctgtcctctcccagcaactgtgccctggagggctccacatggcccccgtgtctctcgggcaccacccatatagcagtcccagagggcccatctgtaaagatcgagcttgtgtgtggtgtcgtggtcacatctcccgcttccccccatcctgtgtctgggcacagttcacatcaggacagcgtccattgtgctctcagtctgcctcaggtgtgtgcctggagggggcctggactggcatggatccagtgtgcagaagagccagcagggaaccggaagctctgatgtcaaggccagagcagttgagaatgggacccagagtagatgctgacctgggcactccaccattccggggccaccacagagatgccagcaggatgccactttgccagcccgacacacggacctttgtaaagaacagcaacaggcaggagaggcagcgtgtgaccagattgtgtcccgtcattgggtggcatatgttaactagctgccaaacaacttcaacccgtgtaattcatgtacatttgcaacagccagcccggtacagcctgtgtgacttctctgtatgtgtgtgtgtgtcgtgaccagcctaagtagttagcataactcaagatgctgatgtgcagtcacccatcagagaaaataaaaatggaaaccacgttcacagcattttaaaagtttttactttttttcttgattatggaagtaatccatgtacatagtaaatcattttaaaagtacaaaaagtatgaagaagtttgtcttaaaaaaaaaaaaaattattcctccaactagagaccactctgatgtttcgacgttttaaaaaagtctttttttgtgcattttttcatcgttgacatcatattgtgatatcatttataaccagttttttcctacttattataccaccatcttccacatcattaaaagctctttgtaaacattaaacactcttcataaatcaaaaaaatgtctgtttagtaatccatcttgtggatgtactgtaattcatctaatcatttcctcactattggatgtgtagactggttctaggttttcttataaatagtgtcttggattagccaggcatggtaatgggtgcctgtaatcccagctaatttttgtatttttagtagagatggggtttcaccatattggccaggctggtctcaaactcctgac

SEQ ID NO: 317461 - DNA, 2394 bp, Homo sapiens
ccagactccgtctaaaaacaaaacaaaacaaagcaaacgaagtaaattactttggaaaacacattttctggttcccaaagggtgtgctcacgaatacacatttgcggcacaggctgaagtctgtcctcaaggtgtatgatggtcgcagagcaaggctgtgccctggaaccatgtcagggtctgtcccatggtgcagccttggggtcctgatggttgtatttcctgtctcctgcacagatcagctggacatcatctccatggcggagacaaccatgatgccagaggagattgagctggagatggcaaaaattcagcgtctccgggaagtcttggtccgccgggagtctgagctcaggttcatgatggatgacatccagctctgcaaggacatcatggacttgaagcaggagctgcagaacttggtcgccatcccagaaaaagaaaaaaccaaactgcagaagcagagagaggatgagctaatccagaagatccacaaactggtgcagaagagagacttcctggtggacgatgcggaggtcgagcggttaagggagcaagaagaagacaaggaaatggctgatttcctgagaatcaagttaaaacctctagacaaagtaaccaaatctccagccagctcccgggcagagaagaaagcagagcccccacctagcaagcccacggtggccaagacggggctggcactgatcaaggattgttgcggggccacccagtgcaacatcatgtagcccccacgtggggtgccctgggccatggggacccccccccaccctcttgtctttatagcccccatttcaccggggcccaagagctctccaaggcagaaggggttgaaggcaagcccgtgactgtcaccagaggccatgggcacggcaggcgggcctggccaccctgtacagagtgtagcagtagggagtctctcaccgtcgcatggtcctccccagagcatgccgaacccaggagtctgtctcactgtttatccaaacaccaggaaaggtcctccctcaaaaaagcatatctccacttctctctagctgtatctaacccaccgtgtgaatgaactgggagaggggcatgctccccagctgtgtgtagtcgtgacttctcaacaatctagcaccatgtcggacacgttccccatccaccctcctagctctgctctcagagctaggcacatgggcacaggtcccctcccgtctgtcctctcccagcaactgtgccctggagggctccacatggcccccgtgtctctcgggcaccacccatatagcagtcccagagggcccatctgtaaagatcgagcttgtgtgtggtgtcgtggtcacatctcccgcttccccccatcctgtgtctgggcacagttcacatcaggacagcgtccattgtgctctcagtctgcctcaggtgtgtgcctggagggggcctggactggcatggatccagtgtgcagaagagccagcagggaaccggaagctctgatgtcaaggccagagcagttgagaatgggacccagagtagatgctgacctgggcactccaccattccggggccaccacagagatgccagcaggatgccactttgccagcccgacacacggacctttgtaaagaacagcaacaggcaggagaggcagcgtgtgaccagattgtgtcccgtcattgggtggcatatgttaactagctgccaaacaacttcaacccgtgtaattcatgtacatttgcaacagccagcccggtacagcctgtgtgacttctctgtatgtgtgtgtgtgtcgtgaccagcctaagtagttagcataactcaagatgctgatgtgcagtcacccatcagagaaaataaaaatggaaaccacgttcacagcattttaaaagtttttactttttttcttgattatggaagtaatccatgtacatagtaaatcattttaaaagtacaaaaagtatgaagaagtttgtcttaaaaaaaaaaaaaattattcctccaactagagaccactctgatgtttcgacgttttaaaaaagtctttttttgtgcattttttcatcgttgacatcatattgtgatatcatttataaccagttttttcctacttattataccaccatcttccacatcattaaaagctctttgtaaacattaaacactcttcataaatcaaaaaaatgtctgtttagtaatccatcttgtggatgtactgtaattcatctaatcatttcctcactattggatgtgtagactggttctaggttttcttataaatagtgtcttggattagccaggcatggtaatgggtgcctgtaatcccagctaatttttgtatttttagtagagatggggtttcaccatattggccaggctggtctcaaactcctgac

SEQ ID NO: 317462 - DNA, 1357 bp, Homo sapiens
gagggaggactctcctggtgtttgggtaaacagtgagacagatcctgggttgggcatgctccccagctgtgtgtagtcgtgacttctcaacaatctagcaccatgtcggacacgttccccatccaccctcctagctctgctctcagagctaggcacatgggcacaggtcccctcccgtctgtcctctcccagcaactgtgccctggagggctccacatggcccccgtgtctctcgggcaccacccatatagcagtcccagagggcccatctgtaaagatcgagcttgtgtgtggtgtcgtggtcacatctcccgcttccccccatcctgtgtctgggcacagttcacatcaggacagcgtccattgtgctctcagtctgcctcaggtgtgtgcctggagggggcctggactggcatggatccagtgtgcagaagagccagcagggaaccggaagctctgatgtcaaggccagagcagttgagaatgggacccagagtagatgctgacctgggcactccaccattccggggccaccacagagatgccagcaggatgccactttgccagcccgacacacggacctttgtaaagaacagcaacaggcaggagaggcagcgtgtgaccagattgtgtcccgtcattgggtggcatatgttaactagctgccaaacaacttcaacccgtgtaattcatgtacatttgcaacagccagcccggtacagcctgtgtgacttctctgtatgtgtgtgtgtgtcgtgaccagcctaagtagttagcataactcaagatgctgatgtgcagtcacccatcagagaaaataaaaatggaaaccacgttcacagcattttaaaagtttttactttttttcttgattatggaagtaatccatgtacatagtaaatcattttaaaagtacaaaaagtatgaagaagtttgtcttaaaaaaaaaaaaaattattcctccaactagagaccactctgatgtttcgacgttttaaaaaagtctttttttgtgcattttttcatcgttgacatcatattgtgatatcatttataaccagttttttcctacttattataccaccatcttccacatcattaaaagctctttgtaaacattaaacactcttcataaatcaaaaaaatgtctgtttagtaatccatcttgtggatgtactgtaattcatctaatcatttcctcactattggatgtgtagactggttctaggttttcttataaatagtgtcttggattagccaggcatggtaatgggtgcctgtaatcccagctaatttttgtatttttagtagagatggggtttcaccatattggccaggctggtctcaaactcctgac

SEQ ID NO: 317463 - DNA, 1566 bp, Homo sapiens
cgtaggcgctcccgggcgctggcggcggcggaggagagggagcagcgtcacgggcgcccggcccgttaaaacgctgctggctggagccacctccctccctgcagcccgcaacgggaatggagtaaagggagacccgtcgacctggccacggggatcagcgatggaattaaagcaatctttgtccacccatctggaagccgagaagcctctgaggcgctatggggcggtggaggagacggcttggaaaacggagagactggggagaaatcagctggacatcatctccatggcggagacaaccatgatgccagaggagattgagctggagatggcaaaaattcagcgtctccgggaagtcttggtccgccgggagtctgagctcaggttcatgatggatgacatccagctctgcaaggacatcatggacttgaagcaggagctgcagaacttggtcgccatcccagaaaaagaaaaaaccaaactgcagaagcagagagaggatgagctaatccagaagatccacaaactggtgcagaagagagacttcctggtggacgatgcggaggtcgagcggttaagggagcaagaagaagacaaggaaatggctgatttcctgagaatcaagttaaaacctctagacaaagtaaccaaatctccagccacacccatatagcagtcccagagggcccatctgtaaagatcgagcttgtgtgtggtgtcgtggtcacatctcccggggccaccacagagatgccagcaggatgccactttgccagcccgacacacggacctttgtaaagaacagcaacaggcaggagaggcagcgtgtgaccagattgtgtcccgtcattgggtggcatatgttaactagctgccaaacaacttcaacccgtgtaattcatgtacatttgcaacagccagcccggtacagcctgtgtgacttctctgtatgtgtgtgtgtgtcgtgaccagcctaagtagttagcataactcaagatgctgatgtgcagtcacccatcagagaaaataaaaatggaaaccacgttcacagcattttaaaagtttttactttttttcttgattatggaagtaatccatgtacatagtaaatcattttaaaagtacaaaaagtatgaagaagtttgtcttaaaaaaaaaaaaaattattcctccaactagagaccactctgatgtttcgacgttttaaaaaagtctttttttgtgcattttttcatcgttgacatcatattgtgatatcatttataaccagttttttcctacttattataccaccatcttccacatcattaaaagctctttgtaaacattaaacactcttcataaatcaaaaaaatgtctgtttagtaatccatcttgtggatgtactgtaattcatctaatcatttcctcactattggatgtgtagactggttctaggttttcttataaatagtgtcttggattagccaggcatggtaatgggtgcctgtaatcccagctaatttttgtatttttagtagagatggggtttcaccatattggccaggctggtctcaaactcctgac

SEQ ID NO: 317464 - DNA, 8584 bp, Homo sapiens
gcatatacaagctgagtttcagccatggaaaaactccatgggcatgtgtctgcccatccagacatcctctccttggagaaccggtgcctggctatgctccctgacttacagcccttggagaaactacatcagcatgtatctacccactcagatatcctctccttgaagaaccagtgcctagccacgcttcctgacctgaagaccatggaaaaaccacatggatatgtgtctgcccacccagacatcctctccttggagaaccagtgcctggccacactttctgacctgaagaccatggagaaaccacatggacatgtttctgcccacccagacatcctctccttggagaaccggtgcctggccaccctccctagtctaaagagcactgtgtctgccagccccttgttccagagtctacagatatctcacatgacgcaagctgatttgtaccgtgtgaacaacagcaattgcctgctctctgagcctccaagttggagggctcagcatttctctaagggactagacctttcaacctgccctatagccctgaaatccatctctgccacagagacagctcaggaagcaactttgggtcgttggtttgattcagaagagaagaaaggggcagagacccaaatgccttcttatagtctgagcttgggagaggaggaggaggtggaggatctggccgtgaagctcacctctggagactctgaatctcatccagagcctactgaccatgtccttcaggaaaagaagatggctctactgagcttgctgtgctctactctggtctcagaagtaaacatgaacaatacatctgaccccaccctggctgccatttttgaaatctgtcgtgaacttgccctcctggagcctgagtttatcctcaaggcatctttgtatgccaggcagcagctgaacgtccggaatgtggccaataacatcttggccattgctgctttcttgccggcgtgtcgcccccacctgcgacgatatttctgtgccattgtccagctgccttctgactggatccaggtggctgagctttaccagagcctggctgagggagataagaataagctggtgcccctgcccgcctgtctccgtactgccatgacggacaaatttgcccagtttgacgagtaccagctggctaagtacaaccctcggaagcaccgggccaagagacacccccgccggccaccccgctctccagggatggagcctccattttctcacagatgttttccaaggtacatagggtttctcagagaagagcagagaaagtttgagaaggccggtgatacagtgtcagagaaaaagaatcctccaaggttcaccctgaagaagctggttcagcgactgcacatccacaagcctgcccagcacgttcaagccctgctgggttacagatacccctccaacctacagctcttttctcgaagtcgccttcctgggccttgggattctagcagagctgggaagaggatgaagctgtctaggccagagacctgggagcgggagctgagcctacgggggaacaaagcgtcggtctgggaggaactcattgaaaatgggaagcttcccttcatggccatgcttcggaacctgtgcaacctgctgcgggttggaatcagttcccgccaccatgagctcattctccagagactccagcatgggaagtcggtgatccacagtcggcagtttccattcagatttcttaacgcccatgatgccattgatgccctcgaggctcaactcagaaatcaagcattgccctttccttcgaatataacactgatgaggcggatactaactagaaatgaaaagaaccgtcccaggcggaggtttctttgccacctaagccgtcagcagcttcgtatggcaatgaggatacctgtgttgtatgagcagctcaagagggagaagctgagagtacacaaggccagacagtggaaatatgatggtgagatgctgaacaggtaccgacaggccctagagacagctgtgaacctctctgtgaagcacagcctgcccctgctgccaggccgcactgtcttggtctatctgacagatgctaatgcagacaggctctgtccaaagagcaacccacaagggcccccgctgaactatgcactgctgttgattgggatgatgatcacgagggcggagcaggtggacgtcgtgctgtgtggaggtgacactctgaagactgcagtgcttaaggcagaagaaggcatcctgaagactgccatcaagctccaggctcaagtccaggagtttgatgaaaatgatggatggtccctgaatacttttgggaaatacctgctgtctctggctggccaaagggttcctgtggacagggtcatcctccttggccaaagcatggatgatggaatgataaatgtggccaaacagctttactggcagcgtgtgaattccaagtgcctctttgttggtatcctcctaagaagggtacaatacctgtcaacagatttgaatcccaatgatgtgacactctcaggctgtactgatgcgatactgaagttcattgcagagcatggggcctcccatcttctggaacatgtgggccaaatggacaaaatattcaagattccaccacccccaggaaagacaggggtccagtctctccggccactggaagaggacactccaagccccttggctcctgtttcccagcaaggatggcgcagcatccggcttttcatttcatccactttccgagacatgcacggggagcgggacctgctgctgaggtctgtgctgccagcactgcaggcccgagcggcccctcaccgtatcagccttcacggaatcgacctccgctggggcgtcactgaggaggagacccgtaggaacagacaactggaagtgtgccttggggaggtggagaacgcacagctgtttgtggggattctgggctcccgttatggatacattccccccagctacaaccttcctgaccatccacacttccactgggcccagcagtacccttcagggcgctctgtgacagagatggaggtgatgcagttcctgaaccggaaccaacgtctgcagccctctgcccaagctctcatctacttccgggattccagcttcctcagctctgtgccagatgcctggaaatctgactttgtttctgagtctgaagaggccgcatgtcggatctcagaactgaagagctacctaagcagacagaaagggataacctgccgcagatacccctgtgagtgggggggtgtggcagctggccggccctatgttggcgggctggaggagtttgggcagttggttctgcaggatgtatggaatatgatccagaagctctacctgcagcctggggccctgctggagcagccagtgtccatcccagacgatgacttggtccaggccaccttccagcagctgcagaagccaccgagtcctgcccggccacgccttcttcaggacacagtgcaacagctgatgctgccccacggaaggctgagcctggtgacggggcagtcaggacagggcaagacagccttcctggcatctcttgtgtcagccctgcaggctcctgatggggccaaggtggcaccattagtcttcttccacttttctggggctcgtcctgaccagggtcttgccctcactctgctcagacgcctctgtacctatctgcgtggccaactaaaagagccaggtgccctccccagcacctaccgaagcctggtgtgggagctgcagcagaggctgctgcccaagtctgctgagtccctgcatcctggccagacccaggtcctgatcatcgatggggctgataggttagtggaccagaatgggcagctgatttcagactggatcccaaagaagcttccccggtgtgtacacctggtgctgagtgtgtctagtgatgcaggcctaggggagacccttgagcagagccagggtgcccacgtgctggccttggggcctctggaggcctctgctcgggcccggctggtgagagaggagctggccctgtacgggaagcggctggaggagtcaccatttaacaaccagatgcgactgctgctggtgaagcgggaatcaggccggccgctctacctgcgcttggtcaccgatcacctgaggctcttcacgctgtatgagcaggtgtctgagagactccggaccctgcctgccactgtccccctgctgctgcagcacatcctgagcacactggagaaggagcacgggcctgatgtccttccccaggccttgactgccctagaagtcacacggagtggtttgactgtggaccagctgcacggagtgctgagtgtgtggcggacactaccgaaggggactaagagctgggaagaagcagtggctgctggtaacagtggagacccctaccccatgggcccgtttgcctgcctcgtccagagtctgcgcagtttgctaggggagggccctctggagcgccctggtgcccggctgtgcctccctgatgggcccctgagaacagcagctaaacgttgctatgggaagaggccagggctagaggacacggcacacatcctcattgcagctcagctctggaagacatgtgacgctgatgcctcaggcaccttccgaagttgccctcctgaggctctgggagacctgccttaccacctgctccagagcgggaaccgtggacttctttcgaagttccttaccaacctccatgtggtggctgcacacttggaattgggtctggtctctcggctcttggaggcccatgccctctatgcttcttcagtccccaaagaggaacaaaagctccccgaggctgacgttgcagtgtttcgcaccttcctgaggcagcaggcttcaatcctcagccagtacccccggctcctgccccagcaggcagccaaccagcccctggactcacctctttgccaccaagcctcgctgctctcccggagatggcacctccaacacacactacgatggcttaataaaccccggaccatgaaaaatcagcaaagctccagcctgtctctggcagtttcctcatcccctactgctgtggccttctccaccaatgggcaaagagcagctgtgggcactgccaatgggacagtttacctgttggacctgagaacttggcaggaggagaagtctgtggtgagtggctgtgatggaatctctgcttgtttgttcctctccgatgatacactctttcttactgccttcgacgggctcctggagctctgggacctgcagcatggttgtcgggtgctgcagactaaggctcaccagtaccaaatcactggctgctgcctgagcccagactgccggctgctagccaccgtgtgcttgggaggatgcctaaagctgtgggacacagtccgtgggcagctggccttccagcacacctaccccaagtccctgaactgtgttgccttccacccagaggggcaggtaatagccacaggcagctgggctggcagcatcagcttcttccaggtggatgggctcaaagtcaccaaggacctgggggcacccggagcctctatccgtaccttggccttcaatgtgcctgggggggttgtggctgtgggccggctggacagtatggtggagctgtgggcctggcgagaaggggcacggctggctgccttccctgcccaccatggctttgttgctgctgcgcttttcctgcatgcgggttgccagttactgacggctggagaggatggcaaggttcaggtgtggtcagggtctctgggtcggccccgtgggcacctgggttccctttctctctctcctgccctctctgtggcactcagcccagatggtgatcgggtggctgttggatatcgagcggatggcattaggatctacaaaatctcttcaggttcccagggggctcagggtcaggcactggatgtggcagtgtccgccctggcctggctaagccccaaggtattggtgagtggtgcagaagatgggtccttgcagggctgggcactcaaggaatgctcccttcagtccctctggctcctgtccagattccagaagcctgtgctaggactggccacttcccaggagctcttggcttctgcctcagaggatttcacagtgcagctgtggccaaggcagctgctgacgcggccacacaaggcagaagactttccctgtggcactgagctgcggggacatgagggccctgtgagctgctgtagtttcagcactgatggaggcagcctggccaccgggggccgggatcggagtctcctctgctgggacgtgaggacacccaaaacccctgttttgatccactccttccctgcctgtcaccgtgactgggtcactggctgtgcctggaccaaagataacctactgatatcctgctccagtgatggctctgtggggctctgggacccagagtcaggacagcggcttggtcagttcctgggtcatcagagtgctgtgagcgctgtggcagctgtggaggagcacgtggtgtctgtgagccgggatgggaccttgaaagtgtgggaccatcaaggcgtggagctgaccagcatccctgctcactcaggacccattagccactgtgcagctgccatggagccccgtgcagctggacagcctgggtcagagcttctggtggtaaccgtcgggctagatggggccacacggttatggcatccactcttggtgtgccaaacccacaccctcctgggacacagcggcccagtccgtgctgctgctgtttcagaaacctcaggcctcatgctgaccgcctctgaggatggttctgtacggctctggcaggttcctaaggaagcagatgacacatgtataccaaggagttctgcagccgtcactgctgtggcttgggcaccagatggttccatggcagtatctggaaatcaagctggggaactaatcttgtggcaggaagctaaggctgtggccacagcacaggctccaggccacattggtgctctgatctggtcctcggcacacaccttttttgtcctcagtgctgatgagaaaatcagcgagtggcaagtgaaactgcggaagggttcggcacccggaaatttgagtcttcacctgaaccgaattctacaggaggacttaggggtgctgacaagtctggattgggctcctgatggtcactttctcatcttggccaaagcagatttgaagttactttgcatgaagccaggggatgctccatctgaaatctggagcagctatacagaaaatcctatgatattgtccacccacaaggagtatggcatatttgtcctgcagcccaaggatcctggagttctttctttcttgaggcaaaaggaatcaggagagtttgaagagaggctgaactttgatataaacttagagaatcctagtaggaccctaatatcgataactcaagccaaacctgaatctgagtcctcatttttgtgtgccagctctgatgggatcctatggaacctggccaaatgcagcccagaaggagaatggaccacaggtaacatgtggcagaaaaaagcaaacactccagaaacccaaactccagggacagacccatctacctgcagggaatctgatgccagcatggatagtgatgccagcatggatagtgagccaacaccacatctaaagacacggcagcgtagaaagattcactcgggctctgtcacagccctccatgtgctacctgagttgctggtgacagcttcgaaggacagagatgttaagctatgggagagacccagtatgcagctgctgggcctgttccgatgcgaagggtcagtgagctgcctggaaccttggctgggcgctaactccaccctgcagcttgccgtgggagacgtgcagggcaatgtgtactttctgaattgggaatgaagatgtgccactcgggaataatgataccccttgtgctagagatgcaaagcctgaagacactggtagcttttaataattataaaattaataatttcttgataattataaaaatgaagtgtcaaaaaatctcaagtgtaggcctgcctgtgttctcatgtggatttagaacaggaggatattctatgtgtatgtatatgtacattctaatgtgtgtctcttcttattcaacattaatccttactagaaccacaagaaagtgaatgaaatctttagtaggtactcttttgaaactaggttttagaattcttgcatcactcgcgggccctaggaccctaggatgccattcttgccaggaggaggaatgagagtgatgttggccaacattcaatttgaacagagcatggaagacctttcagttcatcgggaaagaatgagggagggagaataagtcagtcatgcatcagggcatttagaaagagctatgtttctgtcacagagacagcccttttctcagaactacccagaggaggccgggcatggtggctcacgcttgtaatcccagcactttgggaggccgaggtgggcagatcacgaggtcaggagatcaagaccatcctggctaacatagtgaaaccctgtctctactaaaaaatacaaaaagttaaccaggcatgta

SEQ ID NO: 317465 - DNA, 713 bp, Homo sapiens
tagttctcaaacccagcaacatgactttagacagacatgccctgtagacatgactgcctttccaattgctgcctttccttttctgactcacctgtaaacatgactcacctttccttttctgagttatttttaggcatatttgggcagacatgccctgtaaacatgactcacctttccttttctgagttattttcttgctgactctgaaatgatagacctctttcttacctatcctcagatacccctccaacctacagctcttttctcgaagtcgccttcctgggccttgggattctagcagagctgggaagaggatgaagctgtctaggccagagacctgggagcgggagctgagcctacgggggaacaaagcgtcggtctgggaggaactcattggtagagtgaccttgaccatcacattccctccttctcttccccatttatgcctccacattttagatcctcactagaagatttctgtggaatgatgaagttattactttgcctggttgttgtatttgatttataaggtctgccattgactacaccaaagtaaacagtggtacctgctttgagtaatgttggcatcatagatcattataccagatgtagttgggtgatgtacaagtttttatcaacatatgacaaaagtaccttctctctcattgtactcatatcgatatctctgtaactcattccaaaaaaggtaggac

SEQ ID NO: 317466 - DNA, 284 bp, Homo sapiens
ggcagccctcctggaccccaccctgagtcctgagtcttgccagatgcgactgctgctggtgaagcgggaatcaggccggccgctctacctgcgcttggtcaccgatcacctgaggctcttcacgctgtatgagcaggtgtctgagagactccggaccctgcccccaccacacccagtctctccttgaactgcctgctgagaccccaagggaaccaatgtaatccgaaccctggccctcagcctcccaaccatgatccccaagcactgaccactccgtgtgactt

SEQ ID NO: 317467 - DNA, 7341 bp, Homo sapiens
tagttctcaaacccagcaacatgactttagacagacatgccctgtagacatgactgcctttccaattgctgcctttccttttctgactcacctgtaaacatgactcacctttccttttctgagttatttttaggcatatttgggcagacatgccctgtaaacatgactcacctttccttttctgagttattttcttgctgactctgaaatgatagacctctttcttacctatcctcagatacccctccaacctacagctcttttctcgaagtcgccttcctgggccttgggattctagcagagctgggaagaggatgaagctgtctaggccagagacctgggagcgggagctgagcctacgggggaacaaagcgtcggtctgggaggaactcattgaaaatgggaagcttcccttcatggccatgcttcggaacctgtgcaacctgctgcgggttggaatcagttcccgccaccatgagctcattctccagagactccagcatgggaagtcggtgatccacagtcggcagtttccattcagatttcttaacgcccatgatgccattgatgccctcgaggctcaactcagaaatcaagcattgccctttccttcgaatataacactgatgaggcggatactaactagaaatgaaaagaaccgtcccaggcggaggtttctttgccacctaagccgtcagcagcttcgtatggcaatgaggatacctgtgttgtatgagcagctcaagagggagaagctgagagtacacaaggccagacagtggaaatatgatggtgagatgctgaacaggtaccgacaggccctagagacagctgtgaacctctctgtgaagcacagcctgcccctgctgccaggccgcactgtcttggtctatctgacagatgctaatgcagacaggctctgtccaaagagcaacccacaagggcccccgctgaactatgcactgctgttgattgggatgatgatcacgagggcggagcaggtggacgtcgtgctgtgtggaggtgacactctgaagactgcagtgcttaaggcagaagaaggcatcctgaagactgccatcaagctccaggctcaagtccaggagtttgatgaaaatgatggatggtccctgaatacttttgggaaatacctgctgtctctggctggccaaagggttcctgtggacagggtcatcctccttggccaaagcatggatgatggaatgataaatgtggccaaacagctttactggcagcgtgtgaattccaagtgcctctttgttggtatcctcctaagaagggtacaatacctgtcaacagatttgaatcccaatgatgtgacactctcaggctgtactgatgcgatactgaagttcattgcagagcatggggcctcccatcttctggaacatgtgggccaaatggacaaaatattcaagattccaccacccccaggaaagacaggggtccagtctctccggccactggaagaggacactccaagccccttggctcctgtttcccagcaaggatggcgcagcatccggcttttcatttcatccactttccgagacatgcacggggagcgggacctgctgctgaggtctgtgctgccagcactgcaggcccgagcggcccctcaccgtatcagccttcacggaatcgacctccgctggggcgtcactgaggaggagacccgtaggaacagacaactggaagtgtgccttggggaggtggagaacgcacagctgtttgtggggattctgggctcccgttatggatacattccccccagctacaaccttcctgaccatccacacttccactgggcccagcagtacccttcagggcgctctgtgacagagatggaggtgatgcagttcctgaaccggaaccaacgtctgcagccctctgcccaagctctcatctacttccgggattccagcttcctcagctctgtgccagatgcctggaaatctgactttgtttctgagtctgaagaggccgcatgtcggatctcagaactgaagagctacctaagcagacagaaagggataacctgccgcagatacccctgtgagtgggggggtgtggcagctggccggccctatgttggcgggctggaggagtttgggcagttggttctgcaggatgtatggaatatgatccagaagctctacctgcagcctggggccctgctggagcagccagtgtccatcccagacgatgacttggtccaggccaccttccagcagctgcagaagccaccgagtcctgcccggccacgccttcttcaggacacagtgcaacagctgatgctgccccacggaaggctgagcctggtgacggggcagtcaggacagggcaagacagccttcctggcatctcttgtgtcagccctgcaggctcctgatggggccaaggtggcaccattagtcttcttccacttttctggggctcgtcctgaccagggtcttgccctcactctgctcagacgcctctgtacctatctgcgtggccaactaaaagagccaggtgccctccccagcacctaccgaagcctggtgtgggagctgcagcagaggctgctgcccaagtctgctgagtccctgcatcctggccagacccaggtcctgatcatcgatggggctgataggttagtggaccagaatgggcagctgatttcagactggatcccaaagaagcttccccggtgtgtacacctggtgctgagtgtgtctagtgatgcaggcctaggggagacccttgagcagagccagggtgcccacgtgctggccttggggcctctggaggcctctgctcgggcccggctggtgagagaggagctggccctgtacgggaagcggctggaggagtcaccatttaacaaccagatgcgactgctgctggtgaagcgggaatcaggccggccgctctacctgcgcttggtcaccgatcacctgaggctcttcacgctgtatgagcaggtgtctgagagactccggaccctgcctgccactgtccccctgctgctgcagcacatcctgagcacactggagaaggagcacgggcctgatgtccttccccaggccttgactgccctagaagtcacacggagtggtttgactgtggaccagctgcacggagtgctgagtgtgtggcggacactaccgaaggggactaagagctgggaagaagcagtggctgctggtaacagtggagacccctaccccatgggcccgtttgcctgcctcgtccagagtctgcgcagtttgctaggggagggccctctggagcgccctggtgcccggctgtgcctccctgatgggcccctgagaacagcagctaaacgttgctatgggaagaggccagggctagaggacacggcacacatcctcattgcagctcagctctggaagacatgtgacgctgatgcctcaggcaccttccgaagttgccctcctgaggctctgggagacctgccttaccacctgctccagagcgggaaccgtggacttctttcgaagttccttaccaacctccatgtggtggctgcacacttggaattgggtctggtctctcggctcttggaggcccatgccctctatgcttcttcagtccccaaagaggaacaaaagctccccgaggctgacgttgcagtgtttcgcaccttcctgaggcagcaggcttcaatcctcagccagtacccccggctcctgccccagcaggcagccaaccagcccctggactcacctctttgccaccaagcctcgctgctctcccggagatggcacctccaacacacactacgatggcttaataaaccccggaccatgaaaaatcagcaaagctccagcctgtctctggcagtttcctcatcccctactgctgtggccttctccaccaatgggcaaagagcagctgtgggcactgccaatgggacagtttacctgttggacctgagaacttggcaggaggagaagtctgtggtgagtggctgtgatggaatctctgcttgtttgttcctctccgatgatacactctttcttactgccttcgacgggctcctggagctctgggacctgcagcatggttgtcgggtgctgcagactaaggctcaccagtaccaaatcactggctgctgcctgagcccagactgccggctgctagccaccgtgtgcttgggaggatgcctaaagctgtgggacacagtccgtgggcagctggccttccagcacacctaccccaagtccctgaactgtgttgccttccacccagaggggcaggtaatagccacaggcagctgggctggcagcatcagcttcttccaggtggatgggctcaaagtcaccaaggacctgggggcacccggagcctctatccgtaccttggccttcaatgtgcctgggggggttgtggctgtgggccggctggacagtatggtggagctgtgggcctggcgagaaggggcacggctggctgccttccctgcccaccatggctttgttgctgctgcgcttttcctgcatgcgggttgccagttactgacggctggagaggatggcaaggttcaggtgtggtcagggtctctgggtcggccccgtgggcacctgggttccctttctctctctcctgccctctctgtggcactcagcccagatggtgatcgggtggctgttggatatcgagcggatggcattaggatctacaaaatctcttcaggttcccagggggctcagggtcaggcactggatgtggcagtgtccgccctggcctggctaagccccaagtccctctggctcctgtccagattccagaagcctgtgctaggactggccacttcccaggagctcttggcttctgcctcagaggatttcacagtgcagctgtggccaaggcagctgctgacgcggccacacaaggcagaagactttccctgtggcactgagctgcggggacatgagggccctgtgagctgctgtagtttcagcactgatggaggcagcctggccaccgggggccgggatcggagtctcctctgctgggacgtgaggacacccaaaacccctgttttgatccactccttccctgcctgtcaccgtgactgggtcactggctgtgcctggaccaaagataacctactgatatcctgctccagtgatggctctgtggggctctgggacccagagtcaggacagcggcttggtcagttcctgggtcatcagagtgctgtgagcgctgtggcagctgtggaggagcacgtggtgtctgtgagccgggatgggaccttgaaagtgtgggaccatcaaggcgtggagctgaccagcatccctgctcactcaggacccattagccactgtgcagctgccatggagccccgtgcagctggacagcctgggtcagagcttctggtggtaaccgtcgggctagatggggccacacggttatggcatccactcttggtgtgccaaacccacaccctcctgggacacagcggcccagtccgtgctgctgctgtttcagaaacctcaggcctcatgctgaccgcctctgaggatggttctgtacggctctggcaggttcctaaggaagcagatgacacatgtataccaaggagttctgcagccgtcactgctgtggcttgggcaccagatggttccatggcagtatctggaaatcaagctggggaactaatcttgtggcaggaagctaaggctgtggccacagcacaggctccaggccacattggtgctctgatctggtcctcggcacacaccttttttgtcctcagtgctgatgagaaaatcagcgagtggcaagtgaaactgcggaagggttcggcacccggaaatttgagtcttcacctgaaccgaattctacaggaggacttaggggtgctgacaagtctggattgggctcctgatggtcactttctcatcttggccaaagcagatttgaagttactttgcatgaagccaggggatgctccatctgaaatctggagcagctatacagaaaatcctatgatattgtccacccacaaggagtatggcatatttgtcctgcagcccaaggatcctggagttctttctttcttgaggcaaaaggaatcaggagagtttgaagagaggctgaactttgatataaacttagagaatcctagtaggaccctaatatcgataactcaagccaaacctgaatctgagtcctcatttttgtgtgccagctctgatgggatcctatggaacctggccaaatgcagcccagaaggagaatggaccacaggtaacatgtggcagaaaaaagcaaacactccagaaacccaaactccagggacagacccatctacctgcagggaatctgatgccagcatggatagtgatgccagcatggatagtgagccaacaccacatctaaagacacggcagcgtagaaagattcactcgggctctgtcacagccctccatgtgctacctgagttgctggtgacagcttcgaaggacagagatgttaagctatgggagagacccagtatgcagctgctgggcctgttccgatgcgaagggtcagtgagctgcctggaaccttggctgggcgctaactccaccctgcagcttgccgtgggagacgtgcagggcaatgtgtactttctgaattgggaatgaagatgtgccactcgggaataatgataccccttgtgctagagatgcaaagcctgaagacactggtagcttttaataattataaaattaataatttcttgataattataaaaatgaagtgtcaaaaaatctcaagtgtaggcctgcctgtgttctcatgtggatttagaacaggaggatattctatgtgtatgtatatgtacattctaatgtgtgtctcttcttattcaacattaatccttactagaaccacaagaaagtgaatgaaatctttagtaggtactcttttgaaactaggttttagaattcttgcatcactcgcgggccctaggaccctaggatgccattcttgccaggaggaggaatgagagtgatgttggccaacattcaatttgaacagagcatggaagacctttcagttcatcgggaaagaatgagggagggagaataagtcagtcatgcatcagggcatttagaaagagctatgtttctgtcacagagacagcccttttctcagaactacccagaggaggccgggcatggtggctcacgcttgtaatcccagcactttgggaggccgaggtgggcagatcacgaggtcaggagatcaagaccatcctggctaacatagtgaaaccctgtctctactaaaaaatacaaaaagttaaccaggcatgta

SEQ ID NO: 317468 - DNA, 7316 bp, Homo sapiens
tagttctcaaacccagcaacatgactttagacagacatgccctgtagacatgactgcctttccaattgctgcctttccttttctgactcacctgtaaacatgactcacctttccttttctgagttatttttaggcatatttgggcagacatgccctgtaaacatgactcacctttccttttctgagttattttcttgctgactctgaaatgatagacctctttcttacctatcctcagatacccctccaacctacagctcttttctcgaagtcgccttcctgggccttgggattctagcagagctgggaagaggatgaagctgtctaggccagagacctgggagcgggagctgagcctacgggggaacaaagcgtcggtctgggaggaactcattgaaaatgggaagcttcccttcatggccatgcttcggaacctgtgcaacctgctgcgggttggaatcagttcccgccaccatgagctcattctccagagactccagcatgggaagtcggtgatccacagtcggcagtttccattcagatttcttaacgcccatgatgccattgatgccctcgaggctcaactcagaaatcaagcattgccctttccttcgaatataacactgatgaggcggatactaactagaaatgaaaagaaccgtcccaggcggaggtttctttgccacctaagccgtcagcagcttcgtatggcaatgaggatacctgtgttgtatgagcagctcaagagggagaagctgagagtacacaaggccagacagtggaaatatgatggtgagatgctgaacaggtaccgacaggccctagagacagctgtgaacctctctgtgaagcacagcctgcccctgctgccaggccgcactgtcttggtctatctgacagatgctaatgcagacaggctctgtccaaagagcaacccacaagggcccccgctgaactatgcactgctgttgattgggatgatgatcacgagggcggagcaggtggacgtcgtgctgtgtggaggtgacactctgaagactgcagtgcttaaggcagaagaaggcatcctgaagactgccatcaagctccaggctcaagtccaggagtttgatgaaaatgatggatggtccctgaatacttttgggaaatacctgctgtctctggctggccaaagggttcctgtggacagggtcatcctccttggccaaagcatggatgatggaatgataaatgtggccaaacagctttactggcagcgtgtgaattccaagtgcctctttgttggtatcctcctaagaagggtacaatacctgtcaacagatttgaatcccaatgatgtgacactctcaggctgtactgatgcgatactgaagttcattgcagagcatggggcctcccatcttctggaacatgtgggccaaatggacaaaatattcaagattccaccacccccaggaaagacaggggtccagtctctccggccactggaagaggacactccaagccccttggctcctgtttcccagcaaggatggcgcagcatccggcttttcatttcatccactttccgagacatgcacggggagcgggacctgctgctgaggtctgtgctgccagcactgcaggcccgagcggcccctcaccgtatcagccttcacggaatcgacctccgctggggcgtcactgaggaggagacccgtaggaacagacaactggaagtgtgccttggggaggtggagaacgcacagctgtttgtggggattctgggctcccgttatggatacattccccccagctacaaccttcctgaccatccacacttccactgggcccagcagtacccttcagggcgctctgtgacagagatggaggtgatgcagttcctgaaccggaaccaacgtctgcagccctctgcccaagctctcatctacttccgggattccagcttcctcagctctgtgccagatgcctggaaatctgactttgtttctgagtctgaagaggccgcatgtcggatctcagaactgaagagctacctaagcagacagaaagggataacctgccgcagatacccctgtgagtgggggggtgtggcagctggccggccctatgttggcgggctggaggagtttgggcagttggttctgcaggatgtatggaatatgatccagaagctctacctgcagcctggggccctgctggagcagccagtgtccatcccagacgatgacttggtccaggccaccttccagcagctgcagaagccaccgagtcctgcccggccacgccttcttcaggacacagtgcaacagctgatgctgccccacggaaggctgagcctggtgacggggcagtcaggacagggcaagacagccttcctggcatctcttgtgtcagccctgcaggctcctgatggggccaaggtggcaccattagtcttcttccacttttctggggctcgtcctgaccagggtcttgccctcactctgctcagacgcctctgtacctatctgcgtggccaactaaaagagccaggtgccctccccagcacctaccgaagcctggtgtgggagctgcagcagaggctgctgcccaagtctgctgagtccctgcatcctggccagacccaggtcctgatcatcgatggggctgataggttagtggaccagaatgggcagctgatttcagactggatcccaaagaagcttccccggtgtgtacacctggtgctgagtgtgtctagtgatgcaggcctaggggagacccttgagcagagccagggtgcccacgtgctggccttggggcctctggaggcctctgctcgggcccggctggtgagagaggagctggccctgtacgggaagcggctggaggagtcaccatttaacaaccagatgcgactgctgctggtgaagcgggaatcaggccggccgctctacctgcgcttggtcaccgatcacctgaggctcttcacgctgtatgagcaggtgtctgagagactccggaccctgcctgccactgtccccctgctgctgcagcacatcctgagcacactggagaaggagcacgggcctgatgtccttccccaggccttgactgccctagaagtcacacggagtggtttgactgtggaccagctgcacggagtgctgagtgtgtggcggacactaccgaaggggactaagagctgggaagaagcagtggctgctggtaacagtggagacccctaccccatgggcccgtttgcctgcctcgtccagagtctgcgcagtttgctaggggagggccctctggagcgccctggtgcccggctgtgcctccctgatgggcccctgagaacagcagctaaacgttgctatgggaagaggccagggctagaggacacggcacacatcctcattgcagctcagctctggaagacatgtgacgctgatgcctcaggcaccttccgaagttgccctcctgaggctctgggagacctgccttaccacctgctccagagcgggaaccgtggacttctttcgaagttccttaccaacctccatgtggtggctgcacacttggaattgggtctggtctctcggctcttggaggcccatgccctctatgcttcttcagtccccaaagaggaacaaaagctccccgaggctgacgttgcagtgtttcgcaccttcctgaggcagcaggcttcaatcctcagccagtacccccggctcctgccccagcaggcagccaaccagcccctggactcacctctttgccaccaagcctcgctgctctcccggagatggcacctccaacacacactacgatggcttaataaaccccggaccatgaaaaatcagcaaagctccagcctgtctctggcagtttcctcatcccctactgctgtggccttctccaccaatgggcaaagagcagctgtgggcactgccaatgggacagtttacctgttggacctgagaacttggcaggaggagaagtctgtggtgagtggctgtgatggaatctctgcttgtttgttcctctccgatgatacactctttcttactgccttcgacgggctcctggagctctgggacctgcagcatggttgtcgggtgctgcagactaaggctcaccagtaccaaatcactggctgctgcctgagcccagactgccggctgctagccaccgtgtgcttgggaggatgcctaaagctgtgggacacagtccgtgggcagctggccttccagcacacctaccccaagtccctgaactgtgttgccttccacccagaggggcaggtaatagccacaggcagctgggctggcagcatcagcttcttccaggtggatgggctcaaagtcaccaaggacctgggggcacccggagcctctatccgtaccttggccttcaatgtgcctgggggggttgtggctgtgggccggctggacagtatggtggagctgtgggcctggcgagaaggggcacggctggctgccttccctgcccaccatggctttgttgctgctgcgcttttcctgcatgcgggttgccagttactgacggctggagaggatggcaagatggtgatcgggtggctgttggatatcgagcggatggcattaggatctacaaaatctcttcaggttcccagggggctcagggtcaggcactggatgtggcagtgtccgccctggcctggctaagccccaaggtattggtgagtggtgcagaagatgggtccttgcagggctgggcactcaaggaatgctcccttcagtccctctggctcctgtccagattccagaagcctgtgctaggactggccacttcccaggagctcttggcttctgcctcagaggatttcacagtgcagctgtggccaaggcagctgctgacgcggccacacaaggcagaagactttccctgtggcactgagctgcggggacatgagggccctgtgagctgctgtagtttcagcactgatggaggcagcctggccaccgggggccgggatcggagtctcctctgctgggacgtgaggacacccaaaacccctgttttgatccactccttccctgcctgtcaccgtgactgggtcactggctgtgcctggaccaaagataacctactgatatcctgctccagtgatggctctgtggggctctgggacccagagtcaggacagcggcttggtcagttcctgggtcatcagagtgctgtgagcgctgtggcagctgtggaggagcacgtggtgtctgtgagccgggatgggaccttgaaagtgtgggaccatcaaggcgtggagctgaccagcatccctgctcactcaggacccattagccactgtgcagctgccatggagccccgtgcagctggacagcctgggtcagagcttctggtggtaaccgtcgggctagatggggccacacggttatggcatccactcttggtgtgccaaacccacaccctcctgggacacagcggcccagtccgtgctgctgctgtttcagaaacctcaggcctcatgctgaccgcctctgaggatggttctgtacggctctggcaggttcctaaggaagcagatgacacatgtataccaaggagttctgcagccgtcactgctgtggcttgggcaccagatggttccatggcagtatctggaaatcaagctggggaactaatcttgtggcaggaagctaaggctgtggccacagcacaggctccaggccacattggtgctctgatctggtcctcggcacacaccttttttgtcctcagtgctgatgagaaaatcagcgagtggcaagtgaaactgcggaagggttcggcacccggaaatttgagtcttcacctgaaccgaattctacaggaggacttaggggtgctgacaagtctggattgggctcctgatggtcactttctcatcttggccaaagcagatttgaagttactttgcatgaagccaggggatgctccatctgaaatctggagcagctatacagaaaatcctatgatattgtccacccacaaggagtatggcatatttgtcctgcagcccaaggatcctggagttctttctttcttgaggcaaaaggaatcaggagagtttgaagagaggctgaactttgatataaacttagagaatcctagtaggaccctaatatcgataactcaagccaaacctgaatctgagtcctcatttttgtgtgccagctctgatgggatcctatggaacctggccaaatgcagcccagaaggagaatggaccacaggtaacatgtggcagaaaaaagcaaacactccagaaacccaaactccagggacagacccatctacctgcagggaatctgatgccagcatggatagtgatgccagcatggatagtgagccaacaccacatctaaagacacggcagcgtagaaagattcactcgggctctgtcacagccctccatgtgctacctgagttgctggtgacagcttcgaaggacagagatgttaagctatgggagagacccagtatgcagctgctgggcctgttccgatgcgaagggtcagtgagctgcctggaaccttggctgggcgctaactccaccctgcagcttgccgtgggagacgtgcagggcaatgtgtactttctgaattgggaatgaagatgtgccactcgggaataatgataccccttgtgctagagatgcaaagcctgaagacactggtagcttttaataattataaaattaataatttcttgataattataaaaatgaagtgtcaaaaaatctcaagtgtaggcctgcctgtgttctcatgtggatttagaacaggaggatattctatgtgtatgtatatgtacattctaatgtgtgtctcttcttattcaacattaatccttactagaaccacaagaaagtgaatgaaatctttagtaggtactcttttgaaactaggttttagaattcttgcatcactcgcgggccctaggaccctaggatgccattcttgccaggaggaggaatgagagtgatgttggccaacattcaatttgaacagagcatggaagacctttcagttcatcgggaaagaatgagggagggagaataagtcagtcatgcatcagggcatttagaaagagctatgtttctgtcacagagacagcccttttctcagaactacccagaggaggccgggcatggtggctcacgcttgtaatcccagcactttgggaggccgaggtgggcagatcacgaggtcaggagatcaagaccatcctggctaacatagtgaaaccctgtctctactaaaaaatacaaaaagttaaccaggcatgta

SEQ ID NO: 317469 - DNA, 1866 bp, Homo sapiens
tccttgtctactaaacttacaaagttagccggggcatggtggcaggtgcctgtaatcccagctacttgggaggctgaggcaggagaaggggagatacggatttaggcatgtgttgcatccacaggccttactggtgagttggaggtagagagggaaggaaaagccaagaatgttagagattcctagtttgagcaagtaatgggatggcaccgatgaatactaatgttaaaaaacaaaaaccagaaagtggaacaggattttcagggaaggtgatacattttgctttgtacttcattcctgaggaattcatgtgggattgaggagcctgagaaaggttaactaaaataggatctttctctgtccatgtacttttttgagctagtcttcacctgaaccgaattctacaggaggacttaggggtgctgacaagtctggattgggctcctgatggtcactttctcatcttggccaaagcagatttgaagttactttgcatgaagccaggggatgctccatctgaaatctggagcagctatacagaaaatcctatgatattgtccacccacaaggagtatggcatatttgtcctgcagcccaaggatcctggagttctttctttcttgaggcaaaaggaatcaggagagtttgaagagaggctgaactttgatataaacttagagaatcctagtaggaccctaatatcgataactcaagccaaacctgaatctgagtcctcatttttgtgtgccagctctgatgggatcctatggaacctggccaaatgcagcccagaaggagaatggaccacaggtaacatgtggcagaaaaaagcaaacactccagaaacccaaactccagggacagacccatctacctgcagggaatctgatgccagcatggatagtgatgccagcatggatagtgagccaacaccacatctaaagacacggcagcgtagaaagattcactcgggctctgtcacagccctccatgtgctacctgagttgctggtgacagcttcgaaggacagagatgttaagctatgggagagacccagtatgcagctgctgggcctgttccgatgcgaagggtcagtgagctgcctggaaccttggctgggcgctaactccaccctgcagcttgccgtgggagacgtgcagggcaatgtgtactttctgaattgggaatgaagatgtgccactcgggaataatgataccccttgtgctagagatgcaaagcctgaagacactggtagcttttaataattataaaattaataatttcttgataattataaaaatgaagtgtcaaaaaatctcaagtgtaggcctgcctgtgttctcatgtggatttagaacaggaggatattctatgtgtatgtatatgtacattctaatgtgtgtctcttcttattcaacattaatccttactagaaccacaagaaagtgaatgaaatctttagtaggtactcttttgaaactaggttttagaattcttgcatcactcgcgggccctaggaccctaggatgccattcttgccaggaggaggaatgagagtgatgttggccaacattcaatttgaacagagcatggaagacctttcagttcatcgggaaagaatgagggagggagaataagtcagtcatgcatcagggcatttagaaagagctatgtttctgtcacagagacagcccttttctcagaactacccagaggaggccgggcatggtggctcacgcttgtaatcccagcactttgggaggccgaggtgggcagatcacgaggtcaggagatcaagaccatcctggctaacatagtgaaaccctgtctctactaaaaaatacaaaaagttaaccaggcatgta

SEQ ID NO: 317470 - DNA, 5891 bp, Homo sapiens
tagttctcaaacccagcaacatgactttagacagacatgccctgtagacatgactgcctttccaattgctgcctttccttttctgactcacctgtaaacatgactcacctttccttttctgagttatttttaggcatatttgggcagacatgccctgtaaacatgactcacctttccttttctgagttattttcttgctgactctgaaatgatagacctctttcttacctatcctcagatacccctccaacctacagctcttttctcgaagtcgccttcctgggccttgggattctagcagagctgggaagaggatgaagctgtctaggccagagacctgggagcgggagctgagcctacgggggaacaaagcgtcggtctgggaggaactcattgaaaatgggaagcttcccttcatggccatgcttcggaacctgtgcaacctgctgcgggttggaatcagttcccgccaccatgagctcattctccagagactccagcatgggaagtcggtgatccacagtcggcagtttccattcagatttcttaacgcccatgatgccattgatgccctcgaggctcaactcagaaatcaagcattgccctttccttcgaatataacactgatgaggcggatactaactagaaatgaaaagaaccgtcccaggcggaggtttctttgccacctaagccgtcagcagcttcgtatggcaatgaggatacctgtgttgtatgagcagctcaagagggagaagctgagagtacacaaggccagacagtggaaatatgatggtgagatgctgaacaggtaccgacaggccctagagacagctgtgaacctctctgtgaagcacagcctgcccctgctgccaggccgcactgtcttggtctatctgacagatgctaatgcagacaggctctgtccaaagagcaacccacaagggcccccgctgaactatgcactgctgttgattgggatgatgatcacgagggcggagcaggtggacgtcgtgctgtgtggaggtgacactctgaagactgcagtgcttaaggcagaagaaggcatcctgaagactgccatcaagctccaggctcaagtccaggagtttgatgaaaatgatggatggtccctgaatacttttgggaaatacctgctgtctctggctggccaaagggttcctgtggacagggtcatcctccttggccaaagcatggatgatggaatgataaatgtggccaaacagctttactggcagcgtgtgaattccaagtgcctctttgttggtatcctcctaagaagggtacaatacctgtcaacagatttgaatcccaatgatgtgacactctcaggctgtactgatgcgatactgaagttcattgcagagcatggggcctcccatcttctggaacatgtgggccaaatggacaaaatattcaagattccaccacccccaggaaagacaggggtccagtctctccggccactggaagaggacactccaagccccttggctcctgtttcccagcaaggatggcgcagcatccggcttttcatttcatccactttccgagacatgcacggggagcgggacctgctgctgaggtctgtgctgccagcactgcaggcccgagcggcccctcaccgtatcagccttcacggaatcgacctccgctggggcgtcactgaggaggagacccgtaggaacagacaactggaagtgtgccttggggaggtggagaacgcacagctgtttgtggggattctgggctcccgttatggatacattccccccagctacaaccttcctgaccatccacacttccactgggcccagcagtacccttcagggcgctctgtgacagagatggaggtgatgcagttcctgaaccggaaccaacgtctgcagccctctgcccaagctctcatctacttccgggattccagcttcctcagctctgtgccagatgcctggaaatctgactttgtttctgagtctgaagaggccgcatgtcggatctcagaactgaagagctacctaagcagacagaaagggataacctgccgcagatacccctgtgagtgggggggtgtggcagctggccggccctatgttggcgggctggaggagtttgggcagttggttctgcaggatgtatggaatatgatccagaagctctacctgcagcctggggccctgctggagcagccagtgtccatcccagacgatgacttggtccaggccaccttccagcagctgcagaagccaccgagtcctgcccggccacgccttcttcaggacacagtgcaacagctgatgctgccccacggaaggctgagcctggtgacggggcagtcaggacagggcaagacagccttcctggcatctcttgtgtcagccctgcaggctcctgatggggccaaggtggcaccattagtcttcttccacttttctggggctcgtcctgaccagggtcttgccctcactctgctcagacgcctctgtacctatctgcgtggccaactaaaagagccaggtgccctccccagcacctaccgaagcctggtgtgggagctgcagcagaggctgctgcccaagtctgctgagtccctgcatcctggccagacccaggtcctgatcatcgatggggctgataggttagtggaccagaatgggcagctgatttcagactggatcccaaagaagcttccccggtgtgtacacctggtgctgagtgtgtctagtgatgcaggcctaggggagacccttgagcagagccagggtgcccacgtgctggccttggggcctctggaggcctctgctcgggcccggctggtgagagaggagctggccctgtacgggaagcggctggaggagtcaccatttaacaaccagatgcgactgctgctggtgaagcgggaatcaggccggccgctctacctgcgcttggtcaccgatcacctgaggctcttcacgctgtatgagcaggtgtctgagagactccggaccctgcctgccactgtccccctgctgctgcagcacatcctgagcacactggagaaggagcacgggcctgatgtccttccccaggccttgactgccctagaagtcacacggagtggtttgactgtggaccagctgcacggagtgctgagtgtgtggcggacactaccgaaggggactaagagctgggaagaagcagtggctgctggtaacagtggagacccctaccccatgggcccgtttgcctgcctcgtccagagtctgcgcagtttgctaggggagggccctctggagcgccctggtgcccggctgtgcctccctgatgggcccctgagaacagcagctaaacgttgctatgggaagaggccagggctagaggacacggcacacatcctcattgcagctcagctctggaagacatgtgacgctgatgcctcaggcaccttccgaagttgccctcctgaggctctgggagacctgccttaccacctgctccagagcgggaaccgtggacttctttcgaagttccttaccaacctccatgtggtggctgcacacttggaattgggtctggtctctcggctcttggaggcccatgccctctatgcttcttcagtccccaaagaggaacaaaagctccccgaggctgacgttgcagtgtttcgcaccttcctgaggcagcaggcttcaatcctcagccagtacccccggctcctgccccagcaggcagccaaccagcccctggactcacctctttgccaccaagcctcgctgctctcccggagatggcacctccaacacacactacgatggcttaataaaccccggaccatgaaaaatcagcaaagctccagcctgtctctggcagtttcctcatcccctactgctgtggccttctccaccaatgggcaaagagcagctgtgggcactgccaatgggacagtttacctgttggacctgagaacttggcaggaggagaagtctgtggtgagtggctgtgatggaatctctgcttgtttgttcctctccgatgatacactctttcttactgccttcgacgggctcctggagctctgggacctgcagcatggttgtcgggtgctgcagactaaggctcaccagtaccaaatcactggctgctgcctgagcccagactgccggctgctagccaccgtgtgcttgggaggatgcctaaagctgtgggacacagtccgtgggcagctggccttccagcacacctaccccaagtccctgaactgtgttgccttccacccagaggggcaggtaatagccacaggcagctgggctggcagcatcagcttcttccaggtggatgggctcaaagtcaccaaggacctgggggcacccggagcctctatccgtaccttggccttcaatgtgcctgggggggttgtggctgtgggccggctggacagtatggtggagctgtgggcctggcgagaaggggcacggctggctgccttccctgcccaccatggctttgttgctgctgcgcttttcctgcatgcgggttgccagttactgacggctggagaggatggcaaggttcaggtgtggtcagggtctctgggtcggccccgtgggcacctgggttccctttctctctctcctgccctctctgtggcactcagcccagatggtgatcgggtggctgttggatatcgagcggatggcattaggatctacaaaatctcttcaggttcccagggggctcagggtcaggcactggatgtggcagtgtccgccctggcctggctaagccccaagtccctctggctcctgtccagattccagaagcctgtgctaggactggccacttcccaggagctcttggcttctgcctcagaggatttcacagtgcagctgtggccaaggcagctgctgacgcggccacacaaggcagaagactttccctgtggcactgagctgcggggacatgagggccctgtgagctgctgtagtttcagcactgatggaggcagcctggccaccgggggccgggatcggagtctcctctgctgggacgtgaggacacccaaaacccctgttttgatccactccttccctgcctgtcaccgtgactgggtcactggctgtgcctggaccaaagataacctactgatatcctgctccagtgatggctctgtggggctctgggacccagagtcaggacagcggcttggtcagttcctgggtcatcagagtgctgtgagcgctgtggcagctgtggaggagcacgtggtgtctgtgagccgggatgggaccttgaaagtgtgggaccatcaaggcgtggagctgaccagcatccctgctcactcaggacccattagccactgtgcagctgccatggagccccgtgcagctggacagcctgggtcagagcttctggtggtaaccgtcgggctagatggggccacacggttatggcatccactcttggtgtgccaaacccacaccctcctgggacacagcggcccagtccgtgctgctgctgtttcagaaacctcaggcctcatgctgaccgcctctgaggatggttctgtacggctctggcaggttcctaaggaagcagatgacacatgtataccaaggagttctgcagccgtcactgctgtggcttgggcaccagatggttccatggcagtatctggaaatcaagctggggaactaatcttgtggcaggaagctaaggctgtggccacagcacaggctccaggccacattggtgctctgatctggtcctcggcacacaccttttttgtcctcagtgctgatgagaaaatcagcgagtggcaagtgaaactgcggaagggttcggcacccggaaatttgaggtgaaacaggctgatgggttaatgggatagaaac

SEQ ID NO: 317471 - DNA, 2445 bp, Homo sapiens
tagttctcaaacccagcaacatgactttagacagacatgccctgtagacatgactgcctttccaattgctgcctttccttttctgactcacctgtaaacatgactcacctttccttttctgagttatttttaggcatatttgggcagacatgccctgtaaacatgactcacctttccttttctgagttattttcttgctgactctgaaatgatagacctctttcttacctatcctcagatacccctccaacctacagctcttttctcgaagtcgccttcctgggccttgggattctagcagagctgggaagaggatgaagctgtctaggccagagacctgggagcgggagctgagcctacgggggaacaaagcgtcggtctgggaggaactcattgaaaatgggaagcttcccttcatggccatgcttcggaacctgtgcaacctgctgcgggttggaatcagttcccgccaccatgagctcattctccagagactccagcatgggaagtcggtgatccacagtcggcagtttccattcagatttcttaacgcccatgatgccattgatgccctcgaggctcaactcagaaatcaagcattgccctttccttcgaatataacactgatgaggcggatactaactagaaatgaaaagaaccgtcccaggcggaggtttctttgccacctaagccgtcagcagcttcgtatggcaatgaggatacctgtgttgtatgagcagctcaagagggagaagctgagagtacacaaggccagacagtggaaatatgatggtgagatgctgaacaggtaccgacaggccctagagacagctgtgaacctctctgtgaagcacagcctgcccctgctgccaggccgcactgtcttggtctatctgacagatgctaatgcagacaggctctgtccaaagagcaacccacaagggcccccgctgaactatgcactgctgttgattgggatgatgatcacgagggcggagcaggtggacgtcgtgctgtgtggaggtgacactctgaagactgcagtgcttaaggcagaagaaggcatcctgaagactgccatcaagctccaggctcaagtccaggagtttgatgaaaatgatggatggtccctgaatacttttgggaaatacctgctgtctctggctggccaaagggttcctgtggacagggtcatcctccttggccaaagcatggatgatggaatgataaatgtggccaaacagctttactggcagcgtgtgaattccaagtgcctctttgttggtatcctcctaagaagggtacaatacctgtcaacagatttgaatcccaatgatgtgacactctcaggctgtactgatgcgatactgaagttcattgcagagcatggggcctcccatcttctggaacatgtgggccaaatggacaaaatattcaagattccaccacccccaggaaagacaggggtccagtctctccggccactggaagaggacactccaagccccttggctcctgtttcccagcaaggatggcgcagcatccggcttttcatttcatccactttccgagacatgcacggggagcgggacctgctgctgaggtctgtgctgccagcactgcaggcccgagcggcccctcaccgtatcagccttcacggaatcgacctccgctggggcgtcactgaggaggagacccgtaggaacagacaactggaagtgtgccttggggaggtggagaacgcacagctgtttgtggggattctgggctcccgttatggatacattccccccagctacaaccttcctgaccatccacacttccactgggcccagcagtacccttcagggcgctctgtgacagagatggaggtgatgcagttcctgaaccggaaccaacgtctgcagccctctgcccaagctctcatctacttccgggattccagcttcctcagctctgtgccagatgcctggaaatctgactttgtttctgagtctgaagaggccgcatgtcggatctcagaactgaagagctacctaagcagacagaaagggataacctgccgcagatacccctgtgagtgggggggtgtggcagctggccggccctatgttggcgggctggaggagtttgggcagttggttctgcaggatgtatggaatatgatccagaagctctacctgcagcctggggccctgctggagcagccagtgtccatcccagacgatgacttggtccaggccaccttccagcagctgcagaagccaccgagtcctgcccggccacgcccggctaattttatatttttagtagagatggggtttcaccatgttggtcatgctggtctcgaactcctgaccataggtgatccacccacctcggcctcccaaagtgctgggattacagacgtgagccattgcgcctggcccacaaatcactgttcct

SEQ ID NO: 317472 - DNA, 165 bp, Homo sapiens
ttccacccagaggggcaggtaatagccacaggcagctgggctggcagcatcagcttcttccaggtggatgggctcaaagtcaccaaggtaagaaggtccagtgttgctcttgggggaagcacaggaggacaggagtggagggtggcagacgacagacagcagcat

SEQ ID NO: 317473 - DNA, 331 bp, Homo sapiens
gtggacagggtcatcctccttggccaaagcatggatgatggaatgataaatgtggccaaacagctttactggcagcgtgtgaattccaagtgcctctttgttggtatcctcctaagaagggtacaatacctgtaagggtgcttatacttcctgcccagtgtcagaaatcagtggtctacatttcctctctacgcctgccaaagcataggacactcccacttggcagggatctccccaactctgccttcttacctctgttgcacttcaggtggatactttagcctaactctgtacccctctgtgagagtccaccctagccctagcctaccac

SEQ ID NO: 317474 - DNA, 449 bp, Homo sapiens
ccccatgctcccaggttgtgacgccaatgaagagatgaaagcaggggcagatcatgaagcatgtgggcgaaggctctgaaggttgagtagagcaaggtggtgtgtgagagcagtaagtcagacaggacacatcagtgctggtgtgtgaagggagagaacattagaggtgctattaatggagatgtagacttttcccgtggcctggtgctgccttcagatccatctggctttgaggggctgtggatacctgctgtgattcataactgccactactaccccagggtcgttggtttgattcagaagagaagaaaggggcagagacccaaatgccttcttatagtctgagcttgggagaggaggaggaggtggaggatctggccgtgaagctcacctctggagactctgaatctcatccagagcctactgaccatgtccttcaggaaaagaag

SEQ ID NO: 317475 - DNA, 585 bp, Homo sapiens
gggagcatgctgatgctggggagtcccacaccaggagcaaagggagtcagagaaatgcaggggagctgggtagagctcatgggcatatggtgcagggcagtcttcttttctagttggcttcctttttggtagagatgcaccttcagggctattgactggatctcttcaaggacagccagttccctttttttgaaattgcttctcctgtccctacaggggatggagcctccattttctcacagatgttttccaaggtacatagggtttctcagagaagagcagagaaaggtgagtcccttcttctggggttgtatatgtgcatgtacaatctcttctggactaatatttacgaacaaaattctattagggttgaaaatactttcttcctggggattcttggctgtgattgtgggtaaggttctgagagcactgggaaaggcatgtggttttattttttttcacttcactctccttggtattgtattttttttttttttttttttttgagatgaagttatgcactgtggcccaggctggagagctgcagtggcacggtcttggctcactacaacctccacctcacag

SEQ ID NO: 317476 - DNA, 489 bp, Homo sapiens
atttttcccaaaataatcatgtgggttcgtgggcatgctcatcactgctgtctgtgtggaagagaagattaaagagggatttactggactgcactgtcctaggcagcctttgctggcatctctcagcctagactgcagcccagatccttttactcaggtgcatgcatttagaacatgaaaacagtaagataaacactggtggtattattactttatattgcaagaacacttaatgatcttactatgtgtttttaatagaaacatccccactaatgaaattgtcaataaatactgctcaaaccaccttccccaaatactgaaaaacagtacatccatttctctacccttgccaagttgtctgcaaatgctctgtttttctactgaatggttagacaaacttgtgatttttttcccctttcttaacacaaatcaaaaaagtaggaaacaaaacccagtggataaaacgacattttttttttttcttgagac

SEQ ID NO: 317477 - DNA, 344 bp, Homo sapiens
tcagtggatccacactgcagacactacctgctcgttagtcactagatagccatctctgttataagacgactgtcacgtatcacggtgcttgggttcaagtgactcttattttacaggataacaaggccttgaataacgttgtcctttttttttttcttttttttctctgagttggagtctcactctgttgcccaggctggagttctggagttcagtggcatgatctcagctcactgcaacctccgcctcccgggttcaagcaattctcctacctcagcccggagcagctggaattacaggcacgtgccaccacacctggctaatttttgtaattttagtagaga

SEQ ID NO: 317478 - DNA, 5586 bp, Homo sapiens
  misc_feature (1631)..(1631): n is a, c, g, or t
  misc_feature (1638)..(1638): n is a, c, g, or t
  misc_feature (1662)..(1662): n is a, c, g, or t
  misc_feature (1711)..(1711): n is a, c, g, or t
  misc_feature (1723)..(1723): n is a, c, g, or t
  misc_feature (1738)..(1738): n is a, c, g, or t
  misc_feature (1751)..(1751): n is a, c, g, or t
  misc_feature (1783)..(1783): n is a, c, g, or t
  misc_feature (1785)..(1785): n is a, c, g, or t
  misc_feature (1797)..(1797): n is a, c, g, or t
  misc_feature (3856)..(3856): n is a, c, g, or t
  misc_feature (4725)..(4725): n is a, c, g, or t
  misc_feature (5586)..(5586): n is a, c, g, or t
ggccctaacaggaatgaaactgaggtgtcaagagggctctctgtgcacacttttggccatgacccagtgtcttctgcagtccttacgcagccacatgaggacactcagcacagagcagcctgtgtgtcccagagagtgagagaactgaagtggtgtccccaaggccacccggcaagttggtggcagagccaatacctgagctacccttaggccccgtatgtacctgcttctcatgtgacgcacagggaaattgaggcctggccccacctccctctgttgccctgctggccacatgcccaggggaagggatttccagggcttacccagagtggcattgctggggagagaccagatgcctgggctcctgggtttccccaaggggacggcccttaggaatcctgtgcctcctccactgccacccccttcacagcgggtcatccggagccgcagccagtccatggatgccatggggctgagcaacaagaagcccaacaccgtgtccaccagccacagcgggagcttcgcgcccaacaaccccgacctggccaaggcggctggaatatgagtgccctccccctccccaggccccggcccctccctggggggccctcagctctcctctgcctcctgaggcctgactccaactctctctgttgccctgctgcccacatgcccatcctaggctctggatttggtctagccactactttccatgggaggggggtgaagtgcccaggccaggacactgcggtgctgacagcttgcagcctgcagccccttcccaagctccttggccctcccctcctcctggccctttatgcattgaggtgtgacttcctgcaggtcagccctgggacagcctctgtgtctcattccttattgagtatctatctgtttgctggggactgggctgctgtgtgggcacctactgtcaagccttgggtttctgggagcacctactgtgtgtcgggctgtgggcacccactgtgtgtcaggccctgggctgctgtgtggacatgcactctgtgagcatctactgtgggcctggccctgagtacctgtgagcacccactgtgtgtcaggtcctgggctgctgtgtgggcatcaactctgtgagcgcctactgtgtgcgcagccctgggctgctgtgtgagaacctactgtgtgtcagaaaatggactgctatgtgagcacatcgtgtgtgataagccctagatgtcagtgaacacctactgtgtgtcaggaagtgagctgttgtgtgggtactttctctgtgagcacctcctactgtgtgtccgcagcagccagggcctctgtggtgtggctgcctattgtgtgtcgggaatctggcttctgtgtgagcatctccagagggagcacctcctgtgtgatcactgactgttgtccaggttctgggattctgctgctcacactcaggagtgctgggcacatggatgaatacggcctatggctgtgggcctcactgctgtccactgcctagtggccaccccaggacactgcacccactgctgtgctccccacccatccatccagccacccatccatccacccacccatccatccatccacccacccatccacccatctagctatccacccacccacccatncacccanctacccatctacccatccacccanccacccactcatccatccacccacccatccacccacccatccacccatnaatccatccatncacccacccatccanccatccatccatncatccatccatccatccatccatccatccatntntatccatccctntatctccatccatccatccacccacccaccgatccatccatccatccatcctttattgactgtctactgcatgccaagccctgcgctcagtgctgtgaggctatgtcacgtggcaggagggaattccccgacctctgctgtccagcagtcaccaagcacactgtcatgcgaggagcaggcccaacctcccccaacccagttttatcaaccactcccttcctctccaccagagtgacccagcctcctgtgggtggccgagaggggccccagggacaggaccaggccagcagcacccaccatggcagtaaccggacccatttctgttttgtttttgcacaactctccctctctctgtgtttcctcctttcattctactctctctccttgtttttttgttccctcctcccttccctttccccgtcctgtggcctctctgccctttggctctctgtttctccttccttcttgcacctgtctttttttgctccctctcctccttcccttctccgctcttctcaccctcgctttttcctttcggccttcccctggcttccttctctgtctctgaccctccctgggcctgtgtctgtgtccttgcgtccctgtctctctggatttccctctgtgcccatctggtgtgccctcgctggctcacgcgtgtccctgtctccgggtaactgtctgtccatctctcccccgtctcccttgtcctctgtctctccttgtgcttctcgccttcctttccccggccctatctctcccattgcctcctgcaccgttctcttcctttttctgtctgtcttcctcctttccctgcctctcctcctctctgtgtctccctcccaccatctctcttgctctctgactctctctctgtctctctctctctgcccccgccctctgctgcttgccagtcattgcttattcctgggaaaagtgcgagtagattcggacgccggggcagtgccataggcataggaaccgtggaagaggttgtcgtccgcggggccgccggctctggaggctgcctgcacgcgctgttctctgctcgctctcaggacggaggccatattggggacgttgcccctctgcccccgggacaggccccagggcgtgcgggatggagtggcggcagctccgatggcactcagcacctgctttggggcctggtacctgtgccagagccagtgcccctcaccaggggcttctggccctgccttggcccctgggaccctggcccagtccctgccaggatccggtacccaaaggccctacacccagccgcacgtcccccaatatcgccggtctgcatggagcgccatccctctcctctgccctgactcctcctccccgccacgaagtgacctggggtcctaccccttcctgcctccagagaagctgggggcgggcttctggggcctggggcatcccagcacagtgtgtgggaagctgggggagtcttccagctgctgggccagaacctcccccagccaatttggaggttccggggaggggccctagctggcacggggtgggacttgggttgctacactgccctctgaccactgcccttaggctgcagatcccacagagccctggggggcggggagcggtagccattctgaggactcggcctcctcccaccctagccccctcaggatgctgtcctaatcctgggccagtattgacgtgcagtcctgccgtgtgagctcgggagagccccttgccctcctggggactgtttccctttcgtaaactgggaggctgtctctgggaatggatatcttctctcgttctttcttgctcatcaactctgcttcagggcctggggcagcaggatccccagaggggatgtgggggggcactggggctcccaggtaaggtggcactgagttggggcctctccccacagtcactgattgtccctgggaagagccccacgaggaagaagtcgggcccgttcggctcccgccgcagcagcgccattggcatcgagaacatacaggaggtgcaggagaagaggtgggtgagtgggggacagtgccccattcccctgcanccccatccctgagccccattcggtggcaaagcaaggcaggcagaagggagtgcccgcccctctgcctctccatccccactagtgacagctgtgtggtcaagtccctgctgcgtgtcgggcaccagggccagcacgtcacctaacgtgccacatgcagatcaagaagcggtaggtcagaggagtcaaggggcttgcccagatcacacagccagtgatgggcagagctaggatctgagccctgatctgtctagggccagcatccgtgctcttcccacggccccagcgcatgtgggagggcctagtgctggttttcagggtggccacagatgggcctggggggtccatgagtgtgggcagcatgagggcagtgagcccaggccagcagcagggctgcccccggacatcagaggctagctcccggctgcctccccgatattaaccatgtgtgaccttgggcgagtcactgacctcctctgagccttactgtcccaacctggaaaagggacaagaacacaacccatggcatggggctgctgtggggactcagggcactgcgtgtgaggccagggccaggtcccctgagagggctccaggacgggagtgggcattgtccttgctgctgccagagctccgcatgctgtgagtcctgggttcaggtcttggcactgccacgtcctagctgtgcgtccctgggcaggttccttatccataatgggacagctatacctgctcctgtggagaggacctgggaggagtcccatcctgtcccatatagccccatcagtgccaaccccatcactggccaggctagccagggagcccacaagactgctccagggctggccctgagtataggggcgtgggtatgnggcaggaggcaccgtgactcccctcaccgcctgggcctcacgctacgcctgatgccaggcctggtgctgaatccccccgctgcccccgtgtgccccgcagggagagccctccggctggtcagaagaccccagacagcgggcacgtctcacaggagcccaagtcggagaactcatccactcagagctccccagagatgcccacgaccaagaacaggttggggctcagggcacgtggggcttgggggcttgggagtggtgaaccgtccttcccctcccctgcctgggcccgggacagcacaggagccttgactgtgccacagcagggtgtcagggggacctgggcattctctggggccctcctttgacatatacccagcgagcactttgtgcacgcccagccccgcgcccggctctggagcacagaggtgccctgcgcataggtccccgcctcacggccgcaggtccatcagaacgcggcctcataggctgttgccggatcatggtgataggaggaacccgaagcagggttggggggatgaagagggactgggggcagaggtgttttagatgggtcctcggggagacacctccatggggtgacatttgaattgggaactgaaccagccctgctaggactggcatggcagaggagctcggccagtgcagaggcctggggcacactccagggacagaaagaagggtggctgggagtggtgacgtatgcctggagtccacctacctgggaggctgaagcaggaggatgattttagcccaggagttggaggctgcagtgagctatgatcatgcctgtgaatagccactgcactctagcctggacatcatagcaagactccattgctn

SEQ ID NO: 317479 - DNA, 431 bp, Homo sapiens
gttctgctgtgtgactctgggcaagtcactctccctctctgggcatgtctgctacaaatggacaagattatttcagagagtttgagacagctccgtgtggagagcttagcccctggaggcagcacaaggaggatgtgatatgtgggggagtgaccagcacccagcttaacccctgccatcccatgctgggccctccaggccaagagtctcagctggccgagagtccaggccttgcctcccccgaccgccatggagggggcagcccggcacagctgctgggagcccttgtgtgtctggtcacactttttaggcgtcacgccaaaggccagcctcctggccccaatacccattttggaagcccctgtggccgtgtggatgtcggtaacagttgtataaaataaattctatttatcgctattgtaaaaaaaaaa

SEQ ID NO: 317480 - DNA, 671 bp, Homo sapiens
actgagccaagcacttcatccctttcagtcctggctgccaccaaagtacagggttccctcctatttggcagactaggaaagtgaggcacagagcggccaagtgacctcctcaggctgcccagctggtcagtggcagagtggggctttgagtgcaggtctgtctgatgtggggtctgctatcagccgtgacacctgctatcggcgaaggacctgcatctgggagtgggttggctttctggccttgtttccaaaagccccatgctcagcctcacccactcccctggcccccacctcccactgcaggagcatttcaattactactcactggacgctgccctcggccaccttgtcttctcactcaagtacgatgtcatcggggaccaagagcacctgcggctgctgctcaggtgagggtggtgggggagtcctgagatggcaggaagggctgaggtcttacaatctcagagcccatctcatttgacccactctcttcatcaaggcccatagaggggcagggatttgcttgaggttgcacagcaagttagtacccgagtcagcctgacacccatcatcacctctggtcctcgctgtggtccacccccttctggccttactttgtggggggtggggttcccattttcctgtcctgctgcccaggccttcatcgtgtg

SEQ ID NO: 317481 - DNA, 4276 bp, Homo sapiens
  misc_feature (1)..(1): n is a, c, g, or t
ngggagctcagcgctgcggggcccggacccgggcgcgcgcgggccaggagccggctgggccagctgaagtgccgccgggcgggggccgggccgggccgcgctcaggatggcacagctgcggcccgcggtgccacccggccgtccgcggaggggctcgctgcccgcgggggccagctggcagaacacagatctatttgagatgattgagaagatgcagggaagcaggatggatgaacaacgctgctccttcccgccgcccctcaaaacagaggaggactacattccatacccgagcgtgcacgaggtcttggggcgagaaggacccttccccctcatcctgctgccccagtttgggggctactggattgagggcaccaaccacgaaatcaccagcatccccgagacagagccactgcagtcgcccacaaccaaggtgaagctcgagtgcaaccccacagcccgcatctaccggaagcactttctcggcaaggagcatttcaattactactcactggacgctgccctcggccaccttgtcttctcactcaagtacgatgtcatcggggaccaagagcacctgcggctgctgctcaggaccaagtgccggacataccatgatgtcatccccatctcctgcctcaccgagttccctaatgttgtccagatggcaaagttggtgtgtgaagacgtcaatgtggatcggttctatcctgtgctctaccccaaggcttcccggctcatcgtcacctttgacgagcatgtcatcagcaataacttcaagtttggcgtcatttatcagaagcttgggcagacctccgaggaagaactcttcagcaccaatgaggaaagtcccgctttcgtggagttccttgaatttcttggccagaaggtcaaactgcaggactttaaggggttccgaggaggcctggacgtgacccacgggcagacggggaccgaatctgtgtactgcaacttccgcaacaaggagatcatgtttcacgtgtccaccaagctgccatacacggaaggggacgcccagcagttgcagcggaagcggcacatcgggaacgacatcgtggctgtggtcttccaggatgagaacactcctttcgtgcccgacatgatcgcgtccaacttcctgcatgcctacgtcgtggtgcaggctgagggcgggggccctgatggccccctctacaaggtctctgtcactgcaagagatgatgtgcccttctttggaccccccctcccggaccccgctgtgttcaggaaggggcctgagttccaggaatttttgctgacaaagctgatcaatgctgaatatgcctgctacaaggcagagaagtttgccaaactggaggagcggacgcgggccgccctcctggagacgctctatgaggaactacacatccacagccagtccatgatgggcttgggcggcgacgaggacaagatggagaatggcagtgggggcggcggcttctttgagtctttcaagcgggtcatccggagccgcagccagtccatggatgccatggggctgagcaacaagaagcccaacaccgtgtccaccagccacagcgggagcttcgcgcccaacaaccccgacctggccaaggcggctggaatatcattgcttattcctgggaaaagtgcgagtagattcggacgccggggcagtgccataggcataggaaccgtggaagaggttgtcgtccgcggggccgccggctctggaggctgcctgcacgcgctgttctctgctcgctctcaggacggaggccatattggggacgttgcccctctgcccccgggacaggccccagggcgtgcgggatggagtggcggcagctccgatggcactcagcacctgctttggggcctggtacctgtgccagagccagtgcccctcaccaggggcttctggccctgccttggcccctgggaccctggcccagtccctgccaggatccggtacccaaaggccctacacccagccgcacgtcccccaatatcgccggtctgcatggagcgccatccctctcctctgccctgactcctcctccccgccacgaagtgacctggggtcctaccccttcctgcctccagagaagctgggggcgggcttctggggcctggggcatcccagcacagtgtgtgggaagctgggggagtcttccagctgctgggccagaacctcccccagccaatttggaggttccggggaggggccctagctggcacggggtgggacttgggttgctacactgccctctgaccactgcccttaggctgcagatcccacagagccctggggggcggggagcggtagccattctgaggactcggcctcctcccaccctagccccctcaggatgctgtcctaatcctgggccagtattgacgtgcagtcctgccgtgtgagctcgggagagccccttgccctcctggggactgtttccctttcgtaaactgggaggctgtctctgggaatggatatcttctctcgttctttcttgctcatcaactctgcttcagggcctggggcagcaggatccccagaggggatgtgggggggcactggggctcccaggtaaggtggcactgagttggggcctctccccacagtcactgattgtccctgggaagagccccacgaggaagaagtcgggcccgttcggctcccgccgcagcagcgccattggcatcgagaacatacaggaggtgcaggagaagagggagagccctccggctggtcagaagaccccagacagcgggcacgtctcacaggagcccaagtcggagaactcatccactcagagctccccagagatgcccacgaccaagaacagagcggagaccgcagcgcagagagcagaggcgctcaaggacttctcccgctcctcgtccagtgccagcagcttcgccagcgtggtggaggagacggagggtgtggacggagaggacacaggcctggagagcgtgtcatcctcaggaacaccccacaagcgggactccttcatctatagcacgtggctggaggacagtgtcagcaccactagtgggggcagctccccaggcccctctcgatcaccccacccagacgccggcaagttgggggaccctgcgtgtcccgagatcaagatccagctggaagcatctgagcagcacatgccccagctgggctgttagccgggccaccccctctgaaggtgaaactgagcagatgaggccacagaagcacaaggggaaggtgccgtgtcaagcccaggcagacgagacctctgccctgaagaccaacaccagcccgtgggctgccccctgcctccccaccctccccatggcccacccatctgggctgtctctgcagggcagagccgtccagacctgggatcagggaagctgctggcatcgtccccacccccagcctgggggtctgggctggggcagggattgctcagtggaagcaggactgggggtctggcttgccccctccctgggcctccatcacccctgagcatccctctggactcagagggaacaaggtgggagagagagtttgagacagctccgtgtggagagcttagcccctggaggcagcacaaggaggatgtgatatgtgggggagtgagcactgggttgggagccgggtcctggtttccaatttgggttctgctgtgtgactctgggcaagtcactctccctctctgggcatgtctgctacaaatggacaagattatttcagaggtcactgaagactgtgattacatgcacctgccttagaaggtaggattttcttcccagggacctcctatcaccctaccctgcttcttgaggtccctggagccccaggtgggctgaggggcagggagccggctgtgcccagtatgcctcctggaccctccagttctgccacaggtctgccgatgccctgtccactgcctacacatgacagacaagtaaccccctcatgggggatggggacctacctggctcctcagccagcacccagcttaacccctgccatcccatgctgggccctccaggccaagagtctcagctggccgagagtccaggccttgcctcccccgaccgccatggagggggcagcccggcacagctgctgggagcccttgtgtgtctggtcacactttttaggcgtcacgccaaaggccagcctcctggccccaatacccattttggaagcccctgtggccgtgtggatgtcggtaacagttgtataaaataaattctatttatcgctattgtaaaaaaaaaa

SEQ ID NO: 317482 - DNA, 6425 bp, Homo sapiens
  misc_feature (1)..(1): n is a, c, g, or t
  misc_feature (2696)..(2696): n is a, c, g, or t
  misc_feature (2703)..(2703): n is a, c, g, or t
  misc_feature (2727)..(2727): n is a, c, g, or t
  misc_feature (2776)..(2776): n is a, c, g, or t
  misc_feature (2788)..(2788): n is a, c, g, or t
  misc_feature (2803)..(2803): n is a, c, g, or t
  misc_feature (2816)..(2816): n is a, c, g, or t
  misc_feature (2848)..(2848): n is a, c, g, or t
  misc_feature (2850)..(2850): n is a, c, g, or t
  misc_feature (2862)..(2862): n is a, c, g, or t
ngggagctcagcgctgcggggcccggacccgggcgcgcgcgggccaggagccggctgggccagctgaagtgccgccgggcgggggccgggccgggccgcgctcaggatggcacagctgcggcccgcggtgccacccggccgtccgcggaggggctcgctgcccgcgggggccagctggcagaacacagatctatttgagatgattgagaagatgcagggaagcaggatggatgaacaacgctgctccttcccgccgcccctcaaaacagaggaggactacattccatacccgagcgtgcacgaggtcttggggcgagaaggacccttccccctcatcctgctgccccagtttgggggctactggattgagggcaccaaccacgaaatcaccagcatccccgagacagagccactgcagtcgcccacaaccaaggtgaagctcgagtgcaaccccacagcccgcatctaccggaagcactttctcggcaaggagcatttcaattactactcactggacgctgccctcggccaccttgtcttctcactcaagtacgatgtcatcggggaccaagagcacctgcggctgctgctcaggaccaagtgccggacataccatgatgtcatccccatctcctgcctcaccgagttccctaatgttgtccagatggcaaagttggtgtgtgaagacgtcaatgtggatcggttctatcctgtgctctaccccaaggcttcccggctcatcgtcacctttgacgagcatgtcatcagcaataacttcaagtttggcgtcatttatcagaagcttgggcagacctccgaggaagaactcttcagcaccaatgaggaaagtcccgctttcgtggagttccttgaatttcttggccagaaggtcaaactgcaggactttaaggggttccgaggaggcctggacgtgacccacgggcagacggggaccgaatctgtgtactgcaacttccgcaacaaggagatcatgtttcacgtgtccaccaagctgccatacacggaaggggacgcccagcagttgcagcggaagcggcacatcgggaacgacatcgtggctgtggtcttccaggatgagaacactcctttcgtgcccgacatgatcgcgtccaacttcctgcatgcctacgtcgtggtgcaggctgagggcgggggccctgatggccccctctacaaggtctctgtcactgcaagagatgatgtgcccttctttggaccccccctcccggaccccgctgtgttcaggaaggggcctgagttccaggaatttttgctgacaaagctgatcaatgctgaatatgcctgctacaaggcagagaagtttgccaaactggaggagcggacgcgggccgccctcctggagacgctctatgaggaactacacatccacagccagtccatgatgggcttgggcggcgacgaggacaagatggagaatggcagtgggggcggcggcttctttgagtctttcaagcgggtcatccggagccgcagccagtccatggatgccatggggctgagcaacaagaagcccaacaccgtgtccaccagccacagcgggagcttcgcgcccaacaaccccgacctggccaaggcggctggaatatgagtgccctccccctccccaggccccggcccctccctggggggccctcagctctcctctgcctcctgaggcctgactccaactctctctgttgccctgctgcccacatgcccatcctaggctctggatttggtctagccactactttccatgggaggggggtgaagtgcccaggccaggacactgcggtgctgacagcttgcagcctgcagccccttcccaagctccttggccctcccctcctcctggccctttatgcattgaggtgtgacttcctgcaggtcagccctgggacagcctctgtgtctcattccttattgagtatctatctgtttgctggggactgggctgctgtgtgggcacctactgtcaagccttgggtttctgggagcacctactgtgtgtcgggctgtgggcacccactgtgtgtcaggccctgggctgctgtgtggacatgcactctgtgagcatctactgtgggcctggccctgagtacctgtgagcacccactgtgtgtcaggtcctgggctgctgtgtgggcatcaactctgtgagcgcctactgtgtgcgcagccctgggctgctgtgtgagaacctactgtgtgtcagaaaatggactgctatgtgagcacatcgtgtgtgataagccctagatgtcagtgaacacctactgtgtgtcaggaagtgagctgttgtgtgggtactttctctgtgagcacctcctactgtgtgtccgcagcagccagggcctctgtggtgtggctgcctattgtgtgtcgggaatctggcttctgtgtgagcatctccagagggagcacctcctgtgtgatcactgactgttgtccaggttctgggattctgctgctcacactcaggagtgctgggcacatggatgaatacggcctatggctgtgggcctcactgctgtccactgcctagtggccaccccaggacactgcacccactgctgtgctccccacccatccatccagccacccatccatccacccacccatccatccatccacccacccatccacccatctagctatccacccacccacccatncacccanctacccatctacccatccacccanccacccactcatccatccacccacccatccacccacccatccacccatnaatccatccatncacccacccatccanccatccatccatncatccatccatccatccatccatccatccatntntatccatccctntatctccatccatccatccacccacccaccgatccatccatccatccatcctttattgactgtctactgcatgccaagccctgcgctcagtgctgtgaggctatgtcacgtggcaggagggaattccccgacctctgctgtccagcagtcaccaagcacactgtcatgcgaggagcaggcccaacctcccccaacccagttttatcaaccactcccttcctctccaccagagtgacccagcctcctgtgggtggccgagaggggccccagggacaggaccaggccagcagcacccaccatggcagtaaccggacccatttctgttttgtttttgcacaactctccctctctctgtgtttcctcctttcattctactctctctccttgtttttttgttccctcctcccttccctttccccgtcctgtggcctctctgccctttggctctctgtttctccttccttcttgcacctgtctttttttgctccctctcctccttcccttctccgctcttctcaccctcgctttttcctttcggccttcccctggcttccttctctgtctctgaccctccctgggcctgtgtctgtgtccttgcgtccctgtctctctggatttccctctgtgcccatctggtgtgccctcgctggctcacgcgtgtccctgtctccgggtaactgtctgtccatctctcccccgtctcccttgtcctctgtctctccttgtgcttctcgccttcctttccccggccctatctctcccattgcctcctgcaccgttctcttcctttttctgtctgtcttcctcctttccctgcctctcctcctctctgtgtctccctcccaccatctctcttgctctctgactctctctctgtctctctctctctgcccccgccctctgctgcttgccagtcattgcttattcctgggaaaagtgcgagtagattcggacgccggggcagtgccataggcataggaaccgtggaagaggttgtcgtccgcggggccgccggctctggaggctgcctgcacgcgctgttctctgctcgctctcaggacggaggccatattggggacgttgcccctctgcccccgggacaggccccagggcgtgcgggatggagtggcggcagctccgatggcactcagcacctgctttggggcctggtacctgtgccagagccagtgcccctcaccaggggcttctggccctgccttggcccctgggaccctggcccagtccctgccaggatccggtacccaaaggccctacacccagccgcacgtcccccaatatcgccggtctgcatggagcgccatccctctcctctgccctgactcctcctccccgccacgaagtgacctggggtcctaccccttcctgcctccagagaagctgggggcgggcttctggggcctggggcatcccagcacagtgtgtgggaagctgggggagtcttccagctgctgggccagaacctcccccagccaatttggaggttccggggaggggccctagctggcacggggtgggacttgggttgctacactgccctctgaccactgcccttaggctgcagatcccacagagccctggggggcggggagcggtagccattctgaggactcggcctcctcccaccctagccccctcaggatgctgtcctaatcctgggccagtattgacgtgcagtcctgccgtgtgagctcgggagagccccttgccctcctggggactgtttccctttcgtaaactgggaggctgtctctgggaatggatatcttctctcgttctttcttgctcatcaactctgcttcagggcctggggcagcaggatccccagaggggatgtgggggggcactggggctcccaggtaaggtggcactgagttggggcctctccccacagtcactgattgtccctgggaagagccccacgaggaagaagtcgggcccgttcggctcccgccgcagcagcgccattggcatcgagaacatacaggaggtgcaggagaagagggagagccctccggctggtcagaagaccccagacagcgggcacgtctcacaggagcccaagtcggagaactcatccactcagagctccccagagatgcccacgaccaagaacagagcggagaccgcagcgcagagagcagaggcgctcaaggacttctcccgctcctcgtccagtgccagcagcttcgccagcgtggtggaggagacggagggtgtggacggagaggacacaggcctggagagcgtgtcatcctcaggaacaccccacaagcgggactccttcatctatagcacgtggctggaggacagtgtcagcaccactagtgggggcagctccccaggcccctctcgatcaccccacccagacgccggcaagttgggggaccctgcgtgtcccgagatcaagatccagctggaagcatctgagcagcacatgccccagctgggctgttagccgggccaccccctctgaaggtgaaactgagcagatgaggccacagaagcacaaggggaaggtgccgtgtcaagcccaggcagacgagacctctgccctgaagaccaacaccagcccgtgggctgccccctgcctccccaccctccccatggcccacccatctgggctgtctctgcagggcagagccgtccagacctgggatcagggaagctgctggcatcgtccccacccccagcctgggggtctgggctggggcagggattgctcagtggaagcaggactgggggtctggcttgccccctccctgggcctccatcacccctgagcatccctctggactcagagggaacaaggtgggagagagagtttgagacagctccgtgtggagagcttagcccctggaggcagcacaaggaggatgtgatatgtgggggagtgagcactgggttgggagccgggtcctggtttccaatttgggttctgctgtgtgactctgggcaagtcactctccctctctgggcatgtctgctacaaatggacaagattatttcagaggtcactgaagactgtgattacatgcacctgccttagaaggtaggattttcttcccagggacctcctatcaccctaccctgcttcttgaggtccctggagccccaggtgggctgaggggcagggagccggctgtgcccagtatgcctcctggaccctccagttctgccacaggtctgccgatgccctgtccactgcctacacatgacagacaagtaaccccctcatgggggatggggacctacctggctcctcagccagcacccagcttaacccctgccatcccatgctgggccctccaggccaagagtctcagctggccgagagtccaggccttgcctcccccgaccgccatggagggggcagcccggcacagctgctgggagcccttgtgtgtctggtcacactttttaggcgtcacgccaaaggccagcctcctggccccaatacccattttggaagcccctgtggccgtgtggatgtcggtaacagttgtataaaataaattctatttatcgctattgtaaaaaaaaaa

SEQ ID NO: 317483 - DNA, 3533 bp, Homo sapiens
  misc_feature (1)..(1): n is a, c, g, or t
ngggagctcagcgctgcggggcccggacccgggcgcgcgcgggccaggagccggctgggccagctgaagtgccgccgggcgggggccgggccgggccgcgctcaggatggcacagctgcggcccgcggtgccacccggccgtccgcggaggggctcgctgcccgcgggggccagctggcagaacacagatctatttgagatgattgagaagatgcagggaagcaggatggatgaacaacgctgctccttcccgccgcccctcaaaacagaggaggactacattccatacccgagcgtgcacgaggtcttggggcgagaaggacccttccccctcatcctgctgccccagtttgggggctactggattgagggcaccaaccacgaaatcaccagcatccccgagacagagccactgcagtcgcccacaaccaaggtgaagctcgagtgcaaccccacagcccgcatctaccggaagcactttctcggcaaggagcatttcaattactactcactggacgctgccctcggccaccttgtcttctcactcaagtacgatgtcatcggggaccaagagcacctgcggctgctgctcaggaccaagtgccggacataccatgatgtcatccccatctcctgcctcaccgagttccctaatgttgtccagatggcaaagttggtgtgtgaagacgtcaatgtggatcggttctatcctgtgctctaccccaaggcttcccggctcatcgtcacctttgacgagcatgtcatcagcaataacttcaagtttggcgtcatttatcagaagcttgggcagacctccgaggaagaactcttcagcaccaatgaggaaagtcccgctttcgtggagttccttgaatttcttggccagaaggtcaaactgcaggactttaaggggttccgaggaggcctggacgtgacccacgggcagacggggaccgaatctgtgtactgcaacttccgcaacaaggagatcatgtttcacgtgtccaccaagctgccatacacggaaggggacgcccagcagttgcagcggaagcggcacatcgggaacgacatcgtggctgtggtcttccaggatgagaacactcctttcgtgcccgacatgatcgcgtccaacttcctgcatgcctacgtcgtggtgcaggctgagggcgggggccctgatggccccctctacaaggtctctgtcactgcaagagatgatgtgcccttctttggaccccccctcccggaccccgctgtgttcaggaaggggcctgagttccaggaatttttgctgacaaagctgatcaatgctgaatatgcctgctacaaggcagagaagtttgccaaactggaggagcggacgcgggccgccctcctggagacgctctatgaggaactacacatccacagccagtccatgatgggcttgggcggcgacgaggacaagatggagaatggcagtgggggcggcggcttctttgagtctttcaagcgggtcatccggagccgcagccagtccatggatgccatggggctgagcaacaagaagcccaacaccgtgtccaccagccacagcgggagcttcgcgcccaacaaccccgacctggccaaggcggctggaatatcattgcttattcctgggaaaagtgcgagtagattcggacgccggggcagtgccataggcataggaaccgtggaagaggttgtcgtccgcggggccgccggctctggaggctgcctgcacgcgctgttctctgctcgctctcaggacggaggccatattggggacgttgcccctctgcccccgggacaggccccagggcgtgcgggatggagtggcggcagctccgatggcactcagcacctgctttggggcctgtcactgattgtccctgggaagagccccacgaggaagaagtcgggcccgttcggctcccgccgcagcagcgccattggcatcgagaacatacaggaggtgcaggagaagagggagagccctccggctggtcagaagaccccagacagcgggcacgtctcacaggagcccaagtcggagaactcatccactcagagctccccagagatgcccacgaccaagaacagagcggagaccgcagcgcagagagcagaggcgctcaaggacttctcccgctcctcgtccagtgccagcagcttcgccagcgtggtggaggagacggagggtgtggacggagaggacacaggcctggagagcgtgtcatcctcaggaacaccccacaagcgggactccttcatctatagcacgtggctggaggacagtgtcagcaccactagtgggggcagctccccaggcccctctcgatcaccccacccagacgccggcaagttgggggaccctgcgtgtcccgagatcaagatccagctggaagcatctgagcagcacatgccccagctgggctgttagccgggccaccccctctgaaggtgaaactgagcagatgaggccacagaagcacaaggggaaggtgccgtgtcaagcccaggcagacgagacctctgccctgaagaccaacaccagcccgtgggctgccccctgcctccccaccctccccatggcccacccatctgggctgtctctgcagggcagagccgtccagacctgggatcagggaagctgctggcatcgtccccacccccagcctgggggtctgggctggggcagggattgctcagtggaagcaggactgggggtctggcttgccccctccctgggcctccatcacccctgagcatccctctggactcagagggaacaaggtgggagagagagtttgagacagctccgtgtggagagcttagcccctggaggcagcacaaggaggatgtgatatgtgggggagtgagcactgggttgggagccgggtcctggtttccaatttgggttctgctgtgtgactctgggcaagtcactctccctctctgggcatgtctgctacaaatggacaagattatttcagaggtcactgaagactgtgattacatgcacctgccttagaaggtaggattttcttcccagggacctcctatcaccctaccctgcttcttgaggtccctggagccccaggtgggctgaggggcagggagccggctgtgcccagtatgcctcctggaccctccagttctgccacaggtctgccgatgccctgtccactgcctacacatgacagacaagtaaccccctcatgggggatggggacctacctggctcctcagccagcacccagcttaacccctgccatcccatgctgggccctccaggccaagagtctcagctggccgagagtccaggccttgcctcccccgaccgccatggagggggcagcccggcacagctgctgggagcccttgtgtgtctggtcacactttttaggcgtcacgccaaaggccagcctcctggccccaatacccattttggaagcccctgtggccgtgtggatgtcggtaacagttgtataaaataaattctatttatcgctattgtaaaaaaaaaa

SEQ ID NO: 317484 - DNA, 4423 bp, Homo sapiens
tgtccaggctctgttatctggaaaaggggctcttgacgggctcctgaacccaccagaatgtgcagagaagaggtcccaggtgggagccgagagggggctgagggcagatccccaagagagaagtgattggtgtgagagaggatctcaatttcttcgtgtctaaaatggggaaactgcagcgccacttaccctgcctagggtggacaagtccttcacttctcgccggagtgtgtggaggagcgatgggcagaaccagcacttccctcaggcactagacctgtcacgagtgaacttagttccctcctatactccttcactctaccctaagaacacagatctatttgagatgattgagaagatgcagggaagcaggatggatgaacaacgctgctccttcccgccgcccctcaaaacagaggaggactacattccatacccgagcgtgcacgaggtcttggggcgagaaggacccttccccctcatcctgctgccccagtttgggggctactggattgagggcaccaaccacgaaatcaccagcatccccgagacagagccactgcagtcgcccacaaccaaggtgaagctcgagtgcaaccccacagcccgcatctaccggaagcactttctcggcaaggagcatttcaattactactcactggacgctgccctcggccaccttgtcttctcactcaagtacgatgtcatcggggaccaagagcacctgcggctgctgctcaggaccaagtgccggacataccatgatgtcatccccatctcctgcctcaccgagttccctaatgttgtccagatggcaaagttggtgtgtgaagacgtcaatgtggatcggttctatcctgtgctctaccccaaggcttcccggctcatcgtcacctttgacgagcatgtcatcagcaataacttcaagtttggcgtcatttatcagaagcttgggcagacctccgaggaagaactcttcagcaccaatgaggaaagtcccgctttcgtggagttccttgaatttcttggccagaaggtcaaactgcaggactttaaggggttccgaggaggcctggacgtgacccacgggcagacggggaccgaatctgtgtactgcaacttccgcaacaaggagatcatgtttcacgtgtccaccaagctgccatacacggaaggggacgcccagcagttgcagcggaagcggcacatcgggaacgacatcgtggctgtggtcttccaggatgagaacactcctttcgtgcccgacatgatcgcgtccaacttcctgcatgcctacgtcgtggtgcaggctgagggcgggggccctgatggccccctctacaaggtctctgtcactgcaagagatgatgtgcccttctttggaccccccctcccggaccccgctgtgttcaggaaggggcctgagttccaggaatttttgctgacaaagctgatcaatgctgaatatgcctgctacaaggcagagaagtttgccaaactggaggagcggacgcgggccgccctcctggagacgctctatgaggaactacacatccacagccagtccatgatgggcttgggcggcgacgaggacaagatggagaatggcagtgggggcggcggcttctttgagtctttcaagcgggtcatccggagccgcagccagtccatggatgccatggggctgagcaacaagaagcccaacaccgtgtccaccagccacagcgggagcttcgcgcccaacaaccccgacctggccaaggcggctggaatatcattgcttattcctgggaaaagtgcgagtagattcggacgccggggcagtgccataggcataggaaccgtggaagaggttgtcgtccgcggggccgccggctctggaggctgcctgcacgcgctgttctctgctcgctctcaggacggaggccatattggggacgttgcccctctgcccccgggacaggccccagggcgtgcgggatggagtggcggcagctccgatggcactcagcacctgctttggggcctggtacctgtgccagagccagtgcccctcaccaggggcttctggccctgccttggcccctgggaccctggcccagtccctgccaggatccggtacccaaaggccctacacccagccgcacgtcccccaatatcgccggtctgcatggagcgccatccctctcctctgccctgactcctcctccccgccacgaagtgacctggggtcctaccccttcctgcctccagagaagctgggggcgggcttctggggcctggggcatcccagcacagtgtgtgggaagctgggggagtcttccagctgctgggccagaacctcccccagccaatttggaggttccggggaggggccctagctggcacggggtgggacttgggttgctacactgccctctgaccactgcccttaggctgcagatcccacagagccctggggggcggggagcggtagccattctgaggactcggcctcctcccaccctagccccctcaggatgctgtcctaatcctgggccagtattgacgtgcagtcctgccgtgtgagctcgggagagccccttgccctcctggggactgtttccctttcgtaaactgggaggctgtctctgggaatggatatcttctctcgttctttcttgctcatcaactctgcttcagggcctggggcagcaggatccccagaggggatgtgggggggcactggggctcccaggtaaggtggcactgagttggggcctctccccacagtcactgattgtccctgggaagagccccacgaggaagaagtcgggcccgttcggctcccgccgcagcagcgccattggcatcgagaacatacaggaggtgcaggagaagagggagagccctccggctggtcagaagaccccagacagcgggcacgtctcacaggagcccaagtcggagaactcatccactcagagctccccagagatgcccacgaccaagaacagagcggagaccgcagcgcagagagcagaggcgctcaaggacttctcccgctcctcgtccagtgccagcagcttcgccagcgtggtggaggagacggagggtgtggacggagaggacacaggcctggagagcgtgtcatcctcaggaacaccccacaagcgggactccttcatctatagcacgtggctggaggacagtgtcagcaccactagtgggggcagctccccaggcccctctcgatcaccccacccagacgccggcaagttgggggaccctgcgtgtcccgagatcaagatccagctggaagcatctgagcagcacatgccccagctgggctgttagccgggccaccccctctgaaggtgaaactgagcagatgaggccacagaagcacaaggggaaggtgccgtgtcaagcccaggcagacgagacctctgccctgaagaccaacaccagcccgtgggctgccccctgcctccccaccctccccatggcccacccatctgggctgtctctgcagggcagagccgtccagacctgggatcagggaagctgctggcatcgtccccacccccagcctgggggtctgggctggggcagggattgctcagtggaagcaggactgggggtctggcttgccccctccctgggcctccatcacccctgagcatccctctggactcagagggaacaaggtgggagagagagtttgagacagctccgtgtggagagcttagcccctggaggcagcacaaggaggatgtgatatgtgggggagtgagcactgggttgggagccgggtcctggtttccaatttgggttctgctgtgtgactctgggcaagtcactctccctctctgggcatgtctgctacaaatggacaagattatttcagaggtcactgaagactgtgattacatgcacctgccttagaaggtaggattttcttcccagggacctcctatcaccctaccctgcttcttgaggtccctggagccccaggtgggctgaggggcagggagccggctgtgcccagtatgcctcctggaccctccagttctgccacaggtctgccgatgccctgtccactgcctacacatgacagacaagtaaccccctcatgggggatggggacctacctggctcctcagccagcacccagcttaacccctgccatcccatgctgggccctccaggccaagagtctcagctggccgagagtccaggccttgcctcccccgaccgccatggagggggcagcccggcacagctgctgggagcccttgtgtgtctggtcacactttttaggcgtcacgccaaaggccagcctcctggccccaatacccattttggaagcccctgtggccgtgtggatgtcggtaacagttgtataaaataaattctatttatcgctattgtaaaaaaaaaa

SEQ ID NO: 317485 - DNA, 4307 bp, Homo sapiens
  misc_feature (1)..(1): n is a, c, g, or t
ngggagctcagcgctgcggggcccggacccgggcgcgcgcgggccaggagccggctgggccagctgaagtgccgccgggcgggggccgggccgggccgcgctcaggatggcacagctgcggcccgcggtgccacccggccgtccgcggaggggctcgctgcccgcgggggccagctggcagaacacagatctatttgagatgattgagaagatgcagggaagcaggatggatgaacaacgctgctccttcccgccgcccctcaaaacagaggaggactacattccatacccgagcgtgcacgaggtcttggggcgagaaggacccttccccctcatcctgctgccccagtttgggggctactggattgagggcaccaaccacgaaatcaccagcatccccgagacagagccactgcagtcgcccacaaccaaggtgaagctcgagtgcaaccccacagcccgcatctaccggaagcactttctcggcaaggagcatttcaattactactcactggacgctgccctcggccaccttgtcttctcactcaagtacgatgtcatcggggaccaagagcacctgcggctgctgctcaggaccaagtgccggacataccatgatgtcatccccatctcctgcctcaccgagttccctaatgttgtccagatggcaaagttggtgtgtgaagacgtcaatgtggatcggttctatcctgtgctctaccccaaggcttcccggctcatcgtcacctttgacgagcatgtcatcagcaataacttcaagtttggcgtcatttatcagaagcttgggcagacctccgaggaagaactcttcagcaccaatgaggaaagtcccgctttcgtggagttccttgaatttcttggccagaaggtcaaactgcaggactttaaggggttccgaggaggcctggacgtgacccacgggcagacggggaccgaatctgtgtactgcaacttccgcaacaaggagatcatgtttcacgtgtccaccaagctgccatacacggaaggggacgcccagcagttgcagcggaagcggcacatcgggaacgacatcgtggctgtggtcttccaggatgagaacactcctttcgtgcccgacatgatcgcgtccaacttcctgcatgcctacgtcgtggtgcaggctgagggcgggggccctgatggccccctctacaaggtctctgtcactgcaagagatgatgtgcccttctttggaccccccctcccggaccccgctgtgttcaggaaggggcctgagttccaggaatttttgctgacaaagctgatcaatgctgaatatgcctgctacaaggcagagaagtttgccaaactggaggagcggacgcgggccgccctcctggagacgctctatgaggaactacacatccacagccagtccatgatgggcttgggcggcgacgaggacaagatggagaatggcagtgggggcggcggcttctttgagtctttcaagcgggtcatccggagccgcagccagtccatggatgccatggggctgagcaacaagaagcccaacaccgtgtccaccagccacagcgggagcttcgcgcccaacaaccccgacctggccaaggcggctggaatatcattgcttattcctgggaaaagtgcgagtagattcggacgccggggcagtgccataggcataggaaccgtggaagaggttgtcgtccgcggggccgccggctctggaggctgcctgcacgcgctgttctctgctcgctctcaggacggaggccatattggggacgttgcccctctgcccccgggacaggccccagggcgtgcgggatggagtggcggcagctccgatggcactcagcacctgctttggggcctggtacctgtgccagagccagtgcccctcaccaggggcttctggccctgccttggcccctgggaccctggcccagtccctgccaggatccggtacccaaaggccctacacccagccgcacgtcccccaatatcgccggtctgcatggagcgccatccctctcctctgccctgactcctcctccccgccacgaagtgacctggggtcctaccccttcctgcctccagagaagctgggggcgggcttctggggcctggggcatcccagcacagtgtgtgggaagctgggggagtcttccagctgctgggccagaacctcccccagccaatttggaggttccggggaggggccctagctggcacggggtgggacttgggttgctacactgccctctgaccactgcccttaggctgcagatcccacagagccctggggggcggggagcggtagccattctgaggactcggcctcctcccaccctagccccctcaggatgctgtcctaatcctgggccagtattgacgtgcagtcctgccgtgtgagctcgggagagccccttgccctcctggggactgtttccctttcgtaaactgggaggctgtctctgggaatggatatcttctctcgttctttcttgctcatcaactctgcttcagggcctggggcagcaggatccccagaggggatgtgggggggcactggggctcccaggtaaggtggcactgagttggggcctctccccacagtcactgattgtccctgggaagagccccacgaggaagaagtcgggcccgttcggctcccgccgcagcagcgccattggcatcgagaacatacaggaggtgcaggagaagagggagagccctccggctggtcagaagaccccagacagcgggcacgtctcacaggagcccaagtcggagaactcatccactcagagctccccagagatgcccacgaccaagaacagagcggagaccgcagcgcagagagcagaggcgctcaaggacttctcccgctcctcgtccagtgccagcagcttcgccagcgtggtggaggagacggagggtgtggacggagaggacacaggcctggagagcgtgtcatcctcaggaacaccccacaagcgggactccttcatctatagcacgtggctggaggacagtgtcagcaccactagtgggggcagctccccagtgaggtggctccctcctgcccccctccccaggcccctctcgatcaccccacccagacgccggcaagttgggggaccctgcgtgtcccgagatcaagatccagctggaagcatctgagcagcacatgccccagctgggctgttagccgggccaccccctctgaaggtgaaactgagcagatgaggccacagaagcacaaggggaaggtgccgtgtcaagcccaggcagacgagacctctgccctgaagaccaacaccagcccgtgggctgccccctgcctccccaccctccccatggcccacccatctgggctgtctctgcagggcagagccgtccagacctgggatcagggaagctgctggcatcgtccccacccccagcctgggggtctgggctggggcagggattgctcagtggaagcaggactgggggtctggcttgccccctccctgggcctccatcacccctgagcatccctctggactcagagggaacaaggtgggagagagagtttgagacagctccgtgtggagagcttagcccctggaggcagcacaaggaggatgtgatatgtgggggagtgagcactgggttgggagccgggtcctggtttccaatttgggttctgctgtgtgactctgggcaagtcactctccctctctgggcatgtctgctacaaatggacaagattatttcagaggtcactgaagactgtgattacatgcacctgccttagaaggtaggattttcttcccagggacctcctatcaccctaccctgcttcttgaggtccctggagccccaggtgggctgaggggcagggagccggctgtgcccagtatgcctcctggaccctccagttctgccacaggtctgccgatgccctgtccactgcctacacatgacagacaagtaaccccctcatgggggatggggacctacctggctcctcagccagcacccagcttaacccctgccatcccatgctgggccctccaggccaagagtctcagctggccgagagtccaggccttgcctcccccgaccgccatggagggggcagcccggcacagctgctgggagcccttgtgtgtctggtcacactttttaggcgtcacgccaaaggccagcctcctggccccaatacccattttggaagcccctgtggccgtgtggatgtcggtaacagttgtataaaataaattctatttatcgctattgtaaaaaaaaaa

SEQ ID NO: 317486 - DNA, 4416 bp, Homo sapiens
gatctccacagcggtggagaggaggaagggtgaacgccgtggtggagtggtccatgtggacctgctcccctttgctgccaggaggttaatacctctgccaaccgaggccaccctccctcggacccccattcggaagaagcagacccaagttcgaattctgacattgccactgagcagccgtacaacttttgggtggacaagtccttcacttctcgccggagtgtgtggaggagcgatgggcagaaccagcacttccctcaggcactagacctgtcacgagtgaacttagttccctcctatactccttcactctaccctaagaacacagatctatttgagatgattgagaagatgcagggaagcaggatggatgaacaacgctgctccttcccgccgcccctcaaaacagaggaggactacattccatacccgagcgtgcacgaggtcttggggcgagaaggacccttccccctcatcctgctgccccagtttgggggctactggattgagggcaccaaccacgaaatcaccagcatccccgagacagagccactgcagtcgcccacaaccaaggtgaagctcgagtgcaaccccacagcccgcatctaccggaagcactttctcggcaaggagcatttcaattactactcactggacgctgccctcggccaccttgtcttctcactcaagtacgatgtcatcggggaccaagagcacctgcggctgctgctcaggaccaagtgccggacataccatgatgtcatccccatctcctgcctcaccgagttccctaatgttgtccagatggcaaagttggtgtgtgaagacgtcaatgtggatcggttctatcctgtgctctaccccaaggcttcccggctcatcgtcacctttgacgagcatgtcatcagcaataacttcaagtttggcgtcatttatcagaagcttgggcagacctccgaggaagaactcttcagcaccaatgaggaaagtcccgctttcgtggagttccttgaatttcttggccagaaggtcaaactgcaggactttaaggggttccgaggaggcctggacgtgacccacgggcagacggggaccgaatctgtgtactgcaacttccgcaacaaggagatcatgtttcacgtgtccaccaagctgccatacacggaaggggacgcccagcagttgcagcggaagcggcacatcgggaacgacatcgtggctgtggtcttccaggatgagaacactcctttcgtgcccgacatgatcgcgtccaacttcctgcatgcctacgtcgtggtgcaggctgagggcgggggccctgatggccccctctacaaggtctctgtcactgcaagagatgatgtgcccttctttggaccccccctcccggaccccgctgtgttcaggaaggggcctgagttccaggaatttttgctgacaaagctgatcaatgctgaatatgcctgctacaaggcagagaagtttgccaaactggaggagcggacgcgggccgccctcctggagacgctctatgaggaactacacatccacagccagtccatgatgggcttgggcggcgacgaggacaagatggagaatggcagtgggggcggcggcttctttgagtctttcaagcgggtcatccggagccgcagccagtccatggatgccatggggctgagcaacaagaagcccaacaccgtgtccaccagccacagcgggagcttcgcgcccaacaaccccgacctggccaaggcggctggaatatcattgcttattcctgggaaaagtgcgagtagattcggacgccggggcagtgccataggcataggaaccgtggaagaggttgtcgtccgcggggccgccggctctggaggctgcctgcacgcgctgttctctgctcgctctcaggacggaggccatattggggacgttgcccctctgcccccgggacaggccccagggcgtgcgggatggagtggcggcagctccgatggcactcagcacctgctttggggcctggtacctgtgccagagccagtgcccctcaccaggggcttctggccctgccttggcccctgggaccctggcccagtccctgccaggatccggtacccaaaggccctacacccagccgcacgtcccccaatatcgccggtctgcatggagcgccatccctctcctctgccctgactcctcctccccgccacgaagtgacctggggtcctaccccttcctgcctccagagaagctgggggcgggcttctggggcctggggcatcccagcacagtgtgtgggaagctgggggagtcttccagctgctgggccagaacctcccccagccaatttggaggttccggggaggggccctagctggcacggggtgggacttgggttgctacactgccctctgaccactgcccttaggctgcagatcccacagagccctggggggcggggagcggtagccattctgaggactcggcctcctcccaccctagccccctcaggatgctgtcctaatcctgggccagtattgacgtgcagtcctgccgtgtgagctcgggagagccccttgccctcctggggactgtttccctttcgtaaactgggaggctgtctctgggaatggatatcttctctcgttctttcttgctcatcaactctgcttcagggcctggggcagcaggatccccagaggggatgtgggggggcactggggctcccaggtaaggtggcactgagttggggcctctccccacagtcactgattgtccctgggaagagccccacgaggaagaagtcgggcccgttcggctcccgccgcagcagcgccattggcatcgagaacatacaggaggtgcaggagaagagggagagccctccggctggtcagaagaccccagacagcgggcacgtctcacaggagcccaagtcggagaactcatccactcagagctccccagagatgcccacgaccaagaacagagcggagaccgcagcgcagagagcagaggcgctcaaggacttctcccgctcctcgtccagtgccagcagcttcgccagcgtggtggaggagacggagggtgtggacggagaggacacaggcctggagagcgtgtcatcctcaggaacaccccacaagcgggactccttcatctatagcacgtggctggaggacagtgtcagcaccactagtgggggcagctccccaggcccctctcgatcaccccacccagacgccggcaagttgggggaccctgcgtgtcccgagatcaagatccagctggaagcatctgagcagcacatgccccagctgggctgttagccgggccaccccctctgaaggtgaaactgagcagatgaggccacagaagcacaaggggaaggtgccgtgtcaagcccaggcagacgagacctctgccctgaagaccaacaccagcccgtgggctgccccctgcctccccaccctccccatggcccacccatctgggctgtctctgcagggcagagccgtccagacctgggatcagggaagctgctggcatcgtccccacccccagcctgggggtctgggctggggcagggattgctcagtggaagcaggactgggggtctggcttgccccctccctgggcctccatcacccctgagcatccctctggactcagagggaacaaggtgggagagagagtttgagacagctccgtgtggagagcttagcccctggaggcagcacaaggaggatgtgatatgtgggggagtgagcactgggttgggagccgggtcctggtttccaatttgggttctgctgtgtgactctgggcaagtcactctccctctctgggcatgtctgctacaaatggacaagattatttcagaggtcactgaagactgtgattacatgcacctgccttagaaggtaggattttcttcccagggacctcctatcaccctaccctgcttcttgaggtccctggagccccaggtgggctgaggggcagggagccggctgtgcccagtatgcctcctggaccctccagttctgccacaggtctgccgatgccctgtccactgcctacacatgacagacaagtaaccccctcatgggggatggggacctacctggctcctcagccagcacccagcttaacccctgccatcccatgctgggccctccaggccaagagtctcagctggccgagagtccaggccttgcctcccccgaccgccatggagggggcagcccggcacagctgctgggagcccttgtgtgtctggtcacactttttaggcgtcacgccaaaggccagcctcctggccccaatacccattttggaagcccctgtggccgtgtggatgtcggtaacagttgtataaaataaattctatttatcgctattgtaaaaaaaaaa

SEQ ID NO: 317487 - DNA, 4089 bp, Homo sapiens
actgagccaagcacttcatccctttcagtcctggctgccaccaaagtacagggttccctcctatttggcagactaggaaagtgaggcacagagcggccaagtgacctcctcaggctgcccagctggtcagtggcagagtggggctttgagtgcaggtctgtctgatgtggggtctgctatcagccgtgacacctgctatcggcgaaggacctgcatctgggagtgggttggctttctggccttgtttccaaaagccccatgctcagcctcacccactcccctggcccccacctcccactgcaggagcatttcaattactactcactggacgctgccctcggccaccttgtcttctcactcaagtacgatgtcatcggggaccaagagcacctgcggctgctgctcaggaccaagtgccggacataccatgatgtcatccccatctcctgcctcaccgagttccctaatgttgtccagatggcaaagttggtgtgtgaagacgtcaatgtggatcggttctatcctgtgctctaccccaaggcttcccggctcatcgtcacctttgacgagcatgtcatcagcaataacttcaagtttggcgtcatttatcagaagcttgggcagacctccgaggaagaactcttcagcaccaatgaggaaagtcccgctttcgtggagttccttgaatttcttggccagaaggtcaaactgcaggactttaaggggttccgaggaggcctggacgtgacccacgggcagacggggaccgaatctgtgtactgcaacttccgcaacaaggagatcatgtttcacgtgtccaccaagctgccatacacggaaggggacgcccagcagttgcagcggaagcggcacatcgggaacgacatcgtggctgtggtcttccaggatgagaacactcctttcgtgcccgacatgatcgcgtccaacttcctgcatgcctacgtcgtggtgcaggctgagggcgggggccctgatggccccctctacaaggtctctgtcactgcaagagatgatgtgcccttctttggaccccccctcccggaccccgctgtgttcaggaaggggcctgagttccaggaatttttgctgacaaagctgatcaatgctgaatatgcctgctacaaggcagagaagtttgccaaactggaggagcggacgcgggccgccctcctggagacgctctatgaggaactacacatccacagccagtccatgatgggcttgggcggcgacgaggacaagatggagaatggcagtgggggcggcggcttctttgagtctttcaagcgggtcatccggagccgcagccagtccatggatgccatggggctgagcaacaagaagcccaacaccgtgtccaccagccacagcgggagcttcgcgcccaacaaccccgacctggccaaggcggctggaatatcattgcttattcctgggaaaagtgcgagtagattcggacgccggggcagtgccataggcataggaaccgtggaagaggttgtcgtccgcggggccgccggctctggaggctgcctgcacgcgctgttctctgctcgctctcaggacggaggccatattggggacgttgcccctctgcccccgggacaggccccagggcgtgcgggatggagtggcggcagctccgatggcactcagcacctgctttggggcctggtacctgtgccagagccagtgcccctcaccaggggcttctggccctgccttggcccctgggaccctggcccagtccctgccaggatccggtacccaaaggccctacacccagccgcacgtcccccaatatcgccggtctgcatggagcgccatccctctcctctgccctgactcctcctccccgccacgaagtgacctggggtcctaccccttcctgcctccagagaagctgggggcgggcttctggggcctggggcatcccagcacagtgtgtgggaagctgggggagtcttccagctgctgggccagaacctcccccagccaatttggaggttccggggaggggccctagctggcacggggtgggacttgggttgctacactgccctctgaccactgcccttaggctgcagatcccacagagccctggggggcggggagcggtagccattctgaggactcggcctcctcccaccctagccccctcaggatgctgtcctaatcctgggccagtattgacgtgcagtcctgccgtgtgagctcgggagagccccttgccctcctggggactgtttccctttcgtaaactgggaggctgtctctgggaatggatatcttctctcgttctttcttgctcatcaactctgcttcagggcctggggcagcaggatccccagaggggatgtgggggggcactggggctcccaggtaaggtggcactgagttggggcctctccccacagtcactgattgtccctgggaagagccccacgaggaagaagtcgggcccgttcggctcccgccgcagcagcgccattggcatcgagaacatacaggaggtgcaggagaagagggagagccctccggctggtcagaagaccccagacagcgggcacgtctcacaggagcccaagtcggagaactcatccactcagagctccccagagatgcccacgaccaagaacagagcggagaccgcagcgcagagagcagaggcgctcaaggacttctcccgctcctcgtccagtgccagcagcttcgccagcgtggtggaggagacggagggtgtggacggagaggacacaggcctggagagcgtgtcatcctcaggaacaccccacaagcgggactccttcatctatagcacgtggctggaggacagtgtcagcaccactagtgggggcagctccccaggcccctctcgatcaccccacccagacgccggcaagttgggggaccctgcgtgtcccgagatcaagatccagctggaagcatctgagcagcacatgccccagctgggctgttagccgggccaccccctctgaaggtgaaactgagcagatgaggccacagaagcacaaggggaaggtgccgtgtcaagcccaggcagacgagacctctgccctgaagaccaacaccagcccgtgggctgccccctgcctccccaccctccccatggcccacccatctgggctgtctctgcagggcagagccgtccagacctgggatcagggaagctgctggcatcgtccccacccccagcctgggggtctgggctggggcagggattgctcagtggaagcaggactgggggtctggcttgccccctccctgggcctccatcacccctgagcatccctctggactcagagggaacaaggtgggagagagagtttgagacagctccgtgtggagagcttagcccctggaggcagcacaaggaggatgtgatatgtgggggagtgagcactgggttgggagccgggtcctggtttccaatttgggttctgctgtgtgactctgggcaagtcactctccctctctgggcatgtctgctacaaatggacaagattatttcagaggtcactgaagactgtgattacatgcacctgccttagaaggtaggattttcttcccagggacctcctatcaccctaccctgcttcttgaggtccctggagccccaggtgggctgaggggcagggagccggctgtgcccagtatgcctcctggaccctccagttctgccacaggtctgccgatgccctgtccactgcctacacatgacagacaagtaaccccctcatgggggatggggacctacctggctcctcagccagcacccagcttaacccctgccatcccatgctgggccctccaggccaagagtctcagctggccgagagtccaggccttgcctcccccgaccgccatggagggggcagcccggcacagctgctgggagcccttgtgtgtctggtcacactttttaggcgtcacgccaaaggccagcctcctggccccaatacccattttggaagcccctgtggccgtgtggatgtcggtaacagttgtataaaataaattctatttatcgctattgtaaaaaaaaaa

SEQ ID NO: 317488 - DNA, 3646 bp, Homo sapiens
agcagagctgcagcggcggccgcgggcaccagagtgccgagcccaggacgcccccggcccaggcccttggggtttggtgccagctgcggggcgcctgggcttggggaagaaaccttgtgtacgcacacctgcacacacacacagtctccggaggttaatacctctgccaaccgaggccaccacctccgaggaagaactcttcagcaccaatgaggaaagtcccgctttcgtggagttccttgaatttcttggccagaaggtcaaactgcaggactttaaggggttccgaggaggcctggacgtgacccacgggcagacggggaccgaatctgtgtactgcaacttccgcaacaaggagatcatgtttcacgtgtccaccaagctgccatacacggaaggggacgcccagcagttgcagcggaagcggcacatcgggaacgacatcgtggctgtggtcttccaggatgagaacactcctttcgtgcccgacatgatcgcgtccaacttcctgcatgcctacgtcgtggtgcaggctgagggcgggggccctgatggccccctctacaaggtctctgtcactgcaagagatgatgtgcccttctttggaccccccctcccggaccccgctgtgttcaggaaggggcctgagttccaggaatttttgctgacaaagctgatcaatgctgaatatgcctgctacaaggcagagaagtttgccaaactggaggagcggacgcgggccgccctcctggagacgctctatgaggaactacacatccacagccagtccatgatgggcttgggcggcgacgaggacaagatggagaatggcagtgggggcggcggcttctttgagtctttcaagcgggtcatccggagccgcagccagtccatggatgccatggggctgagcaacaagaagcccaacaccgtgtccaccagccacagcgggagcttcgcgcccaacaaccccgacctggccaaggcggctggaatatcattgcttattcctgggaaaagtgcgagtagattcggacgccggggcagtgccataggcataggaaccgtggaagaggttgtcgtccgcggggccgccggctctggaggctgcctgcacgcgctgttctctgctcgctctcaggacggaggccatattggggacgttgcccctctgcccccgggacaggccccagggcgtgcgggatggagtggcggcagctccgatggcactcagcacctgctttggggcctggtacctgtgccagagccagtgcccctcaccaggggcttctggccctgccttggcccctgggaccctggcccagtccctgccaggatccggtacccaaaggccctacacccagccgcacgtcccccaatatcgccggtctgcatggagcgccatccctctcctctgccctgactcctcctccccgccacgaagtgacctggggtcctaccccttcctgcctccagagaagctgggggcgggcttctggggcctggggcatcccagcacagtgtgtgggaagctgggggagtcttccagctgctgggccagaacctcccccagccaatttggaggttccggggaggggccctagctggcacggggtgggacttgggttgctacactgccctctgaccactgcccttaggctgcagatcccacagagccctggggggcggggagcggtagccattctgaggactcggcctcctcccaccctagccccctcaggatgctgtcctaatcctgggccagtattgacgtgcagtcctgccgtgtgagctcgggagagccccttgccctcctggggactgtttccctttcgtaaactgggaggctgtctctgggaatggatatcttctctcgttctttcttgctcatcaactctgcttcagggcctggggcagcaggatccccagaggggatgtgggggggcactggggctcccaggtaaggtggcactgagttggggcctctccccacagtcactgattgtccctgggaagagccccacgaggaagaagtcgggcccgttcggctcccgccgcagcagcgccattggcatcgagaacatacaggaggtgcaggagaagagggagagccctccggctggtcagaagaccccagacagcgggcacgtctcacaggagcccaagtcggagaactcatccactcagagctccccagagatgcccacgaccaagaacagagcggagaccgcagcgcagagagcagaggcgctcaaggacttctcccgctcctcgtccagtgccagcagcttcgccagcgtggtggaggagacggagggtgtggacggagaggacacaggcctggagagcgtgtcatcctcaggaacaccccacaagcgggactccttcatctatagcacgtggctggaggacagtgtcagcaccactagtgggggcagctccccaggcccctctcgatcaccccacccagacgccggcaagttgggggaccctgcgtgtcccgagatcaagatccagctggaagcatctgagcagcacatgccccagctgggctgttagccgggccaccccctctgaaggtgaaactgagcagatgaggccacagaagcacaaggggaaggtgccgtgtcaagcccaggcagacgagacctctgccctgaagaccaacaccagcccgtgggctgccccctgcctccccaccctccccatggcccacccatctgggctgtctctgcagggcagagccgtccagacctgggatcagggaagctgctggcatcgtccccacccccagcctgggggtctgggctggggcagggattgctcagtggaagcaggactgggggtctggcttgccccctccctgggcctccatcacccctgagcatccctctggactcagagggaacaaggtgggagagagagtttgagacagctccgtgtggagagcttagcccctggaggcagcacaaggaggatgtgatatgtgggggagtgagcactgggttgggagccgggtcctggtttccaatttgggttctgctgtgtgactctgggcaagtcactctccctctctgggcatgtctgctacaaatggacaagattatttcagaggtcactgaagactgtgattacatgcacctgccttagaaggtaggattttcttcccagggacctcctatcaccctaccctgcttcttgaggtccctggagccccaggtgggctgaggggcagggagccggctgtgcccagtatgcctcctggaccctccagttctgccacaggtctgccgatgccctgtccactgcctacacatgacagacaagtaaccccctcatgggggatggggacctacctggctcctcagccagcacccagcttaacccctgccatcccatgctgggccctccaggccaagagtctcagctggccgagagtccaggccttgcctcccccgaccgccatggagggggcagcccggcacagctgctgggagcccttgtgtgtctggtcacactttttaggcgtcacgccaaaggccagcctcctggccccaatacccattttggaagcccctgtggccgtgtggatgtcggtaacagttgtataaaataaattctatttatcgctattgtaaaaaaaaaa

SEQ ID NO: 317489 - DNA, 5181 bp, Homo sapiens
  misc_feature (1452)..(1452): n is a, c, g, or t
  misc_feature (1459)..(1459): n is a, c, g, or t
  misc_feature (1483)..(1483): n is a, c, g, or t
  misc_feature (1532)..(1532): n is a, c, g, or t
  misc_feature (1544)..(1544): n is a, c, g, or t
  misc_feature (1559)..(1559): n is a, c, g, or t
  misc_feature (1572)..(1572): n is a, c, g, or t
  misc_feature (1604)..(1604): n is a, c, g, or t
  misc_feature (1606)..(1606): n is a, c, g, or t
  misc_feature (1618)..(1618): n is a, c, g, or t
atctcctccacactgggagtttccaggggcctgagttccaggaatttttgctgacaaagctgatcaatgctgaatatgcctgctacaaggcagagaagtttgccaaactggaggagcggacgcgggccgccctcctggagacgctctatgaggaactacacatccacagccagtccatgatgggcttgggcggcgacgaggacaagatggagaatggcagtgggggcggcggcttctttgagtctttcaagcgggtcatccggagccgcagccagtccatggatgccatggggctgagcaacaagaagcccaacaccgtgtccaccagccacagcgggagcttcgcgcccaacaaccccgacctggccaaggcggctggaatatgagtgccctccccctccccaggccccggcccctccctggggggccctcagctctcctctgcctcctgaggcctgactccaactctctctgttgccctgctgcccacatgcccatcctaggctctggatttggtctagccactactttccatgggaggggggtgaagtgcccaggccaggacactgcggtgctgacagcttgcagcctgcagccccttcccaagctccttggccctcccctcctcctggccctttatgcattgaggtgtgacttcctgcaggtcagccctgggacagcctctgtgtctcattccttattgagtatctatctgtttgctggggactgggctgctgtgtgggcacctactgtcaagccttgggtttctgggagcacctactgtgtgtcgggctgtgggcacccactgtgtgtcaggccctgggctgctgtgtggacatgcactctgtgagcatctactgtgggcctggccctgagtacctgtgagcacccactgtgtgtcaggtcctgggctgctgtgtgggcatcaactctgtgagcgcctactgtgtgcgcagccctgggctgctgtgtgagaacctactgtgtgtcagaaaatggactgctatgtgagcacatcgtgtgtgataagccctagatgtcagtgaacacctactgtgtgtcaggaagtgagctgttgtgtgggtactttctctgtgagcacctcctactgtgtgtccgcagcagccagggcctctgtggtgtggctgcctattgtgtgtcgggaatctggcttctgtgtgagcatctccagagggagcacctcctgtgtgatcactgactgttgtccaggttctgggattctgctgctcacactcaggagtgctgggcacatggatgaatacggcctatggctgtgggcctcactgctgtccactgcctagtggccaccccaggacactgcacccactgctgtgctccccacccatccatccagccacccatccatccacccacccatccatccatccacccacccatccacccatctagctatccacccacccacccatncacccanctacccatctacccatccacccanccacccactcatccatccacccacccatccacccacccatccacccatnaatccatccatncacccacccatccanccatccatccatncatccatccatccatccatccatccatccatntntatccatccctntatctccatccatccatccacccacccaccgatccatccatccatccatcctttattgactgtctactgcatgccaagccctgcgctcagtgctgtgaggctatgtcacgtggcaggagggaattccccgacctctgctgtccagcagtcaccaagcacactgtcatgcgaggagcaggcccaacctcccccaacccagttttatcaaccactcccttcctctccaccagagtgacccagcctcctgtgggtggccgagaggggccccagggacaggaccaggccagcagcacccaccatggcagtaaccggacccatttctgttttgtttttgcacaactctccctctctctgtgtttcctcctttcattctactctctctccttgtttttttgttccctcctcccttccctttccccgtcctgtggcctctctgccctttggctctctgtttctccttccttcttgcacctgtctttttttgctccctctcctccttcccttctccgctcttctcaccctcgctttttcctttcggccttcccctggcttccttctctgtctctgaccctccctgggcctgtgtctgtgtccttgcgtccctgtctctctggatttccctctgtgcccatctggtgtgccctcgctggctcacgcgtgtccctgtctccgggtaactgtctgtccatctctcccccgtctcccttgtcctctgtctctccttgtgcttctcgccttcctttccccggccctatctctcccattgcctcctgcaccgttctcttcctttttctgtctgtcttcctcctttccctgcctctcctcctctctgtgtctccctcccaccatctctcttgctctctgactctctctctgtctctctctctctgcccccgccctctgctgcttgccagtcattgcttattcctgggaaaagtgcgagtagattcggacgccggggcagtgccataggcataggaaccgtggaagaggttgtcgtccgcggggccgccggctctggaggctgcctgcacgcgctgttctctgctcgctctcaggacggaggccatattggggacgttgcccctctgcccccgggacaggccccagggcgtgcgggatggagtggcggcagctccgatggcactcagcacctgctttggggcctggtacctgtgccagagccagtgcccctcaccaggggcttctggccctgccttggcccctgggaccctggcccagtccctgccaggatccggtacccaaaggccctacacccagccgcacgtcccccaatatcgccggtctgcatggagcgccatccctctcctctgccctgactcctcctccccgccacgaagtgacctggggtcctaccccttcctgcctccagagaagctgggggcgggcttctggggcctggggcatcccagcacagtgtgtgggaagctgggggagtcttccagctgctgggccagaacctcccccagccaatttggaggttccggggaggggccctagctggcacggggtgggacttgggttgctacactgccctctgaccactgcccttaggctgcagatcccacagagccctggggggcggggagcggtagccattctgaggactcggcctcctcccaccctagccccctcaggatgctgtcctaatcctgggccagtattgacgtgcagtcctgccgtgtgagctcgggagagccccttgccctcctggggactgtttccctttcgtaaactgggaggctgtctctgggaatggatatcttctctcgttctttcttgctcatcaactctgcttcagggcctggggcagcaggatccccagaggggatgtgggggggcactggggctcccaggtaaggtggcactgagttggggcctctccccacagtcactgattgtccctgggaagagccccacgaggaagaagtcgggcccgttcggctcccgccgcagcagcgccattggcatcgagaacatacaggaggtgcaggagaagagggagagccctccggctggtcagaagaccccagacagcgggcacgtctcacaggagcccaagtcggagaactcatccactcagagctccccagagatgcccacgaccaagaacagagcggagaccgcagcgcagagagcagaggcgctcaaggacttctcccgctcctcgtccagtgccagcagcttcgccagcgtggtggaggagacggagggtgtggacggagaggacacaggcctggagagcgtgtcatcctcaggaacaccccacaagcgggactccttcatctatagcacgtggctggaggacagtgtcagcaccactagtgggggcagctccccaggcccctctcgatcaccccacccagacgccggcaagttgggggaccctgcgtgtcccgagatcaagatccagctggaagcatctgagcagcacatgccccagctgggctgttagccgggccaccccctctgaaggtgaaactgagcagatgaggccacagaagcacaaggggaaggtgccgtgtcaagcccaggcagacgagacctctgccctgaagaccaacaccagcccgtgggctgccccctgcctccccaccctccccatggcccacccatctgggctgtctctgcagggcagagccgtccagacctgggatcagggaagctgctggcatcgtccccacccccagcctgggggtctgggctggggcagggattgctcagtggaagcaggactgggggtctggcttgccccctccctgggcctccatcacccctgagcatccctctggactcagagggaacaaggtgggagagagagtttgagacagctccgtgtggagagcttagcccctggaggcagcacaaggaggatgtgatatgtgggggagtgagcactgggttgggagccgggtcctggtttccaatttgggttctgctgtgtgactctgggcaagtcactctccctctctgggcatgtctgctacaaatggacaagattatttcagaggtcactgaagactgtgattacatgcacctgccttagaaggtaggattttcttcccagggacctcctatcaccctaccctgcttcttgaggtccctggagccccaggtgggctgaggggcagggagccggctgtgcccagtatgcctcctggaccctccagttctgccacaggtctgccgatgccctgtccactgcctacacatgacagacaagtaaccccctcatgggggatggggacctacctggctcctcagccagcacccagcttaacccctgccatcccatgctgggccctccaggccaagagtctcagctggccgagagtccaggccttgcctcccccgaccgccatggagggggcagcccggcacagctgctgggagcccttgtgtgtctggtcacactttttaggcgtcacgccaaaggccagcctcctggccccaatacccattttggaagcccctgtggccgtgtggatgtcggtaacagttgtataaaataaattctatttatcgctattgtaaaaaaaaaa

SEQ ID NO: 317490 - DNA, 1385 bp, Homo sapiens
gggagtagtgtgattgaggtggagcagcttcgccagcgtggtggaggagacggagggtgtggacggagaggacacaggcctggagagcgtgtcatcctcaggaacaccccacaagcgggactccttcatctatagcacgtggctggaggacagtgtcagcaccactagtgggggcagctccccaggcccctctcgatcaccccacccagacgccggcaagttgggggaccctgcgtgtcccgagatcaagatccagctggaagcatctgagcagcacatgccccagctgggctgttagccgggccaccccctctgaaggtgaaactgagcagatgaggccacagaagcacaaggggaaggtgccgtgtcaagcccaggcagacgagacctctgccctgaagaccaacaccagcccgtgggctgccccctgcctccccaccctccccatggcccacccatctgggctgtctctgcagggcagagccgtccagacctgggatcagggaagctgctggcatcgtccccacccccagcctgggggtctgggctggggcagggattgctcagtggaagcaggactgggggtctggcttgccccctccctgggcctccatcacccctgagcatccctctggactcagagggaacaaggtgggagagagagtttgagacagctccgtgtggagagcttagcccctggaggcagcacaaggaggatgtgatatgtgggggagtgagcactgggttgggagccgggtcctggtttccaatttgggttctgctgtgtgactctgggcaagtcactctccctctctgggcatgtctgctacaaatggacaagattatttcagaggtcactgaagactgtgattacatgcacctgccttagaaggtaggattttcttcccagggacctcctatcaccctaccctgcttcttgaggtccctggagccccaggtgggctgaggggcagggagccggctgtgcccagtatgcctcctggaccctccagttctgccacaggtctgccgatgccctgtccactgcctacacatgacagacaagtaaccccctcatgggggatggggacctacctggctcctcagccagcacccagcttaacccctgccatcccatgctgggccctccaggccaagagtctcagctggccgagagtccaggccttgcctcccccgaccgccatggagggggcagcccggcacagctgctgggagcccttgtgtgtctggtcacactttttaggcgtcacgccaaaggccagcctcctggccccaatacccattttggaagcccctgtggccgtgtggatgtcggtaacagttgtataaaataaattctatttatcgctattgtaaaaaaaaaa

SEQ ID NO: 317491 - DNA, 2528 bp, Homo sapiens
  misc_feature (1)..(1): n is a, c, g, or t
ngggagctcagcgctgcggggcccggacccgggcgcgcgcgggccaggagccggctgggccagctgaagtgccgccgggcgggggccgggccgggccgcgctcaggatggcacagctgcggcccgcggtgccacccggccgtccgcggaggggctcgctgcccgcgggggccagctggcagaacacagatctatttgagatgattgagaagatgcagggaagcaggatggatgaacaacgctgctccttcccgccgcccctcaaaacagaggaggactacattccatacccgagcgtgcacgaggtcttggggcgagaaggacccttccccctcatcctgctgccccagtttgggggctactggattgagggcaccaaccacgaaatcaccagcatccccgagacagagccactgcagtcgcccacaaccaaggtgaagctcgagtgcaaccccacagcccgcatctaccggaagcactttctcggcaaggagcatttcaattactactcactggacgctgccctcggccaccttgtcttctcactcaagtacgatgtcatcggggaccaagagcacctgcggctgctgctcaggaccaagtgccggacataccatgatgtcatccccatctcctgcctcaccgagttccctaatgttgtccagatggcaaagttggtgtgtgaagacgtcaatgtggatcggttctatcctgtgctctaccccaaggcttcccggctcatcgtcacctttgacgagcatgtcatcagcaataacttcaagtttggcgtcatttatcagaagcttgggcagacctccgaggaagaactcttcagcaccaatgaggaaagtcccgctttcgtggagttccttgaatttcttggccagaaggtcaaactgcaggactttaaggggttccgaggaggcctggacgtgacccacgggcagacggggaccgaatctgtgtactgcaacttccgcaacaaggagatcatgtttcacgtgtccaccaagctgccatacacggaaggggacgcccagcagttgcagcggaagcggcacatcgggaacgacatcgtggctgtggtcttccaggatgagaacactcctttcgtgcccgacatgatcgcgtccaacttcctgcatgcctacgtcgtggtgcaggctgagggcgggggccctgatggccccctctacaaggtctctgtcactgcaagagatgatgtgcccttctttggaccccccctcccggaccccgctgtgttcaggaaggggcctgagttccaggaatttttgctgacaaagctgatcaatgctgaatatgcctgctacaaggcagagaagtttgccaaactggaggagcggacgcgggccgccctcctggagacgctctatgaggaactacacatccacagccagtccatgatgggcttgggcggcgacgaggacaagatggagaatggcagtgggggcggcggcttctttgagtctttcaagcgggtcatccggagccgcagccagtccatggatgccatggggctgagcaacaagaagcccaacaccgtgtccaccagccacagcgggagcttcgcgcccaacaaccccgacctggccaaggcggctggaatatcactgattgtccctgggaagagccccacgaggaagaagtcgggcccgttcggctcccgccgcagcagcgccattggcatcgagaacatacaggaggtgcaggagaagagggagagccctccggctggtcagaagaccccagacagcgggcacgtctcacaggagcccaagtcggagaactcatccactcagagctccccagagatgcccacgaccaagaacagagcggagaccgcagcgcagagagcagaggcgctcaaggacttctcccgctcctcgtccagtgccagcagcttcgccagcgtggtggaggagacggagggtgtggacggagaggacacaggcctggagagcgtgtcatcctcaggaacaccccacaagcgggactccttcatctatagcacgtggctggaggacagtgtcagcaccactagtgggggcagctccccagacgccggcaagttgggggaccctgcgtgtcccgagatcaagatccagctggaagcatctgagcagcacatgccccagctgggctgtagccggggcaacccctctgaaggtgaaactggacaatgaggcacagaagcacaaggggagaggtgccgtggtaaagcccagggagatacaccctctggcctgaagacaacaccaaggcggtgggacttgccagggcactcgccacgcaaccacggcaacacaaagggaggaatagcaggaacaagaagaaacaacgggcagagtgaacagacagatagccacccgccaatgataggagcggagccagcacgcaaacaagcagcaaagcacagagacccacgaaagaaaaacaaaaaacagcacagacagaagggggagaaagaaaacagacagaaacaaagagaagaagaaaacgacaagaaga

SEQ ID NO: 317492 - DNA, 630 bp, Homo sapiens
gattcaaaggcagggtggaaatctttagatggttattaagaaacaaagaataaaatggaaactgatggtgttaaaacaaagatcgttgttgtttttttttgagatagggtcccactctgtcacccaggttagagtgcagtgatgcaatcacggctaactgcagcctcaccctaccctgcttcttgaggtccctggagccccaggtgggctgaggggcagggagccggctgtgcccagtatgcctcctggaccctccagttctgccacaggtctgccgatgccctgtccactgcctacacatgacagacaagtaaccccctcatgggggatggggacctacctggctcctcagccagcacccagcttaacccctgccatcccatgctgggccctccaggccaagagtctcagctggccgagagtccaggccttgcctcccccgaccgccatggagggggcagcccggcacagctgctgggagcccttgtgtgtctggtcacactttttaggcgtcacgccaaaggccagcctcctggccccaatacccattttggaagcccctgtggccgtgtggatgtcggtaacagttgtataaaataaattctatttatcgctattgtaaaaaaaaaa

SEQ ID NO: 317493 - DNA, 867 bp, Homo sapiens
  misc_feature (1)..(1): n is a, c, g, or t
ngggagctcagcgctgcggggcccggacccgggcgcgcgcgggccaggagccggctgggccagctgaagtgccgccgggcgggggccgggccgggccgcgctcaggatggcacagctgcggcccgcggtgccacccggccgtccgcggaggggctcgctgcccgcgggggccagctggcagaacacagatctatttgagatgattgagaagatgcagggaagcaggatggatgaacaacgctgctccttcccgccgcccctcaaaacagaggaggactacattccatacccgagcgtgcacgaggtcttggggcgagaaggacccttccccctcatcctgctgccccagtttgggggctactggattgagggcaccaaccacgaaatcaccagcatccccgagacagagccactgcagtcgcccacaaccaaggtgaagctcgagtgcaaccccacagcccgcatctaccggaagcactttctcggcaaggagcatttcaattactactcactggacgctgccctcggccaccttgtcttctcactcaagtacgatgtcatcggggaccaagagcacctgcggctgctgctcaggaccaagtgccggacataccatgatgtcatccccatctcctgcctcaccgagttccctaatgttgtccagatggcaaagttggtgtgtgaagacgtcaatgtggatcggttctatcctgtgctctaccccaaggtatggctggatctgggcacagctcactgagggtgggtgagtaactggaagactgagcatttattaagcaccttctgtgtgccagatactttcccaaggttctctcatttaatcctcacaataaccctgtgaagtccaca

SEQ ID NO: 317494 - DNA, 365 bp, Homo sapiens
gcggccgcgggcaccagagtgccgagcccaggacgcccccggcccaggcccttgggtgagtgcgccccgccagggctgcggccctggaaaggggaaggggacagaggtgtccagactcccgtcggctcgcagcgaagaccccgcgcgggcgggcggggacggagggtgggggcgaacgcgtgggggacccgggtctccaggggcgaggggtgggcgcagctgggctcgcgcagcccggtcttgacagcagctggagaagtggggggaggcctggactgagccggctgaacccccagcctgttggacttggtccaggccgcggccagggggctttggtcccacccccctgggtgggtggggagtcc

SEQ ID NO: 317495 - DNA, 3297 bp, Homo sapiens
agcagagctgcagcggcggccgcgggcaccagagtgccgagcccaggacgcccccggcccaggcccttggggtggacaagtccttcacttctcgccggagtgtgtggaggagcgatgggcagaaccagcacttccctcaggcactagacctgtcacgagtgaacttagttccctcctatactccttcactctaccctaagaacacagatctatttgagatgattgagaagatgcagggaagcaggatggatgaacaacgctgctccttcccgccgcccctcaaaacagaggaggactacattccatacccgagcgtgcacgaggtcttggggcgagaaggacccttccccctcatcctgctgccccagtttgggggctactggattgagggcaccaaccacgaaatcaccagcatccccgagacagagccactgcagtcgcccacaaccaaggtgaagctcgagtgcaaccccacagcccgcatctaccggaagcactttctcggcaaggagcatttcaattactactcactggacgctgccctcggccaccttgtcttctcactcaagtacgatgtcatcggggaccaagagcacctgcggctgctgctcaggaccaagtgccggacataccatgatgtcatccccatctcctgcctcaccgagttccctaatgttgtccagatggcaaagttggtgtgtgaagacgtcaatgtggatcggttctatcctgtgctctaccccaaggcttcccggctcatcgtcacctttgacgagcatgtcatcagcaataacttcaagtttggcgtcatttatcagaagcttgggcagacctccgaggaagaactcttcagcaccaatgaggaaagtcccgctttcgtggagttccttgaatttcttggccagaaggtcaaactgcaggactttaaggggttccgaggaggcctggacgtgacccacgggcagacggggaccgaatctgtgtactgcaacttccgcaacaaggagatcatgtttcacgtgtccaccaagctgccatacacggaaggggacgcccagcagttgcagcggaagcggcacatcgggaacgacatcgtggctgtggtcttccaggatgagaacactcctttcgtgcccgacatgatcgcgtccaacttcctgcatgcctacgtcgtggtgcaggctgagggcgggggccctgatggccccctctacaaggtctctgtcactgcaagagatgatgtgcccttctttggaccccccctcccggaccccgctgtgttcaggaaggggcctgagttccaggaatttttgctgacaaagctgatcaatgctgaatatgcctgctacaaggcagagaagtttgccaaactggaggagcggacgcgggccgccctcctggagacgctctatgaggaactacacatccacagccagtccatgatgggcttgggcggcgacgaggacaagatggagaatggcagtgggggcggcggcttctttgagtctttcaagcgggtcatccggagccgcagccagtccatggatgccatggggctgagcaacaagaagcccaacaccgtgtccaccagccacagcgggagcttcgcgcccaacaaccccgacctggccaaggcggctggaatatcactgattgtccctgggaagagccccacgaggaagaagtcgggcccgttcggctcccgccgcagcagcgccattggcatcgagaacatacaggaggtgcaggagaagagggagagccctccggctggtcagaagaccccagacagcgggcacgtctcacaggagcccaagtcggagaactcatccactcagagctccccagagatgcccacgaccaagaacagagcggagaccgcagcgcagagagcagaggcgctcaaggacttctcccgctcctcgtccagtgccagcagcttcgccagcgtggtggaggagacggagggtgtggacggagaggacacaggcctggagagcgtgtcatcctcaggaacaccccacaagcgggactccttcatctatagcacgtggctggaggacagtgtcagcaccactagtgggggcagctccccaggcccctctcgatcaccccacccagacgccggcaagttgggggaccctgcgtgtcccgagatcaagatccagctggaagcatctgagcagcacatgccccagctgggctgttagccgggccaccccctctgaaggtgaaactgagcagatgaggccacagaagcacaaggggaaggtgccgtgtcaagcccaggcagacgagacctctgccctgaagaccaacaccagcccgtgggctgccccctgcctccccaccctccccatggcccacccatctgggctgtctctgcagggcagagccgtccagacctgggatcagggaagctgctggcatcgtccccacccccagcctgggggtctgggctggggcagggattgctcagtggaagcaggactgggggtctggcttgccccctccctgggcctccatcacccctgagcatccctctggactcagagggaacaaggtgggagagagagtttgagacagctccgtgtggagagcttagcccctggaggcagcacaaggaggatgtgatatgtgggggagtgagcactgggttgggagccgggtcctggtttccaatttgggttctgctgtgtgactctgggcaagtcactctccctctctgggcatgtctgctacaaatggacaagattatttcagaggtcactgaagactgtgattacatgcacctgccttagaaggtaggattttcttcccagggacctcctatcaccctaccctgcttcttgaggtccctggagccccaggtgggctgaggggcagggagccggctgtgcccagtatgcctcctggaccctccagttctgccacaggtctgccgatgccctgtccactgcctacacatgacagacaagtaaccccctcatgggggatggggacctacctggctcctcagccagcacccagcttaacccctgccatcccatgctgggccctccaggccaagagtctcagctggccgagagtccaggccttgcctcccccgaccgccatggagggggcagcccggcacagctgctgggagcccttgtgtgtctggtcacactttttaggcgtcacgccaaaggccagcctcctggccccaatacccattttggaagcccctgtggccgtgtggatgtcggtaacagttgtataaaataaattctatttatcgctattgtaaaaaaaaaa

SEQ ID NO: 317496 - DNA, 449 bp, Homo sapiens
agcagagctgcagcggcggccgcgggcaccagagtgccgagcccaggacgcccccggcccaggcccttggggtttggtgccagctgcggggcgcctgggcttggggaagaaaccttgtgtacgcacacctgcacacacacacagtctccggaggttaatacctctgccaaccgaggccaccctccctcggacccccattcggaagaagcagacccaagttcgaattctgacattgccactgagcagccgtacaacttttgggtggacaagtccttcacttctcgccggagtgtgtggaggagcgatgggcagaaccagcacttccctcaggcactagacctgtcacgagtgaacttagttccctcctatactccttcactctaccctaagctatttcacctcttggaaccggcttctcatctgtataatggagatgacatttgtacctc

SEQ ID NO: 317497 - DNA, 4402 bp, Homo sapiens
agcagagctgcagcggcggccgcgggcaccagagtgccgagcccaggacgcccccggcccaggcccttgggttaatacctctgccaaccgaggccaccctccctcggacccccattcggaagaagcagacccaagttcgaattctgacattgccactgagcagccgtacaacttttgggtggacaagtccttcacttctcgccggagtgtgtggaggagcgatgggcagaaccagcacttccctcaggcactagacctgtcacgagtgaacttagttccctcctatactccttcactctaccctaagaacacagatctatttgagatgattgagaagatgcagggaagcaggatggatgaacaacgctgctccttcccgccgcccctcaaaacagaggaggactacattccatacccgagcgtgcacgaggtcttggggcgagaaggacccttccccctcatcctgctgccccagtttgggggctactggattgagggcaccaaccacgaaatcaccagcatccccgagacagagccactgcagtcgcccacaaccaaggtgaagctcgagtgcaaccccacagcccgcatctaccggaagcactttctcggcaaggagcatttcaattactactcactggacgctgccctcggccaccttgtcttctcactcaagtacgatgtcatcggggaccaagagcacctgcggctgctgctcaggaccaagtgccggacataccatgatgtcatccccatctcctgcctcaccgagttccctaatgttgtccagatggcaaagttggtgtgtgaagacgtcaatgtggatcggttctatcctgtgctctaccccaaggcttcccggctcatcgtcacctttgacgagcatgtcatcagcaataacttcaagtttggcgtcatttatcagaagcttgggcagacctccgaggaagaactcttcagcaccaatgaggaaagtcccgctttcgtggagttccttgaatttcttggccagaaggtcaaactgcaggactttaaggggttccgaggaggcctggacgtgacccacgggcagacggggaccgaatctgtgtactgcaacttccgcaacaaggagatcatgtttcacgtgtccaccaagctgccatacacggaaggggacgcccagcagttgcagcggaagcggcacatcgggaacgacatcgtggctgtggtcttccaggatgagaacactcctttcgtgcccgacatgatcgcgtccaacttcctgcatgcctacgtcgtggtgcaggctgagggcgggggccctgatggccccctctacaaggtctctgtcactgcaagagatgatgtgcccttctttggaccccccctcccggaccccgctgtgttcaggaaggggcctgagttccaggaatttttgctgacaaagctgatcaatgctgaatatgcctgctacaaggcagagaagtttgccaaactggaggagcggacgcgggccgccctcctggagacgctctatgaggaactacacatccacagccagtccatgatgggcttgggcggcgacgaggacaagatggagaatggcagtgggggcggcggcttctttgagtctttcaagcgggtcatccggagccgcagccagtccatggatgccatggggctgagcaacaagaagcccaacaccgtgtccaccagccacagcgggagcttcgcgcccaacaaccccgacctggccaaggcggctggaatatcattgcttattcctgggaaaagtgcgagtagattcggacgccggggcagtgccataggcataggaaccgtggaagaggttgtcgtccgcggggccgccggctctggaggctgcctgcacgcgctgttctctgctcgctctcaggacggaggccatattggggacgttgcccctctgcccccgggacaggccccagggcgtgcgggatggagtggcggcagctccgatggcactcagcacctgctttggggcctggtacctgtgccagagccagtgcccctcaccaggggcttctggccctgccttggcccctgggaccctggcccagtccctgccaggatccggtacccaaaggccctacacccagccgcacgtcccccaatatcgccggtctgcatggagcgccatccctctcctctgccctgactcctcctccccgccacgaagtgacctggggtcctaccccttcctgcctccagagaagctgggggcgggcttctggggcctggggcatcccagcacagtgtgtgggaagctgggggagtcttccagctgctgggccagaacctcccccagccaatttggaggttccggggaggggccctagctggcacggggtgggacttgggttgctacactgccctctgaccactgcccttaggctgcagatcccacagagccctggggggcggggagcggtagccattctgaggactcggcctcctcccaccctagccccctcaggatgctgtcctaatcctgggccagtattgacgtgcagtcctgccgtgtgagctcgggagagccccttgccctcctggggactgtttccctttcgtaaactgggaggctgtctctgggaatggatatcttctctcgttctttcttgctcatcaactctgcttcagggcctggggcagcaggatccccagaggggatgtgggggggcactggggctcccaggtaaggtggcactgagttggggcctctccccacagtcactgattgtccctgggaagagccccacgaggaagaagtcgggcccgttcggctcccgccgcagcagcgccattggcatcgagaacatacaggaggtgcaggagaagagggagagccctccggctggtcagaagaccccagacagcgggcacgtctcacaggagcccaagtcggagaactcatccactcagagctccccagagatgcccacgaccaagaacagagcggagaccgcagcgcagagagcagaggcgctcaaggacttctcccgctcctcgtccagtgccagcagcttcgccagcgtggtggaggagacggagggtgtggacggagaggacacaggcctggagagcgtgtcatcctcaggaacaccccacaagcgggactccttcatctatagcacgtggctggaggacagtgtcagcaccactagtgggggcagctccccaggcccctctcgatcaccccacccagacgccggcaagttgggggaccctgcgtgtcccgagatcaagatccagctggaagcatctgagcagcacatgccccagctgggctgttagccgggccaccccctctgaaggtgaaactgagcagatgaggccacagaagcacaaggggaaggtgccgtgtcaagcccaggcagacgagacctctgccctgaagaccaacaccagcccgtgggctgccccctgcctccccaccctccccatggcccacccatctgggctgtctctgcagggcagagccgtccagacctgggatcagggaagctgctggcatcgtccccacccccagcctgggggtctgggctggggcagggattgctcagtggaagcaggactgggggtctggcttgccccctccctgggcctccatcacccctgagcatccctctggactcagagggaacaaggtgggagagagagtttgagacagctccgtgtggagagcttagcccctggaggcagcacaaggaggatgtgatatgtgggggagtgagcactgggttgggagccgggtcctggtttccaatttgggttctgctgtgtgactctgggcaagtcactctccctctctgggcatgtctgctacaaatggacaagattatttcagaggtcactgaagactgtgattacatgcacctgccttagaaggtaggattttcttcccagggacctcctatcaccctaccctgcttcttgaggtccctggagccccaggtgggctgaggggcagggagccggctgtgcccagtatgcctcctggaccctccagttctgccacaggtctgccgatgccctgtccactgcctacacatgacagacaagtaaccccctcatgggggatggggacctacctggctcctcagccagcacccagcttaacccctgccatcccatgctgggccctccaggccaagagtctcagctggccgagagtccaggccttgcctcccccgaccgccatggagggggcagcccggcacagctgctgggagcccttgtgtgtctggtcacactttttaggcgtcacgccaaaggccagcctcctggccccaatacccattttggaagcccctgtggccgtgtggatgtcggtaacagttgtataaaataaattctatttatcgctattgtaaaaaaaaaa

SEQ ID NO: 317498 - DNA, 3356 bp, Homo sapiens
  misc_feature (1)..(1): n is a, c, g, or t
ngggagctcagcgctgcggggcccggacccgggcgcgcgcgggccaggagccggctgggccagctgaagtgccgccgggcgggggccgggccgggccgcgctcaggatggcacagctgcggcccgcggtgccacccggccgtccgcggaggggctcgctgcccgcgggggccagctggcagaacacagatctatttgagatgattgagaagatgcagggaagcaggatggatgaacaacgctgctccttcccgccgcccctcaaaacagaggaggactacattccatacccgagcgtgcacgaggtcttggggcgagaaggacccttccccctcatcctgctgccccagtttgggggctactggattgagggcaccaaccacgaaatcaccagcatccccgagacagagccactgcagtcgcccacaaccaaggtgaagctcgagtgcaaccccacagcccgcatctaccggaagcactttctcggcaaggagcatttcaattactactcactggacgctgccctcggccaccttgtcttctcactcaagtacgatgtcatcggggaccaagagcacctgcggctgctgctcaggaccaagtgccggacataccatgatgtcatccccatctcctgcctcaccgagttccctaatgttgtccagatggcaaagttggtgtgtgaagacgtcaatgtggatcggttctatcctgtgctctaccccaaggcttcccggctcatcgtcacctttgacgagcatgtcatcagcaataacttcaagtttggcgtcatttatcagaagcttgggcagacctccgaggaagaactcttcagcaccaatgaggaaagtcccgctttcgtggagttccttgaatttcttggccagaaggtcaaactgcaggactttaaggggttccgaggaggcctggacgtgacccacgggcagacggggaccgaatctgtgtactgcaacttccgcaacaaggagatcatgtttcacgtgtccaccaagctgccatacacggaaggggacgcccagcagttgcagcggaagcggcacatcgggaacgacatcgtggctgtggtcttccaggatgagaacactcctttcgtgcccgacatgatcgcgtccaacttcctgcatgcctacgtcgtggtgcaggctgagggcgggggccctgatggccccctctacaaggtctctgtcactgcaagagatgatgtgcccttctttggaccccccctcccggaccccgctgtgttcaggaaggggcctgagttccaggaatttttgctgacaaagctgatcaatgctgaatatgcctgctacaaggcagagaagtttgccaaactggaggagcggacgcgggccgccctcctggagacgctctatgaggaactacacatccacagccagtccatgatgggcttgggcggcgacgaggacaagatggagaatggcagtgggggcggcggcttctttgagtctttcaagcgggtcatccggagccgcagccagtccatggatgccatggggctgagcaacaagaagcccaacaccgtgtccaccagccacagcgggagcttcgcgcccaacaaccccgacctggccaaggcggctggaatatcattgcttattcctgggaaaagtgcgagtagattcggacgccggggcagtgccataggcataggaaccgtggaagagtcactgattgtccctgggaagagccccacgaggaagaagtcgggcccgttcggctcccgccgcagcagcgccattggcatcgagaacatacaggaggtgcaggagaagagggagagccctccggctggtcagaagaccccagacagcgggcacgtctcacaggagcccaagtcggagaactcatccactcagagctccccagagatgcccacgaccaagaacagagcggagaccgcagcgcagagagcagaggcgctcaaggacttctcccgctcctcgtccagtgccagcagcttcgccagcgtggtggaggagacggagggtgtggacggagaggacacaggcctggagagcgtgtcatcctcaggaacaccccacaagcgggactccttcatctatagcacgtggctggaggacagtgtcagcaccactagtgggggcagctccccaggcccctctcgatcaccccacccagacgccggcaagttgggggaccctgcgtgtcccgagatcaagatccagctggaagcatctgagcagcacatgccccagctgggctgttagccgggccaccccctctgaaggtgaaactgagcagatgaggccacagaagcacaaggggaaggtgccgtgtcaagcccaggcagacgagacctctgccctgaagaccaacaccagcccgtgggctgccccctgcctccccaccctccccatggcccacccatctgggctgtctctgcagggcagagccgtccagacctgggatcagggaagctgctggcatcgtccccacccccagcctgggggtctgggctggggcagggattgctcagtggaagcaggactgggggtctggcttgccccctccctgggcctccatcacccctgagcatccctctggactcagagggaacaaggtgggagagagagtttgagacagctccgtgtggagagcttagcccctggaggcagcacaaggaggatgtgatatgtgggggagtgagcactgggttgggagccgggtcctggtttccaatttgggttctgctgtgtgactctgggcaagtcactctccctctctgggcatgtctgctacaaatggacaagattatttcagaggtcactgaagactgtgattacatgcacctgccttagaaggtaggattttcttcccagggacctcctatcaccctaccctgcttcttgaggtccctggagccccaggtgggctgaggggcagggagccggctgtgcccagtatgcctcctggaccctccagttctgccacaggtctgccgatgccctgtccactgcctacacatgacagacaagtaaccccctcatgggggatggggacctacctggctcctcagccagcacccagcttaacccctgccatcccatgctgggccctccaggccaagagtctcagctggccgagagtccaggccttgcctcccccgaccgccatggagggggcagcccggcacagctgctgggagcccttgtgtgtctggtcacactttttaggcgtcacgccaaaggccagcctcctggccccaatacccattttggaagcccctgtggccgtgtggatgtcggtaacagttgtataaaataaattctatttatcgctattgtaaaaaaaaaa

SEQ ID NO: 317499 - DNA, 4284 bp, Homo sapiens
ggcggcggcggcaccatgagcggccggaagcgcagcttcaccttcggggcctacggcggggtggacaagtccttcacttctcgccggagtgtgtggaggagcgatgggcagaaccagcacttccctcaggcactagacctgtcacgagtgaacttagttccctcctatactccttcactctaccctaagaacacagatctatttgagatgattgagaagatgcagggaagcaggatggatgaacaacgctgctccttcccgccgcccctcaaaacagaggaggactacattccatacccgagcgtgcacgaggtcttggggcgagaaggacccttccccctcatcctgctgccccagtttgggggctactggattgagggcaccaaccacgaaatcaccagcatccccgagacagagccactgcagtcgcccacaaccaaggtgaagctcgagtgcaaccccacagcccgcatctaccggaagcactttctcggcaaggagcatttcaattactactcactggacgctgccctcggccaccttgtcttctcactcaagtacgatgtcatcggggaccaagagcacctgcggctgctgctcaggaccaagtgccggacataccatgatgtcatccccatctcctgcctcaccgagttccctaatgttgtccagatggcaaagttggtgtgtgaagacgtcaatgtggatcggttctatcctgtgctctaccccaaggcttcccggctcatcgtcacctttgacgagcatgtcatcagcaataacttcaagtttggcgtcatttatcagaagcttgggcagacctccgaggaagaactcttcagcaccaatgaggaaagtcccgctttcgtggagttccttgaatttcttggccagaaggtcaaactgcaggactttaaggggttccgaggaggcctggacgtgacccacgggcagacggggaccgaatctgtgtactgcaacttccgcaacaaggagatcatgtttcacgtgtccaccaagctgccatacacggaaggggacgcccagcagttgcagcggaagcggcacatcgggaacgacatcgtggctgtggtcttccaggatgagaacactcctttcgtgcccgacatgatcgcgtccaacttcctgcatgcctacgtcgtggtgcaggctgagggcgggggccctgatggccccctctacaaggtctctgtcactgcaagagatgatgtgcccttctttggaccccccctcccggaccccgctgtgttcaggaaggggcctgagttccaggaatttttgctgacaaagctgatcaatgctgaatatgcctgctacaaggcagagaagtttgccaaactggaggagcggacgcgggccgccctcctggagacgctctatgaggaactacacatccacagccagtccatgatgggcttgggcggcgacgaggacaagatggagaatggcagtgggggcggcggcttctttgagtctttcaagcgggtcatccggagccgcagccagtccatggatgccatggggctgagcaacaagaagcccaacaccgtgtccaccagccacagcgggagcttcgcgcccaacaaccccgacctggccaaggcggctggaatatcattgcttattcctgggaaaagtgcgagtagattcggacgccggggcagtgccataggcataggaaccgtggaagaggttgtcgtccgcggggccgccggctctggaggctgcctgcacgcgctgttctctgctcgctctcaggacggaggccatattggggacgttgcccctctgcccccgggacaggccccagggcgtgcgggatggagtggcggcagctccgatggcactcagcacctgctttggggcctggtacctgtgccagagccagtgcccctcaccaggggcttctggccctgccttggcccctgggaccctggcccagtccctgccaggatccggtacccaaaggccctacacccagccgcacgtcccccaatatcgccggtctgcatggagcgccatccctctcctctgccctgactcctcctccccgccacgaagtgacctggggtcctaccccttcctgcctccagagaagctgggggcgggcttctggggcctggggcatcccagcacagtgtgtgggaagctgggggagtcttccagctgctgggccagaacctcccccagccaatttggaggttccggggaggggccctagctggcacggggtgggacttgggttgctacactgccctctgaccactgcccttaggctgcagatcccacagagccctggggggcggggagcggtagccattctgaggactcggcctcctcccaccctagccccctcaggatgctgtcctaatcctgggccagtattgacgtgcagtcctgccgtgtgagctcgggagagccccttgccctcctggggactgtttccctttcgtaaactgggaggctgtctctgggaatggatatcttctctcgttctttcttgctcatcaactctgcttcagggcctggggcagcaggatccccagaggggatgtgggggggcactggggctcccaggtaaggtggcactgagttggggcctctccccacagtcactgattgtccctgggaagagccccacgaggaagaagtcgggcccgttcggctcccgccgcagcagcgccattggcatcgagaacatacaggaggtgcaggagaagagggagagccctccggctggtcagaagaccccagacagcgggcacgtctcacaggagcccaagtcggagaactcatccactcagagctccccagagatgcccacgaccaagaacagagcggagaccgcagcgcagagagcagaggcgctcaaggacttctcccgctcctcgtccagtgccagcagcttcgccagcgtggtggaggagacggagggtgtggacggagaggacacaggcctggagagcgtgtcatcctcaggaacaccccacaagcgggactccttcatctatagcacgtggctggaggacagtgtcagcaccactagtgggggcagctccccaggcccctctcgatcaccccacccagacgccggcaagttgggggaccctgcgtgtcccgagatcaagatccagctggaagcatctgagcagcacatgccccagctgggctgttagccgggccaccccctctgaaggtgaaactgagcagatgaggccacagaagcacaaggggaaggtgccgtgtcaagcccaggcagacgagacctctgccctgaagaccaacaccagcccgtgggctgccccctgcctccccaccctccccatggcccacccatctgggctgtctctgcagggcagagccgtccagacctgggatcagggaagctgctggcatcgtccccacccccagcctgggggtctgggctggggcagggattgctcagtggaagcaggactgggggtctggcttgccccctccctgggcctccatcacccctgagcatccctctggactcagagggaacaaggtgggagagagagtttgagacagctccgtgtggagagcttagcccctggaggcagcacaaggaggatgtgatatgtgggggagtgagcactgggttgggagccgggtcctggtttccaatttgggttctgctgtgtgactctgggcaagtcactctccctctctgggcatgtctgctacaaatggacaagattatttcagaggtcactgaagactgtgattacatgcacctgccttagaaggtaggattttcttcccagggacctcctatcaccctaccctgcttcttgaggtccctggagccccaggtgggctgaggggcagggagccggctgtgcccagtatgcctcctggaccctccagttctgccacaggtctgccgatgccctgtccactgcctacacatgacagacaagtaaccccctcatgggggatggggacctacctggctcctcagccagcacccagcttaacccctgccatcccatgctgggccctccaggccaagagtctcagctggccgagagtccaggccttgcctcccccgaccgccatggagggggcagcccggcacagctgctgggagcccttgtgtgtctggtcacactttttaggcgtcacgccaaaggccagcctcctggccccaatacccattttggaagcccctgtggccgtgtggatgtcggtaacagttgtataaaataaattctatttatcgctattgtaaaaaaaaaa

SEQ ID NO: 317500 - DNA, 4252 bp, Homo sapiens
  misc_feature (1)..(1): n is a, c, g, or t
ngggagctcagcgctgcggggcccggacccgggcgcgcgcgggccaggagccggctgggccagctgaagtgccgccgggcgggggccgggccgggccgcgctcaggatggcacagctgcggcccgcggtgccacccggccgtccgcggaggggctcgctgcccgcgggggccagctggcagaacacagatctatttgagatgattgagaagatgcagggaagcaggatggatgaacaacgctgctccttcccgccgcccctcaaaacagaggaggactacattccatacccgagcgtgcacgaggtcttggggcgagaaggacccttccccctcatcctgctgccccagtttgggggctactggattgagggcaccaaccacgaaatcaccagcatccccgagacagagccactgcagtcgcccacaaccaaggtgaagctcgagtgcaaccccacagcccgcatctaccggaagcactttctcggcaaggagcatttcaattactactcactggacgctgccctcggccaccttgtcttctcactcaagtacgatgtcatcggggaccaagagcacctgcggctgctgctcaggaccaagtgccggacataccatgatgtcatccccatctcctgcctcaccgagttccctaatgttgtccagatggcaaagttggtgtgtgaagacgtcaatgtggatcggttctatcctgtgctctaccccaaggcttcccggctcatcgtcacctttgacgagcatgtcatcagcaataacttcaagtttggcgtcatttatcagaagcttgggcagacctccgaggaagaactcttcagcaccaatgaggaaagtcccgctttcgtggagttccttgaatttcttggccagaaggtcaaactgcaggactttaaggggttccgaggaggcctggacgtgacccacgggcagacggggaccgaatctgtgtactgcaacttccgcaacaaggagatcatgtttcacgtgtccaccaagctgccatacacggaaggggacgcccagcagttgcagcggaagcggcacatcgggaacgacatcgtggctgtggtcttccaggatgagaacactcctttcgtgcccgacatgatcgcgtccaacttcctgcatgcctacgtcgtggtgcaggctgagggcgggggccctgatggccccctctacaaggtctctgtcactgcaagagatgatgtgcccttctttggaccccccctcccggaccccgctgtgttcaggaaggggcctgagttccaggaatttttgctgacaaagctgatcaatgctgaatatgcctgctacaaggcagagaagtttgccaaactggaggagcggacgcgggccgccctcctggagacgctctatgaggaactacacatccacagccagtccatgatgggcttgggcggcgacgaggacaagatggagaatggcagtgggggcggcggcttctttgagtctttcaagcgggtcatccggagccgcagccagtccatggatgccatggggctgagcaacaagaagcccaacaccgtgtccaccagccacagcgggagcttcgcgcccaacaaccccgacctggccaaggcggctggaatatcattgcttattcctgggaaaagtgcgagtagattcggacgccggggcagtgccataggcataggaaccgtggaagaggttgtcgtccgcggggccgccggctctggaggctgcctgcacgcgctgttctctgctcgctctcaggacggaggccatattggggacgttgcccctctgcccccgggacaggccccagggcgtgcgggatggagtggcggcagctccgatggcactcagcacctgctttggggcctggtacctgtgccagagccagtgcccctcaccaggggcttctggccctgccttggcccctgggaccctggcccagtccctgccaggatccggtacccaaaggccctacacccagccgcacgtcccccaatatcgccggtctgcatggagcgccatccctctcctctgccctgactcctcctccccgccacgaagtgacctggggtcctaccccttcctgcctccagagaagctgggggcgggcttctggggcctggggcatcccagcacagtgtgtgggaagctgggggagtcttccagctgctgggccagaacctcccccagccaatttggaggttccggggaggggccctagctggcacggggtgggacttgggttgctacactgccctctgaccactgcccttaggctgcagatcccacagagccctggggggcggggagcggtagccattctgaggactcggcctcctcccaccctagccccctcaggatgctgtcctaatcctgggccagtattgacgtgcagtcctgccgtgtgagctcgggagagccccttgccctcctggggactgtttccctttcgtaaactgggaggctgtctctgggaatggatatcttctctcgttctttcttgctcatcaactctgcttcagggcctggggcagcaggatccccagaggggatgtgggggggcactggggctcccaggtaaggtggcactgagttggggcctctccccacagtcactgattgtccctgggaagagccccacgaggaagaagtcgggcccgttcggctcccgccgcagcagcgccattggcatcgagaacatacaggaggtgcaggagaagagggagagccctccggctggtcagaagaccccagacagcgggcacgtctcacaggagcccaagtcggagaactcatccactcagagctccccagagatgcccacgaccaagaacagagcggagaccgcagcgcagagagcagaggcgctcaaggacttctcccgctcctcgtccagtgccagcagcttcgccagcgtggtggaggagacggagggtgtggacggagaggacacaggcctggagagcgtgtcatcctcaggaacaccccacaagcgggactccttcatctatagcacgtggctggaggacagtgtcagcaccactagtgggggcagctccccagacgccggcaagttgggggaccctgcgtgtcccgagatcaagatccagctggaagcatctgagcagcacatgccccagctgggctgttagccgggccaccccctctgaaggtgaaactgagcagatgaggccacagaagcacaaggggaaggtgccgtgtcaagcccaggcagacgagacctctgccctgaagaccaacaccagcccgtgggctgccccctgcctccccaccctccccatggcccacccatctgggctgtctctgcagggcagagccgtccagacctgggatcagggaagctgctggcatcgtccccacccccagcctgggggtctgggctggggcagggattgctcagtggaagcaggactgggggtctggcttgccccctccctgggcctccatcacccctgagcatccctctggactcagagggaacaaggtgggagagagagtttgagacagctccgtgtggagagcttagcccctggaggcagcacaaggaggatgtgatatgtgggggagtgagcactgggttgggagccgggtcctggtttccaatttgggttctgctgtgtgactctgggcaagtcactctccctctctgggcatgtctgctacaaatggacaagattatttcagaggtcactgaagactgtgattacatgcacctgccttagaaggtaggattttcttcccagggacctcctatcaccctaccctgcttcttgaggtccctggagccccaggtgggctgaggggcagggagccggctgtgcccagtatgcctcctggaccctccagttctgccacaggtctgccgatgccctgtccactgcctacacatgacagacaagtaaccccctcatgggggatggggacctacctggctcctcagccagcacccagcttaacccctgccatcccatgctgggccctccaggccaagagtctcagctggccgagagtccaggccttgcctcccccgaccgccatggagggggcagcccggcacagctgctgggagcccttgtgtgtctggtcacactttttaggcgtcacgccaaaggccagcctcctggccccaatacccattttggaagcccctgtggccgtgtggatgtcggtaacagttgtataaaataaattctatttatcgctattgtaaaaaaaaaa

SEQ ID NO: 317501 - DNA, 4104 bp, Homo sapiens
  misc_feature (1)..(1): n is a, c, g, or t
ngggagctcagcgctgcggggcccggacccgggcgcgcgcgggccaggagccggctgggccagctgaagtgccgccgggcgggggccgggccgggccgcgctcaggatggcacagctgcggcccgcggtgccacccggccgtccgcggaggggctcgctgcccgcgggggccagctggcagaacacagatctatttgagatgattgagaagatgcagggaagcaggatggatgaacaacgctgctccttcccgccgcccctcaaaacagaggaggactacattccatacccgagcgtgcacgaggtcttggggcgagaaggacccttccccctcatcctgctgccccagtttgggggctactggattgagggcaccaaccacgaaatcaccagcatccccgagacagagccactgcagtcgcccacaaccaaggtgaagctcgagtgcaaccccacagcccgcatctaccggaagcactttctcggcaaggagcatttcaattactactcactggacgctgccctcggccaccttgtcttctcactcaagtacgatgtcatcggggaccaagagcacctgcggctgctgctcaggaccaagtgccggacataccatgatgtcatccccatctcctgcctacctccgaggaagaactcttcagcaccaatgaggaaagtcccgctttcgtggagttccttgaatttcttggccagaaggtcaaactgcaggactttaaggggttccgaggaggcctggacgtgacccacgggcagacggggaccgaatctgtgtactgcaacttccgcaacaaggagatcatgtttcacgtgtccaccaagctgccatacacggaaggggacgcccagcagttgcagcggaagcggcacatcgggaacgacatcgtggctgtggtcttccaggatgagaacactcctttcgtgcccgacatgatcgcgtccaacttcctgcatgcctacgtcgtggtgcaggctgagggcgggggccctgatggccccctctacaaggtctctgtcactgcaagagatgatgtgcccttctttggaccccccctcccggaccccgctgtgttcaggaaggggcctgagttccaggaatttttgctgacaaagctgatcaatgctgaatatgcctgctacaaggcagagaagtttgccaaactggaggagcggacgcgggccgccctcctggagacgctctatgaggaactacacatccacagccagtccatgatgggcttgggcggcgacgaggacaagatggagaatggcagtgggggcggcggcttctttgagtctttcaagcgggtcatccggagccgcagccagtccatggatgccatggggctgagcaacaagaagcccaacaccgtgtccaccagccacagcgggagcttcgcgcccaacaaccccgacctggccaaggcggctggaatatcattgcttattcctgggaaaagtgcgagtagattcggacgccggggcagtgccataggcataggaaccgtggaagaggttgtcgtccgcggggccgccggctctggaggctgcctgcacgcgctgttctctgctcgctctcaggacggaggccatattggggacgttgcccctctgcccccgggacaggccccagggcgtgcgggatggagtggcggcagctccgatggcactcagcacctgctttggggcctggtacctgtgccagagccagtgcccctcaccaggggcttctggccctgccttggcccctgggaccctggcccagtccctgccaggatccggtacccaaaggccctacacccagccgcacgtcccccaatatcgccggtctgcatggagcgccatccctctcctctgccctgactcctcctccccgccacgaagtgacctggggtcctaccccttcctgcctccagagaagctgggggcgggcttctggggcctggggcatcccagcacagtgtgtgggaagctgggggagtcttccagctgctgggccagaacctcccccagccaatttggaggttccggggaggggccctagctggcacggggtgggacttgggttgctacactgccctctgaccactgcccttaggctgcagatcccacagagccctggggggcggggagcggtagccattctgaggactcggcctcctcccaccctagccccctcaggatgctgtcctaatcctgggccagtattgacgtgcagtcctgccgtgtgagctcgggagagccccttgccctcctggggactgtttccctttcgtaaactgggaggctgtctctgggaatggatatcttctctcgttctttcttgctcatcaactctgcttcagggcctggggcagcaggatccccagaggggatgtgggggggcactggggctcccaggtaaggtggcactgagttggggcctctccccacagtcactgattgtccctgggaagagccccacgaggaagaagtcgggcccgttcggctcccgccgcagcagcgccattggcatcgagaacatacaggaggtgcaggagaagagggagagccctccggctggtcagaagaccccagacagcgggcacgtctcacaggagcccaagtcggagaactcatccactcagagctccccagagatgcccacgaccaagaacagagcggagaccgcagcgcagagagcagaggcgctcaaggacttctcccgctcctcgtccagtgccagcagcttcgccagcgtggtggaggagacggagggtgtggacggagaggacacaggcctggagagcgtgtcatcctcaggaacaccccacaagcgggactccttcatctatagcacgtggctggaggacagtgtcagcaccactagtgggggcagctccccaggcccctctcgatcaccccacccagacgccggcaagttgggggaccctgcgtgtcccgagatcaagatccagctggaagcatctgagcagcacatgccccagctgggctgttagccgggccaccccctctgaaggtgaaactgagcagatgaggccacagaagcacaaggggaaggtgccgtgtcaagcccaggcagacgagacctctgccctgaagaccaacaccagcccgtgggctgccccctgcctccccaccctccccatggcccacccatctgggctgtctctgcagggcagagccgtccagacctgggatcagggaagctgctggcatcgtccccacccccagcctgggggtctgggctggggcagggattgctcagtggaagcaggactgggggtctggcttgccccctccctgggcctccatcacccctgagcatccctctggactcagagggaacaaggtgggagagagagtttgagacagctccgtgtggagagcttagcccctggaggcagcacaaggaggatgtgatatgtgggggagtgagcactgggttgggagccgggtcctggtttccaatttgggttctgctgtgtgactctgggcaagtcactctccctctctgggcatgtctgctacaaatggacaagattatttcagaggtcactgaagactgtgattacatgcacctgccttagaaggtaggattttcttcccagggacctcctatcaccctaccctgcttcttgaggtccctggagccccaggtgggctgaggggcagggagccggctgtgcccagtatgcctcctggaccctccagttctgccacaggtctgccgatgccctgtccactgcctacacatgacagacaagtaaccccctcatgggggatggggacctacctggctcctcagccagcacccagcttaacccctgccatcccatgctgggccctccaggccaagagtctcagctggccgagagtccaggccttgcctcccccgaccgccatggagggggcagcccggcacagctgctgggagcccttgtgtgtctggtcacactttttaggcgtcacgccaaaggccagcctcctggccccaatacccattttggaagcccctgtggccgtgtggatgtcggtaacagttgtataaaataaattctatttatcgctattgtaaaaaaaaaa

SEQ ID NO: 317502 - DNA, 3563 bp, Homo sapiens
tctagaggatccctgtctgtgtgggcgtgtggttctgggtcggtctggtgcggggctcatgcttctcacccgtgtggttctcgtgtggttctgtgctgacctccgaggaagaactcttcagcaccaatgaggaaagtcccgctttcgtggagttccttgaatttcttggccagaaggtcaaactgcaggactttaaggggttccgaggaggcctggacgtgacccacgggcagacggggaccgaatctgtgtactgcaacttccgcaacaaggagatcatgtttcacgtgtccaccaagctgccatacacggaaggggacgcccagcagttgcagcggaagcggcacatcgggaacgacatcgtggctgtggtcttccaggatgagaacactcctttcgtgcccgacatgatcgcgtccaacttcctgcatgcctacgtcgtggtgcaggctgagggcgggggccctgatggccccctctacaaggtctctgtcactgcaagagatgatgtgcccttctttggaccccccctcccggaccccgctgtgttcaggaaggggcctgagttccaggaatttttgctgacaaagctgatcaatgctgaatatgcctgctacaaggcagagaagtttgccaaactggaggagcggacgcgggccgccctcctggagacgctctatgaggaactacacatccacagccagtccatgatgggcttgggcggcgacgaggacaagatggagaatggcagtgggggcggcggcttctttgagtctttcaagcgggtcatccggagccgcagccagtccatggatgccatggggctgagcaacaagaagcccaacaccgtgtccaccagccacagcgggagcttcgcgcccaacaaccccgacctggccaaggcggctggaatatcattgcttattcctgggaaaagtgcgagtagattcggacgccggggcagtgccataggcataggaaccgtggaagaggttgtcgtccgcggggccgccggctctggaggctgcctgcacgcgctgttctctgctcgctctcaggacggaggccatattggggacgttgcccctctgcccccgggacaggccccagggcgtgcgggatggagtggcggcagctccgatggcactcagcacctgctttggggcctggtacctgtgccagagccagtgcccctcaccaggggcttctggccctgccttggcccctgggaccctggcccagtccctgccaggatccggtacccaaaggccctacacccagccgcacgtcccccaatatcgccggtctgcatggagcgccatccctctcctctgccctgactcctcctccccgccacgaagtgacctggggtcctaccccttcctgcctccagagaagctgggggcgggcttctggggcctggggcatcccagcacagtgtgtgggaagctgggggagtcttccagctgctgggccagaacctcccccagccaatttggaggttccggggaggggccctagctggcacggggtgggacttgggttgctacactgccctctgaccactgcccttaggctgcagatcccacagagccctggggggcggggagcggtagccattctgaggactcggcctcctcccaccctagccccctcaggatgctgtcctaatcctgggccagtattgacgtgcagtcctgccgtgtgagctcgggagagccccttgccctcctggggactgtttccctttcgtaaactgggaggctgtctctgggaatggatatcttctctcgttctttcttgctcatcaactctgcttcagggcctggggcagcaggatccccagaggggatgtgggggggcactggggctcccaggtaaggtggcactgagttggggcctctccccacagtcactgattgtccctgggaagagccccacgaggaagaagtcgggcccgttcggctcccgccgcagcagcgccattggcatcgagaacatacaggaggtgcaggagaagagggagagccctccggctggtcagaagaccccagacagcgggcacgtctcacaggagcccaagtcggagaactcatccactcagagctccccagagatgcccacgaccaagaacagagcggagaccgcagcgcagagagcagaggcgctcaaggacttctcccgctcctcgtccagtgccagcagcttcgccagcgtggtggaggagacggagggtgtggacggagaggacacaggcctggagagcgtgtcatcctcaggaacaccccacaagcgggactccttcatctatagcacgtggctggaggacagtgtcagcaccactagtgggggcagctccccaggcccctctcgatcaccccacccagacgccggcaagttgggggaccctgcgtgtcccgagatcaagatccagctggaagcatctgagcagcacatgccccagctgggctgttagccgggccaccccctctgaaggtgaaactgagcagatgaggccacagaagcacaaggggaaggtgccgtgtcaagcccaggcagacgagacctctgccctgaagaccaacaccagcccgtgggctgccccctgcctccccaccctccccatggcccacccatctgggctgtctctgcagggcagagccgtccagacctgggatcagggaagctgctggcatcgtccccacccccagcctgggggtctgggctggggcagggattgctcagtggaagcaggactgggggtctggcttgccccctccctgggcctccatcacccctgagcatccctctggactcagagggaacaaggtgggagagagagtttgagacagctccgtgtggagagcttagcccctggaggcagcacaaggaggatgtgatatgtgggggagtgagcactgggttgggagccgggtcctggtttccaatttgggttctgctgtgtgactctgggcaagtcactctccctctctgggcatgtctgctacaaatggacaagattatttcagaggtcactgaagactgtgattacatgcacctgccttagaaggtaggattttcttcccagggacctcctatcaccctaccctgcttcttgaggtccctggagccccaggtgggctgaggggcagggagccggctgtgcccagtatgcctcctggaccctccagttctgccacaggtctgccgatgccctgtccactgcctacacatgacagacaagtaaccccctcatgggggatggggacctacctggctcctcagccagcacccagcttaacccctgccatcccatgctgggccctccaggccaagagtctcagctggccgagagtccaggccttgcctcccccgaccgccatggagggggcagcccggcacagctgctgggagcccttgtgtgtctggtcacactttttaggcgtcacgccaaaggccagcctcctggccccaatacccattttggaagcccctgtggccgtgtggatgtcggtaacagttgtataaaataaattctatttatcgctattgtaaaaaaaaaa

SEQ ID NO: 317503 - DNA, 1856 bp, Homo sapiens
aaagcaggctgttactggtcgcggatttaaggaggcctggcccaggaggggctcggggtggacaccggctaatggggcactgtctgtggcagagcggagaccgcagcgcagagagcagaggcgctcaaggacttctcccgctcctcgtccagtgccagcagcttcgccagcgtggtggaggagacggagggtgtggacggagaggacacaggcctggagagcgtgtcatcctcaggaacaccccacaagcgggactccttcatctatagcacgtggctggaggacagtgtcagcaccactagtgggggcagctccccaggtaccaggacaaggcagcttccccacaaagcagggctaccttggggtaggagggggacagggctgggcaccagttcccatgccccatgcagtggatgtgatgtgactgcccctgacttggaggacagcgggcaggtcattgtccagcctagggtggctgggtggattggagggctggtttcttccggaagggtctcggaggataatgggggatggcaaggaagaaagttaagggtggggttggagcgcactggtgccgaccgcccacctatgcccccgtctccctggtgcctccccgcggccagtgtgaggtggctccctcctgcccccctccccaggcccctctcgatcaccccacccagacgccggcaagttgggggaccctgcgtgtcccgagatcaagatccagctggaagcatctgagcagcacatgccccagctgggctgttagccgggccaccccctctgaaggtgaaactgagcagatgaggccacagaagcacaaggggaaggtgccgtgtcaagcccaggcagacgagacctctgccctgaagaccaacaccagcccgtgggctgccccctgcctccccaccctccccatggcccacccatctgggctgtctctgcagggcagagccgtccagacctgggatcagggaagctgctggcatcgtccccacccccagcctgggggtctgggctggggcagggattgctcagtggaagcaggactgggggtctggcttgccccctccctgggcctccatcacccctgagcatccctctggactcagagggaacaaggtgggagagagagtttgagacagctccgtgtggagagcttagcccctggaggcagcacaaggaggatgtgatatgtgggggagtgagcactgggttgggagccgggtcctggtttccaatttgggttctgctgtgtgactctgggcaagtcactctccctctctgggcatgtctgctacaaatggacaagattatttcagaggtcactgaagactgtgattacatgcacctgccttagaaggtaggattttcttcccagggacctcctatcaccctaccctgcttcttgaggtccctggagccccaggtgggctgaggggcagggagccggctgtgcccagtatgcctcctggaccctccagttctgccacaggtctgccgatgccctgtccactgcctacacatgacagacaagtaaccccctcatgggggatggggacctacctggctcctcagccagcacccagcttaacccctgccatcccatgctgggccctccaggccaagagtctcagctggccgagagtccaggccttgcctcccccgaccgccatggagggggcagcccggcacagctgctgggagcccttgtgtgtctggtcacactttttaggcgtcacgccaaaggccagcctcctggccccaatacccattttggaagcccctgtggccgtgtggatgtcggtaacagttgtataaaataaattctatttatcgctattgtaaaaaaaaaa

SEQ ID NO: 317504 - DNA, 1786 bp, Homo sapiens
  misc_feature (1)..(1): n is a, c, g, or t
ngggagctcagcgctgcggggcccggacccgggcgcgcgcgggccaggagccggctgggccagctgaagtgccgccgggcgggggccgggccgggccgcgctcaggatggcacagctgcggcccgcggtgccacccggccgtccgcggaggggctcgctgcccgcgggggccagctggcagaacacagatctatttgagatgattgagaagatgcagggaagcaggatggatgaacaacgctgctccttcccgccgcccctcaaaacagaggaggactacattccatacccgagcgtgcacgaggtcttggggcgagaaggacccttccccctcatcctgctgccccagtttgggggctactggattgagggcaccaaccacgaaatcaccagcatccccgagacagagccactgcagtcgcccacaaccaaggtgaagctcgagtgcaaccccacagcccgcatctaccggaagcactttctcggcaaggagcatttcaattactactcactggacgctgccctcggccaccttgtcttctcactcaagtacgatgtcatcggggaccaagagcacctgcggctgctgctcaggaccaagtgccggacataccatgatgtcatccccatctcctgcctcaccgagttccctaatgttgtccagatggcaaagttggtgtgtgaagacgtcaatgtggatcggttctatcctgtgctctaccccaaggcttcccggctcatcgtcacctttgacgagcatgtcatcagcaataacttcaagtttggcgtcatttatcagaagcttgggcagacctccgaggaagaactcttcagcaccaatgaggaaagtcccgctttcgtggagttccttgaatttcttggccagaaggtcaaactgcaggactttaaggggttccgaggaggcctggacgtgacccacgggcagacggggaccgaatctgtgtactgcaacttccgcaacaaggagatcatgtttcacgtgtccaccaagctgccatacacggaaggggacgcccagcagttgcagcggaagcggcacatcgggaacgacatcgtggctgtggtcttccaggatgagaacactcctttcgtgcccgacatgatcgcgtccaacttcctgcatgcctacgtcgtggtgcaggctgagggcgggggccctgatggccccctctacaaggtctctgtcactgcaagagatgatgtgcccttctttggaccccccctcccggaccccgctgtgttcaggaaggggcctgagttccaggaatttttgctgacaaagctgatcaatgctgaatatgcctgctacaaggcagagaagtttgccaaactggaggagcggacgcgggccgccctcctggagacgctctatgaggaactacacatccacagccagtccatgatgggcttgggcggcgacgaggacaagatggagaatggcagtgggggcggcggcttctttgagtctttcaagcgggtcatccggagccgcagccagtccatggatgccatggggctgagcaacaagaagcccaacaccgtgtccaccagccacagcgggagcttcgcgcccaacaaccccgacctggccaaggcggctggaatactgctgggagcccttgtgtgtctggtcacactttttaggcgtcacgccaaaggccagcctcctggccccaatacccattttggaagcccctgtggccgtgtggatgtcggtaacagttgtataaaataaattctatttatcgctattgtaaaaaaaaaa

SEQ ID NO: 317505 - DNA, 415 bp, Homo sapiens
cggccgcgttgccaaggtgacccgggcgcgggaaggcggctccggctcgcgcgggccgggccgggcggcggcggcggcaccatgagcggccggaagcgcagcttcaccttcggggcctacggcgggtagggcgtggcgcggcgcggggcggggcgcgtgcgcgcgtgtgcgtgtgcacgcgtgggggggagcccgtgcggggtgtgctcgcgtttgggcgggtgggcctgggctatgactgctgtgggggctgagcgtttgacctcagtgcgcgcatggctgtcgtgctgtggcgcctgtgtgtgtgtgtttctgtttctgtgtctgtgtgtgttcccattgcgtgtccatgtgcatgtgtggggaggtgagtgcagggtggacattgctgtgtttgtgtctaagcacatgatag

SEQ ID NO: 317506 - DNA, 490 bp, Homo sapiens
gcacgaggtgcattaagtgtcaaacaatgaaacaattgtacgctgtaacctcatctacttctgatgtttttaaaaaatgacttttaacaaggagagggaaaagaaacccactaaattttgctttgtttccttgaagaatgtggcaacactgttttgtgattttatttgtgcaggtcatgcacacagttttgataaagggcagtaacaagtattggggcctatttttttttttttccacaaggcattctctaaagctatgtgaaattttctctgcacctctgtacagagaatacacctgcccctgtatatccttttttcccctcccctccctcccagtggtacttctactaaattgttgtcttgttttttattttttaaataaactgacaaatgacaaaatggtgagcttatgatgtttacataaaagttctataagctgtgtatacagttttttatgtaaaatattaaaagactatgatgatgacattta

SEQ ID NO: 317507 - DNA, 601 bp, Homo sapiens
  misc_feature (239)..(239): n is a, c, g, or t
cattcctttgccccaattggttccacttggtttgaccacacgtaaagccaccttggccaatttgccaatccggaccagatagccatttcttggcccacccacgtgtaccgccgggtaaccctccatcttacatcttctgaatgttttttaaaaatgagcttttaacacacacaggaagaaggggaaaaggaatccccctctaatatttgctctttgttttcctctcgaaagaatatgtnggcacacacctcgtttttgggagatttaatttgtgcacggtcacagcacacaccacagttttgataaagggcagtaacaagtattggggcctatttttttttttttccacaaggcattctctaaagctatgtgaaattttctctgcacctctgtacagagaatacacctgcccctgtatatccttttttcccctcccctccctcccagtggtacttctactaaattgttgtcttgttttttattttttaaataaactgacaaatgacaaaatggtgagcttatgatgtttacataaaagttctataagctgtgtatacagttttttatgtaaaatattaaaagactatgatgatgacattta

SEQ ID NO: 317508 - DNA, 2378 bp, Homo sapiens
cgcagagcggatctgccaccgcagtctggttggagctgttgtcttgtatgctcagcgaggcccggagagacccgggagagagctaggccgagtccaccgcccgagtctgctgcccgagcccgcgttacgcacaaagccgccgatccccggcctggggtgagcagagcgaccaccgcccgggagcagcgcggcgagacgcacggtgcgccctatgcccccgcgcccccaccgcccccgccgcggcagccgaagcgcagcgagagaacgcgccaccgcggggcccgggtgcagctagcgaccctctcgccacctgcgcgcagcccgaggtgagcagtgagcggcgagcgggagggcagcgaggcgttcgcgggccccctcctgctgcccgggcccggcccgctcatggcggccatccgcaagaagctggtggtggtgggcgacggcgcgtgtggcaagacgtgcctgctgatcgtgttcagtaaggacgagttccccgaggtgtacgtgcccaccgtcttcgagaactatgtggccgacattgaggtggacggcaagcaggtggagctggcgctgtgggacacggcgggccaggaggactacgaccgcctgcggccgctctcctacccggacaccgacgtcattctcatgtgcttctcggtggacagcccggactcgctggagaacatccccgagaagtgggtccccgaggtgaagcacttctgtcccaatgtgcccatcatcctggtggccaacaaaaaagacctgcgcagcgacgagcatgtccgcacagagctggcccgcatgaagcaggaacccgtgcgcacggatgacggccgcgccatggccgtgcgcatccaagcctacgactacctcgagtgctctgccaagaccaaggaaggcgtgcgcgaggtcttcgagacggccacgcgcgccgcgctgcagaagcgctacggctcccagaacggctgcatcaactgctgcaaggtgctatgagggccgcgcccgtcgcgcctgcccctgccggcacggctccccctcctggaccagtcccccgcgagcccggagaaggggagacccgtgtcccacaaggaccccaccggcctgcctggcatctgtctgctgacgcctctggcttgcgccaggacttggcgtgggcaccgggcgcccccatcccagtgtctgtgtgcgtccagctgtgttgcacaggcctgggctccccactgagtgccaagggtcccctgagcatgcttttctgaagagccgggcctcagagtgtgtggctgtgtgtctgttcgactcccctcgccccattttcaccccacccccgcctctgatccccgggggcgagattggcgcgggagtgtggccgcgccccatcagatgttctcccttcaccagcgggagcttgatatcccttgtctgtaacatagaccccgggtactgcgggaggggagggctgctggggaggatggggggatgttatataaatatagatataattttattttcggagctaagatggtgttatttaagggtggtgatgggtgagcgctctggcccaggctgggccagactcccgcccaagcatgaacaggacttgaccatctttccaacccctggggaagacatttgcaactgacttggggaggacacagcttcagcacagcctctcctgcgggccagcccgctgcgaaccctccaccagctaccggagggaggagggaggatgcgctgtggggttgtttttgccataagcgaactttgtgcctgtcctagaagtgaaaattgttcagtccaagaaactgatgttatttgatttatttaaaggctaaaatttgtttttttattctttgcacaattgtttcattgtttgacacttaatgcactcgtcatttgcatacgacagtagcattctgaccacacttgtacgctgtaacctcatctacttctgatgtttttaaaaaatgacttttaacaaggagagggaaaagaaacccactaaattttgctttgtttccttgaagaatgtggcaacactgttttgtgattttatttgtgcaggtcatgcacacagttttgataaagggcagtaacaagtattggggcctatttttttttttttccacaaggcattctctaaagctatgtgaaattttctctgcacctctgtacagagaatacacctgcccctgtatatccttttttcccctcccctccctcccagtggtacttctactaaattgttgtcttgttttttattttttaaataaactgacaaatgacaaaatggtgagcttatgatgtttacataaaagttctataagctgtgtatacagttttttatgtaaaatattaaaagactatgatgatgacattta

SEQ ID NO: 317509 - DNA, 2287 bp, Homo sapiens
cgcagagcggatctgccaccgcagtctggttggagctgttgtcttgtatgctcagcgaggcccggagagacccgggagagagctaggccgagtccaccgcccgagtctgctgcccgagcccgcgttacgcacaaagccgccgatccccggcctggggtgagcagagcgaccaccgcccgggagcagcgcggcgagacgcacggtgcgccctatgcccccgcgcccccaccgcccccgccgcggcagccgaagcgcagcgagagaacgcgccaccgcggggcccgggtgcagctagcgaccctctcgccacctgcgcgcagcccgaggtgagcagtgagcggcgagcgggagggcagcgaggcgttcgcgggccccctcctgctgcccgggcccggcccgctcatggcggccatccgcaagaagctggtggtggtgggcgacggcgcgtgtggcaagacgtgcctgctgatcgtgttcagtaaggacgagttccccgaggtgtacgtgcccaccgtcttcgagaactatgtggccgacattgaggtggacggcaagcaggtggagctggcgctgtgggacacggcgggccaggaggactacgaccgcctgcggccgctctcctacccggacaccgacgtcattctcatgtgcttctcggtggacagcccggactcgctggagaacatccccgagaagtgggtccccgaggtgaagcacttctgtcccaatgtgcccatcatcctggtggccaacaaaaaagacctgcgcagcgacgagcatgtccgcacagagctggcccgcatgaagcaggaacccgtgcgcacggatgacggccgcgccatggccgtgcgcatccaagcctacgactacctcgagtgctctgccaagaccaaggaaggcgtgcgcgaggtcttcgagacggccacgcgcgccgcgctgcagaagcgctacggctcccagaacggctgcatcaactgctgcaaggtgctatgagggccgcgcccgtcgcgcctgcccctgccggcacggctccccctcctggaccagtcccccgcgagcccggagaaggggagacccgtgtcccacaaggaccccaccggcctgcctggcatctgtctgctgacgcctctggcttgcgccaggacttggcgtgggcaccgggcgcccccatcccagtgtctgtgtgcgtccagctgtgttgcacaggcctgggctccccactgagtgccaagggtcccctgagcatgcttttctgaagagccgggcctcagagtgtgtggctgtgtgtctgttcgactcccctcgccccattttcaccccacccccgcctctgatccccgggggcgagattggcgcgggagtgtggccgcgccccatcagatgttctcccttcaccagcgggagcttgatatcccttgtctgtaacatagaccccgggtactgcgggaggggagggctgctggggaggatggggggatgttatataaatatagatataattttattttcggagctaagatggtgttatttaagggtggtgatgggtgagcgctctggcccaggctgggccagactcccgcccaagcatgaacaggacttgaccatctttccaacccctggggaagacatttgcaactgacttggggaggacacagcttcagcacagcctctcctgcgggccagcccgctgcgaaccctccaccagctaccggagggaggagggaggatgcgctgtggggttgtttttgccataagcgaactttgtgcctgtcctagaagtgaaaattgttcagtccaagaaactgatgttatttgatttatttaaaggctaaaatttgtttttttattctttgcacaattgtttcattgtttgacacttaatgcactcgtcatttgcatacgacagtagcattctgaccacacttgtacgctgtaacctcatctacttctgatgtttttaaaaaatgacttttaacaaggagagggaaaagaaacccactaaattttgctttgtttccttgaagaatgtggcaacactgttttgtgattttatttgtgcaggtcatgcacacagttttgataaagggcagtaacaagtattggggcctatttttttttttttccacaaggcattctctaaagctatgtgaaattttctctgcacctctgtacagagaatacacctgcccctgtatatccttttttcccctcccctccctcccagtggtacttctactaaattgttgtcttgttttttattttttaaataaactgacaaatgacaaaa

SEQ ID NO: 317510 - DNA, 2845 bp, Homo sapiens
cgcagagcggatctgccaccgcagtctggttggagctgttgtcttgtatgctcagcgaggcccggagagacccgggagagagctaggccgagtccaccgcccgagtctgctgcccgagcccgcgttacgcacaaagccgccgatccccggcctggggtgagcagagcgaccaccgcccgggagcagcgcggcgagacgcacggtgcgccctatgcccccgcgcccccaccgcccccgccgcggcagccgaagcgcagcgagagaacgcgccaccgcggggcccgggtgcagctagcgaccctctcgccacctgcgcgcagcccgaggtgagcagtgagcggcgagcgggagggcagcgaggcgttcgcgggccccctcctgctgcccgggcccggcccgctcatggcggccatccgcaagaagctggtggtggtgggcgacggcgcgtgtggcaagacgtgcctgctgatcgtgttcagtaaggacgagttccccgaggtgtacgtgcccaccgtcttcgagaactatgtggccgacattgaggtggacggcaagcaggtggagctggcgctgtgggacacggcgggccaggaggactacgaccgcctgcggccgctctcctacccggacaccgacgtcattctcatgtgcttctcggtggacagcccggactcgctggagaacatccccgagaagtgggtccccgaggtgaagcacttctgtcccaatgtgcccatcatcctggtggccaacaaaaaagacctgcgcagcgacgagcatgtccgcacagagctggcccgcatgaagcaggaacccgtgcgcacggatgacggccgcgccatggccgtgcgcatccaagcctacgactacctcgagtgctctgccaagaccaaggaaggcgtgcgcgaggtcttcgagacggccacgcgcgccgcgctgcagaagcgctacggctcccagaacggctgcatcaactgctgcaaggtgctatgagggccgcgcccgtcgcgcctgcccctgccggcacggctccccctcctggaccagtcccccgcgagcccggagaaggggagacccgtgtcccacaaggaccccaccggcctgcctggcatctgtctgctgacgcctctggcttgcgccaggacttggcgtgggcaccgggcgcccccatcccagtgtctgtgtgcgtccagctgtgttgcacaggcctgggctccccactgagtgccaagggtcccctgagcatgcttttctgaagagccgggcctcagagtgtgtggctgtgtgtctgttcgactcccctcgccccattttcaccccacccccgcctctgatccccgggggcgagattggcgcgggagtgtggccgcgccccatcagatgttctcccttcaccagcgggagcttgatatcccttgtctgtaacatagaccccgggtactgcgggaggggagggctgctggggaggatggggggatgttatataaatatagatataattttattttcggagctaagatggtgttatttaagggtggtgatgggtgagcgctctggcccaggctgggccagactcccgcccaagcatgaacaggacttgaccatctttccaacccctggggaagacatttgcaactgacttggggaggacacagcttcagcacagcctctcctgcgggccagcccgctgcgaaccctccaccagctaccggagggaggagggaggatgcgctgtggggttgtttttgccataagcgaactttgtgcctgtcctagaagtgaaaattgttcagtccaagaaactgatgttatttgatttatttaaaggctaaaatttgtttttttattctttgcacaattgtttcattgtttgacacttaatgcactcgtcatttgcatacgacagtagcattctgaccacacttgtacgctgtaacctcatctacttctgatgtttttaaaaaatgacttttaacaaggagagggaaaagaaacccactaaattttgctttgtttccttgaagaatgtggcaacactgttttgtgattttatttgtgcaggtcatgcacacagttttgataaagggcagtaacaagtattggggcctatttttttttttttccacaaggcattctctaaagctatgtgaaattttctctgcacctctgtacagagaatacacctgcccctgtatatccttttttcccctcccctccctcccagtggtacttctactaaattgttgtcttgttttttattttttaaataaactgacaaatgacaaaatggtgagcttatgatgtttacataaaagttctataagctgtgtatacagttttttatgtaaaatattaaaagactatgatgatgacatttataaaatggctcttgtggtttaatagtgtgtaaaaatacccttgtgaatttggaacaagggagatattctcctaggcgagatcctttcttgccaactccgtttcccttatagcaaatgtagtaaatgaggatgaagtccctttgagagcatgtgggggttgggtgaccaagggagaccaggttgttcctgtcacattcctagaggaagatgagtggataccccgacacccagtgcaaaaacttttgacctattatgtactcagttcaattgggtgagaccgaagatcttgatttcattcatctgtgtgtcttaaaaacacttgtgtctttaagtctattatggggctttgcttattctttgagtcttggaaagttatcatttgtgcattttaaatttagaaaacctttattaatcgttggtgtggggtcacgctatcaggaagcctgtttactgggttcccttcaggc

SEQ ID NO: 317511 - DNA, 2491 bp, Homo sapiens
cgcagagcggatctgccaccgcagtctggttggagctgttgtcttgtatgctcagcgaggcccggagagacccgggagagagctaggccgagtccaccgcccgagtctgctgcccgagcccgcgttacgcacaaagccgccgatccccggcctggggtgagcagagcgaccaccgcccgggagcagcgcggcgagacgcacggtgcgccctatgcccccgcgcccccaccgcccccgccgcggcagccgaagcgcagcgagagaacgcgccaccgcggggcccgggtgcagctagcgaccctctcgccacctgcgcgcagcccgaggtgagcagtgagcggcgagcgggagggcagcgaggcgttcgcgggccccctcctgctgcccgggcccggcccgctcatggcggccatccgcaagaagctggtggtggtgggcgacggcgcgtgtggcaagacgtgcctgctgatcgtgttcagtaaggacgagttccccgaggtgtacgtgcccaccgtcttcgagaactatgtggccgacattgaggtggacggcaagcaggtggagctggcgctgtgggacacggcgggccaggaggactacgaccgcctgcggccgctctcctacccggacaccgacgtcattctcatgtgcttctcggtggacagcccggactcgctggagaacatccccgagaagtgggtccccgaggtgaagcacttctgtcccaatgtgcccatcatcctggtggccaacaaaaaagacctgcgcagcgacgagcatgtccgcacagagctggcccgcatgaagcaggaacccgtgcgcacggatgacggccgcgccatggccgtgcgcatccaagcctacgactacctcgagtgctctgccaagaccaaggaaggcgtgcgcgaggtcttcgagacggccacgcgcgccgcgctgcagaagcgctacggctcccagaacggctgcatcaactgctgcaaggtgctatgagggccgcgcccgtcgcgcctgcccctgccggcacggctccccctcctggaccagtcccccgcgagcccggagaaggggagacccgtgtcccacaaggaccccaccggcctgcctggcatctgtctgctgacgcctctggcttgcgccaggacttggcgtgggcaccgggcgcccccatcccagtgtctgtgtgcgtccagctgtgttgcacaggcctgggctccccactgagtgccaagggtcccctgagcatgcttttctgaagagccgggcctcagagtgtgtggctgtgtgtctgttcgactcccctcgccccattttcaccccacccccgcctctgatccccgggggcgagattggcgcgggagtgtggccgcgccccatcagatgttctcccttcaccagcgggagcttgatatcccttgtctgtaacatagaccccgggtactgcgggaggggagggctgctggggaggatggggggatgttatataaatatagatataattttattttcggagctaagatggtgttatttaagggtggtgatgggtgagcgctctggcccaggctgggccagactcccgcccaagcatgaacaggacttgaccatctttccaacccctggggaagacatttgcaactgacttggggaggacacagcttcagcacagcctctcctgcgggccagcccgctgcgaaccctccaccagctaccggagggaggagggaggatgcgctgtggggttgtttttgccataagcgaactttgtgcctgtcctagaagtgaaaattgttcagtccaagaaactgatgttatttgatttatttaaaggctaaaatttgtttttttattctttgcacaattgtttcattgtttgacacttaatgcactcgtcatttgcatacgacagtagcattctgaccacacttgtacgctgtaacctcatctacttctgatgtttttaaaaaatgacttttaacaaggagagggaaaagaaacccactaaattttgctttgtttccttgaagaatgtggcaacactgttttgtgattttatttgtgcaggtcatgcacacagttttgataaagggcagtaacaagtattggggcctatttttttttttttccacaaggcattctctaaagctatgtgaaattttctctgcacctctgtacagagaatacacctgcccctgtatatccttttttcccctcccctccctcccagtggtacttctactaaattgttgtcttgttttttattttttaaataaactgacaaatgacaaaatggtgagcttatgatgtttacataaaagttctataagctgtgtatacagttttttatgtaaaatattaaaagactatgatgatgacatttaaaattcctctccacttctcattatcttctatttcttaaactatatcttacctttacaacccttctcattctcctattctctacctccctcttcctcaaaccctttttattaca

SEQ ID NO: 317512 - DNA, 2462 bp, Homo sapiens
cgcagagcggatctgccaccgcagtctggttggagctgttgtcttgtatgctcagcgaggcccggagagacccgggagagagctaggccgagtccaccgcccgagtctgctgcccgagcccgcgttacgcacaaagccgccgatccccggcctggggtgagcagagcgaccaccgcccgggagcagcgcggcgagacgcacggtgcgccctatgcccccgcgcccccaccgcccccgccgcggcagccgaagcgcagcgagagaacgcgccaccgcggggcccgggtgcagctagcgaccctctcgccacctgcgcgcagcccgaggtgagcagtgagcggcgagcgggagggcagcgaggcgttcgcgggccccctcctgctgcccgggcccggcccgctcatggcggccatccgcaagaagctggtggtggtgggcgacggcgcgtgtggcaagacgtgcctgctgatcgtgttcagtaaggacgagttccccgaggtgtacgtgcccaccgtcttcgagaactatgtggccgacattgaggtggacggcaagcaggtggagctggcgctgtgggacacggcgggccaggaggactacgaccgcctgcggccgctctcctacccggacaccgacgtcattctcatgtgcttctcggtggacagcccggactcgctggagaacatccccgagaagtgggtccccgaggtgaagcacttctgtcccaatgtgcccatcatcctggtggccaacaaaaaagacctgcgcagcgacgagcatgtccgcacagagctggcccgcatgaagcaggaacccgtgcgcacggatgacggccgcgccatggccgtgcgcatccaagcctacgactacctcgagtgctctgccaagaccaaggaaggcgtgcgcgaggtcttcgagacggccacgcgcgccgcgctgcagaagcgctacggctcccagaacggctgcatcaactgctgcaaggtgctatgagggccgcgcccgtcgcgcctgcccctgccggcacggctccccctcctggaccagtcccccgcgagcccggagaaggggagacccgtgtcccacaaggaccccaccggcctgcctggcatctgtctgctgacgcctctggcttgcgccaggacttggcgtgggcaccgggcgcccccatcccagtgtctgtgtgcgtccagctgtgttgcacaggcctgggctccccactgagtgccaagggtcccctgagcatgcttttctgaagagccgggcctcagagtgtgtggctgtgtgtctgttcgactcccctcgccccattttcaccccacccccgcctctgatccccgggggcgagattggcgcgggagtgtggccgcgccccatcagatgttctcccttcaccagcgggagcttgatatcccttgtctgtaacatagaccccgggtactgcgggaggggagggctgctggggaggatggggggatgttatataaatatagatataattttattttcggagctaagatggtgttatttaagggtggtgatgggtgagcgctctggcccaggctgggccagactcccgcccaagcatgaacaggacttgaccatctttccaacccctggggaagacatttgcaactgacttggggaggacacagcttcagcacagcctctcctgcgggccagcccgctgcgaaccctccaccagctaccggagggaggagggaggatgcgctgtggggttgtttttgccataagcgaactttgtgcctgtcctagaagtgaaaattgttcagtccaagaaactgatgttatttgatttatttaaaggctaaaatttgtttttttattctttgcacaattgtttcattgtttgacacttaatgcactcgtcatttgcatacgacagtagcattctgaccacacttgtacgctgtaacctcatctacttctgatgtttttaaaaaatgacttttaacaaggagagggaaaagaaacccactaaattttgctttgtttccttgaagaatgtggcaacactgttttgtgattttatttgtgcaggtcatgcacacagttttgataaagggcagtaacaagtattggggcctatttttttttttttccacaaggcattctctaaagctatgtgaaattttctctgcacctctgtacagagaatacacctgcccctgtatatccttttttcccctcccctccctcccagtggtacttctactaaattgttgtcttgttttttattttttaaataaactgacaaatgacaaaatggtgagcttatgatgtttacataaaagttctataagctgtgtatacagttttttatgtaaaatattaaaagactatgatgatgacatttacctttattaacaaaacaaaaaacataaaaaaaagaacaaaacaccaaaaccactcaacaaggacgcaccacgcgaagcacacag

SEQ ID NO: 317513 - DNA, 2673 bp, Homo sapiens
  misc_feature (2362)..(2363): n is a, c, g, or t
cgcagagcggatctgccaccgcagtctggttggagctgttgtcttgtatgctcagcgaggcccggagagacccgggagagagctaggccgagtccaccgcccgagtctgctgcccgagcccgcgttacgcacaaagccgccgatccccggcctggggtgagcagagcgaccaccgcccgggagcagcgcggcgagacgcacggtgcgccctatgcccccgcgcccccaccgcccccgccgcggcagccgaagcgcagcgagagaacgcgccaccgcggggcccgggtgcagctagcgaccctctcgccacctgcgcgcagcccgaggtgagcagtgagcggcgagcgggagggcagcgaggcgttcgcgggccccctcctgctgcccgggcccggcccgctcatggcggccatccgcaagaagctggtggtggtgggcgacggcgcgtgtggcaagacgtgcctgctgatcgtgttcagtaaggacgagttccccgaggtgtacgtgcccaccgtcttcgagaactatgtggccgacattgaggtggacggcaagcaggtggagctggcgctgtgggacacggcgggccaggaggactacgaccgcctgcggccgctctcctacccggacaccgacgtcattctcatgtgcttctcggtggacagcccggactcgctggagaacatccccgagaagtgggtccccgaggtgaagcacttctgtcccaatgtgcccatcatcctggtggccaacaaaaaagacctgcgcagcgacgagcatgtccgcacagagctggcccgcatgaagcaggaacccgtgcgcacggatgacggccgcgccatggccgtgcgcatccaagcctacgactacctcgagtgctctgccaagaccaaggaaggcgtgcgcgaggtcttcgagacggccacgcgcgccgcgctgcagaagcgctacggctcccagaacggctgcatcaactgctgcaaggtgctatgagggccgcgcccgtcgcgcctgcccctgccggcacggctccccctcctggaccagtcccccgcgagcccggagaaggggagacccgtgtcccacaaggaccccaccggcctgcctggcatctgtctgctgacgcctctggcttgcgccaggacttggcgtgggcaccgggcgcccccatcccagtgtctgtgtgcgtccagctgtgttgcacaggcctgggctccccactgagtgccaagggtcccctgagcatgcttttctgaagagccgggcctcagagtgtgtggctgtgtgtctgttcgactcccctcgccccattttcaccccacccccgcctctgatccccgggggcgagattggcgcgggagtgtggccgcgccccatcagatgttctcccttcaccagcgggagcttgatatcccttgtctgtaacatagaccccgggtactgcgggaggggagggctgctggggaggatggggggatgttatataaatatagatataattttattttcggagctaagatggtgttatttaagggtggtgatgggtgagcgctctggcccaggctgggccagactcccgcccaagcatgaacaggacttgaccatctttccaacccctggggaagacatttgcaactgacttggggaggacacagcttcagcacagcctctcctgcgggccagcccgctgcgaaccctccaccagctaccggagggaggagggaggatgcgctgtggggttgtttttgccataagcgaactttgtgcctgtcctagaagtgaaaattgttcagtccaagaaactgatgttatttgatttatttaaaggctaaaatttgtttttttattctttgcacaattgtttcattgtttgacacttaatgcactcgtcatttgcatacgacagtagcattctgaccacacttgtacgctgtaacctcatctacttctgatgtttttaaaaaatgacttttaacaaggagagggaaaagaaacccactaaattttgctttgtttccttgaagaatgtggcaacactgttttgtgattttatttgtgcaggtcatgcacacagttttgataaagggcagtaacaagtattggggcctatttttttttttttccacaaggcattctctaaagctatgtgaaattttctctgcacctctgtacagagaatacacctgcccctgtatatccttttttcccctcccctccctcccagtggtacttctactaaattgttgtcttgttttttattttttaaataaactgacaaatgacaaaaaaaaaaaaaaaaaaaaaaaaaaaaaaaaaaaattaaaaaaaaaaaaaaaaaaaaaaaaacaaaattaaacttatnnatactttataatcaattttttcccaattttcttctatttacaactacttattacctttctacaaacttataatctatcaattaataaactcccctatctaaacctactttacaacctaccactttctaacaacctctcttactaaaatatcaccatcccttactcttattatacattaaaatccttttctcctttaataatctctctacctctactatttcttcatccccttaattcttttttaaacaaccttcttttcttctaacattctaataatacactaacacttctttcatctttaaccatctcc

SEQ ID NO: 317514 - DNA, 2023 bp, Homo sapiens
cgcagagcggatctgccaccgcagtctggttggagctgttgtcttgtatgctcagcgaggcccggagagacccgggagagagctaggccgagtccaccgcccgagtctgctgcccgagcccgcgttacgcacaaagccgccgatccccggcctggggtgagcagagcgaccaccgcccgggagcagcgcggcgagacgcacggtgcgccctatgcccccgcgcccccaccgcccccgccgcggcagccgaagcgcagcgagagaacgcgccaccgcggggcccgggtgcagctagcgaccctctcgccacctgcgcgcagcccgaggtgagcagtgagcggcgagcgggagggcagcgaggcgttcgcgggccccctcctgctgcccgggcccggcccgctcatggcggccatccgcaagaagctggtggtggtgggcgacggcgcgtgtggcaagacgtgcctgctgatcgtgttcagtaaggacgagttccccgaggtgtacgtgcccaccgtcttcgagaactatgtggccgacattgaggtggacggcaagcaggtggagctggcgctgtgggacacggcgggccaggaggactacgaccgcctgcggccgctctcctacccggacaccgacgtcattctcatgtgcttctcggtggacagcccggactcgctggagaacatccccgagaagtgggtccccgaggtgaagcacttctgtcccaatgtgcccatcatcctggtggccaacaaaaaagacctgcgcagcgacgagcatgtccgcacagagctggcccgcatgaagcaggaacccgtgcgcacggatgacggccgcgccatggccgtgcgcatccaagcctacgactacctcgagtgctctgccaagaccaaggaaggcgtgcgcgaggtcttcgagacggccacgcgcgccgcgctgcagaagcgctacggctcccagaacggctgcatcaactgctgcaaggtgctatgagggccgcgcccgtcgcgcctgcccctgccggcacggctccccctcaccagcgggagcttgatatcccttgtctgtaacatagaccccgggtactgcgggaggggagggctgctggggaggatggggggatgttatataaatatagatataattttattttcggagctaagatggtgttatttaagggtggtgatgggtgagcgctctggcccaggctgggccagactcccgcccaagcatgaacaggacttgaccatctttccaacccctggggaagacatttgcaactgacttggggaggacacagcttcagcacagcctctcctgcgggccagcccgctgcgaaccctccaccagctaccggagggaggagggaggatgcgctgtggggttgtttttgccataagcgaactttgtgcctgtcctagaagtgaaaattgttcagtccaagaaactgatgttatttgatttatttaaaggctaaaatttgtttttttattctttgcacaattgtttcattgtttgacacttaatgcactcgtcatttgcatacgacagtagcattctgaccacacttgtacgctgtaacctcatctacttctgatgtttttaaaaaatgacttttaacaaggagagggaaaagaaacccactaaattttgctttgtttccttgaagaatgtggcaacactgttttgtgattttatttgtgcaggtcatgcacacagttttgataaagggcagtaacaagtattggggcctatttttttttttttccacaaggcattctctaaagctatgtgaaattttctctgcacctctgtacagagaatacacctgcccctgtatatccttttttcccctcccctccctcccagtggtacttctactaaattgttgtcttgttttttattttttaaataaactgacaaatgacaaaatggtgagcttatgatgtttacataaaagttctataagctgtgtatacagttttttatgtaaaatattaaaagactatgatgatgacattta

SEQ ID NO: 317515 - DNA, 2324 bp, Homo sapiens
cgcagagcggatctgccaccgcagtctggttggagctgttgtcttgtatgctcagcgaggcccggagagacccgggagagagctaggccgagtccaccgcccgagtctgctgcccgagcccgcgttacgcacaaagccgccgatccccggcctggggtgagcagagcgaccaccgcccgggagcagcgcggcgagacgcacggtgcgccctatgcccccgcgcccccaccgcccccgccgcggcagccgaagcgcagcgagagaacgcgccaccgcggggcccgggtgcagctagcgaccctctcgccacctgcgcgcagcccgaggtgagcagtgagcggcgagcgggagggcagcgaggcgttcgcgggccccctcctgctgcccgggcccggcccgctcatggcggccatccgcaagaagctggtggtggtgggcgacggcgcgtgtggcaagacgtgcctgctgatcgtgttcagtaaggacgagttccccgaggtgtacgtgcccaccgtcttcgagaactatgtggccgacattgaggtggacggcaagcaggtggagctggcgctgtgggacacggcgggccaggaggactacgaccgcctgcggccgctctcctacccggacaccgacgtcattctcatgtgcttctcggtggacagcccggactcgctggagaacatccccgagaagtgggtccccgaggtgaagcacttctgtcccaatgtgcccatcatcctggtggccaacaaaaaagacctgcgcagcgacgagcatgtccgcacagagctggcccgcatgaagcaggaacccgtgcgcacggatgacggccgcgccatggccgtgcgcatccaagcctacgactacctcgagtgctctgccaagaccaaggaaggcgtgcgcgaggtcttcgagacggccacgcgcgccgcgctgcagaagcgctacggctcccagaacggctgcatcaactgctgcaaggtgctatgagggccgcgcccgtcgcgcctgcccctgccggcacggctccccctcctggaccagtcccccgcgagcccggagaaggggagacccgtgtcccacaaggaccccaccggcctgcctggcatctgtctgctgacgcctctggcttgcgccaggacttggcgtgggcaccgggcgcccccatcccagtgtctgtgtgcgtccagctgtgttgcacaggcctgggctccccactgagtgccaagggtcccctgagcatgcttttctgaagagccgggcctcagagtgtgtggctgtgtgtctgttcgactcccctcgccccattttcaccccacccccgcctctgatccccgggggcgagattggcgcgggagtgtggccgcgccccatcagatgttctcccttcaccagcgggagcttgatatcccttgtctgtaacatagaccccgggtactgcgggaggggagggctgctggggaggatggggggatgttatataaatatagatataattttattttcggagctaagatggtgttatttaagggtggtgatgggtgagcgctctggcccaggctgggccagactcccgcccaagcatgaacaggacttgaccatctttccaacccctggggaagacatttgcaactgacttggggaggacacagcttcagcacagcctctcctgcgggccagcccgctgcgaaccctccaccagctaccggagggaggagggaggatgcgctgtggggttgtttttgccataagcgaactttgtgcctgtcctagaagtgaaaattgttcagtccaagaaactgatgttatttgatttatttaaaggctaaaatttgtttttttattctttgcacaattgtttcattgtttgacacttaatgcactcgtcatttgcatacgacagtagcattctgaccacacttgtacgctgtaacctcatctacttctgatgtttttaaaaaatgacttttaacaaggagagggtttgtgattttatttgtgcaggtcatgcacacagttttgataaagggcagtaacaagtattggggcctatttttttttttttccacaaggcattctctaaagctatgtgaaattttctctgcacctctgtacagagaatacacctgcccctgtatatccttttttcccctcccctccctcccagtggtacttctactaaattgttgtcttgttttttattttttaaataaactgacaaatgacaaaatggtgagcttatgatgtttacataaaagttctataagctgtgtatacagttttttatgtaaaatattaaaagactatgatgatgacattta

SEQ ID NO: 317516 - DNA, 2275 bp, Homo sapiens
cgcagagcggatctgccaccgcagtctggttggagctgttgtcttgtatgctcagcgaggcccggagagacccgggagagagctaggccgagtccaccgcccgagtctgctgcccgagcccgcgttacgcacaaagccgccgatccccggcctggggtgagcagagcgaccaccgcccgggagcagcgcggcgagacgcacggtgcgccctatgcccccgcgcccccaccgcccccgccgcggcagccgaagcgcagcgagagaacgcgccaccgcggggcccgggtgcagctagcgaccctctcgccacctgcgcgcagcccgaggtgagcagtgagcggcgagcgggagggcagcgaggcgttcgcgggccccctcctgctgcccgggcccggcccgctcatggcggccatccgcaagaagctggtggtggtgggcgacggcgcgtgtggcaagacgtgcctgctgatcgtgttcagtaaggacgagttccccgaggtgtacgtgcccaccgtcttcgagaactatgtggccgacattgaggtggacggcaagcaggtggagctggcgctgtgggacacggcgggccaggaggactacgaccgcctgcggccgctctcctacccggacaccgacgtcattctcatgtgcttctcggtggacagcccggactcgctggagaacatccccgagaagtgggtccccgaggtgaagcacttctgtcccaatgtgcccatcatcctggtggccaacaaaaaagacctgcgcaggagtgctctgccaagaccaaggaaggcgtgcgcgaggtcttcgagacggccacgcgcgccgcgctgcagaagcgctacggctcccagaacggctgcatcaactgctgcaaggtgctatgagggccgcgcccgtcgcgcctgcccctgccggcacggctccccctcctggaccagtcccccgcgagcccggagaaggggagacccgtgtcccacaaggaccccaccggcctgcctggcatctgtctgctgacgcctctggcttgcgccaggacttggcgtgggcaccgggcgcccccatcccagtgtctgtgtgcgtccagctgtgttgcacaggcctgggctccccactgagtgccaagggtcccctgagcatgcttttctgaagagccgggcctcagagtgtgtggctgtgtgtctgttcgactcccctcgccccattttcaccccacccccgcctctgatccccgggggcgagattggcgcgggagtgtggccgcgccccatcagatgttctcccttcaccagcgggagcttgatatcccttgtctgtaacatagaccccgggtactgcgggaggggagggctgctggggaggatggggggatgttatataaatatagatataattttattttcggagctaagatggtgttatttaagggtggtgatgggtgagcgctctggcccaggctgggccagactcccgcccaagcatgaacaggacttgaccatctttccaacccctggggaagacatttgcaactgacttggggaggacacagcttcagcacagcctctcctgcgggccagcccgctgcgaaccctccaccagctaccggagggaggagggaggatgcgctgtggggttgtttttgccataagcgaactttgtgcctgtcctagaagtgaaaattgttcagtccaagaaactgatgttatttgatttatttaaaggctaaaatttgtttttttattctttgcacaattgtttcattgtttgacacttaatgcactcgtcatttgcatacgacagtagcattctgaccacacttgtacgctgtaacctcatctacttctgatgtttttaaaaaatgacttttaacaaggagagggaaaagaaacccactaaattttgctttgtttccttgaagaatgtggcaacactgttttgtgattttatttgtgcaggtcatgcacacagttttgataaagggcagtaacaagtattggggcctatttttttttttttccacaaggcattctctaaagctatgtgaaattttctctgcacctctgtacagagaatacacctgcccctgtatatccttttttcccctcccctccctcccagtggtacttctactaaattgttgtcttgttttttattttttaaataaactgacaaatgacaaaatggtgagcttatgatgtttacataaaagttctataagctgtgtatacagttttttatgtaaaatattaaaagactatgatgatgacattta

SEQ ID NO: 317517 - DNA, 2284 bp, Homo sapiens
cgcagagcggatctgccaccgcagtctggttggagctgttgtcttgtatgctcagcgaggcccggagagacccgggagagagctaggccgagtccaccgcccgagtctgctgcccgagcccgcgttacgcacaaagccgccgatccccggcctggggtgagcagagcgaccaccgcccgggagcagcgcggcgagacgcacggtgcgccctatgcccccgcgcccccaccgcccccgccgcggcagccgaagcgcagcgagagaacgcgccaccgcggggcccgggtgcagctagcgaccctctcgccacctgcgcgcagcccgaggtgagcagtgagcggcgagcgggagggcagcgaggcgttcgcgggccccctcctgctgcccgggcccggcccgctcatggcggccatccgcaagaagctggtggtggtgggcgacggcgcgtgtggcaagacgtgcctgctgatcgtgttcagtaaggacgagttccccgaggtgtacgtgcccaccgtcttcgagaactatgtggccgacattgaggtggacggcaagcaggtggagctggcgctgtgggacacggcgggccaggaggactacgaccgcctgcggccgctctcctacccggacaccgacgtcattctcatgtgcttctcggtggacagcccggactcgctggagaacatccccgagaagtgggtccccgaggtgaagcagaacccgtgcgcacggatgacggccgcgccatggccgtgcgcatccaagcctacgactacctcgagtgctctgccaagaccaaggaaggcgtgcgcgaggtcttcgagacggccacgcgcgccgcgctgcagaagcgctacggctcccagaacggctgcatcaactgctgcaaggtgctatgagggccgcgcccgtcgcgcctgcccctgccggcacggctccccctcctggaccagtcccccgcgagcccggagaaggggagacccgtgtcccacaaggaccccaccggcctgcctggcatctgtctgctgacgcctctggcttgcgccaggacttggcgtgggcaccgggcgcccccatcccagtgtctgtgtgcgtccagctgtgttgcacaggcctgggctccccactgagtgccaagggtcccctgagcatgcttttctgaagagccgggcctcagagtgtgtggctgtgtgtctgttcgactcccctcgccccattttcaccccacccccgcctctgatccccgggggcgagattggcgcgggagtgtggccgcgccccatcagatgttctcccttcaccagcgggagcttgatatcccttgtctgtaacatagaccccgggtactgcgggaggggagggctgctggggaggatggggggatgttatataaatatagatataattttattttcggagctaagatggtgttatttaagggtggtgatgggtgagcgctctggcccaggctgggccagactcccgcccaagcatgaacaggacttgaccatctttccaacccctggggaagacatttgcaactgacttggggaggacacagcttcagcacagcctctcctgcgggccagcccgctgcgaaccctccaccagctaccggagggaggagggaggatgcgctgtggggttgtttttgccataagcgaactttgtgcctgtcctagaagtgaaaattgttcagtccaagaaactgatgttatttgatttatttaaaggctaaaatttgtttttttattctttgcacaattgtttcattgtttgacacttaatgcactcgtcatttgcatacgacagtagcattctgaccacacttgtacgctgtaacctcatctacttctgatgtttttaaaaaatgacttttaacaaggagagggaaaagaaacccactaaattttgctttgtttccttgaagaatgtggcaacactgttttgtgattttatttgtgcaggtcatgcacacagttttgataaagggcagtaacaagtattggggcctatttttttttttttccacaaggcattctctaaagctatgtgaaattttctctgcacctctgtacagagaatacacctgcccctgtatatccttttttcccctcccctccctcccagtggtacttctactaaattgttgtcttgttttttattttttaaataaactgacaaatgacaaaatggtgagcttatgatgtttacataaaagttctataagctgtgtatacagttttttatgtaaaatattaaaagactatgatgatgacattta

SEQ ID NO: 317518 - DNA, 2196 bp, Homo sapiens
cgcagagcggatctgccaccgcagtctggttggagctgttgtcttgtatgctcagcgaggcccggagagacccgggagagagctaggccgagtccaccgcccgagtctgctgcccgagcccgcgttacgcacaaagccgccgatccccggcctggggtgagcagagcgaccaccgcccgggagcagcgcggcgagacgcacggtgcgccctatgcccccgcgcccccaccgcccccgccgcggcagccgaagcgcagcgagagaacgcgccaccgcggggcccgggtgcagctagcgaccctctcgccacctgcgcgcagcccgaggtgagcagtgagcggcgagcgggagggcagcgaggcgttcgcgggccccctcctgctgcccgggcccggcccgctcatggcggccatccgcaagaagctggtggtggtgggcgacggcgcgtgtggcaagacgtgcctgctgatcgtgttcagtaaggacgagttccccgaggtgtacgtgcccaccgtcttcgagaactatgtggccgacattgaggtggacggcaagcaggtggagctggcgctgtgggacacggcgggccaggaggactacgaccgcctgcggccgctctcctacccggacaccgacgtcattctcatgtgcttctcggtggacagcccggactcgctggagaacatccccggagtgctctgccaagaccaaggaaggcgtgcgcgaggtcttcgagacggccacgcgcgccgcgctgcagaagcgctacggctcccagaacggctgcatcaactgctgcaaggtgctatgagggccgcgcccgtcgcgcctgcccctgccggcacggctccccctcctggaccagtcccccgcgagcccggagaaggggagacccgtgtcccacaaggaccccaccggcctgcctggcatctgtctgctgacgcctctggcttgcgccaggacttggcgtgggcaccgggcgcccccatcccagtgtctgtgtgcgtccagctgtgttgcacaggcctgggctccccactgagtgccaagggtcccctgagcatgcttttctgaagagccgggcctcagagtgtgtggctgtgtgtctgttcgactcccctcgccccattttcaccccacccccgcctctgatccccgggggcgagattggcgcgggagtgtggccgcgccccatcagatgttctcccttcaccagcgggagcttgatatcccttgtctgtaacatagaccccgggtactgcgggaggggagggctgctggggaggatggggggatgttatataaatatagatataattttattttcggagctaagatggtgttatttaagggtggtgatgggtgagcgctctggcccaggctgggccagactcccgcccaagcatgaacaggacttgaccatctttccaacccctggggaagacatttgcaactgacttggggaggacacagcttcagcacagcctctcctgcgggccagcccgctgcgaaccctccaccagctaccggagggaggagggaggatgcgctgtggggttgtttttgccataagcgaactttgtgcctgtcctagaagtgaaaattgttcagtccaagaaactgatgttatttgatttatttaaaggctaaaatttgtttttttattctttgcacaattgtttcattgtttgacacttaatgcactcgtcatttgcatacgacagtagcattctgaccacacttgtacgctgtaacctcatctacttctgatgtttttaaaaaatgacttttaacaaggagagggaaaagaaacccactaaattttgctttgtttccttgaagaatgtggcaacactgttttgtgattttatttgtgcaggtcatgcacacagttttgataaagggcagtaacaagtattggggcctatttttttttttttccacaaggcattctctaaagctatgtgaaattttctctgcacctctgtacagagaatacacctgcccctgtatatccttttttcccctcccctccctcccagtggtacttctactaaattgttgtcttgttttttattttttaaataaactgacaaatgacaaaatggtgagcttatgatgtttacataaaagttctataagctgtgtatacagttttttatgtaaaatattaaaagactatgatgatgacattta

SEQ ID NO: 317519 - DNA, 1961 bp, Homo sapiens
cgcagagcggatctgccaccgcagtctggttggagctgttgtcttgtatgctcagcgaggcccggagagacccgggagagagctaggccgagtccaccgcccgagtctgctgcccgagcccgcgttacgcacaaagccgccgatccccggcctggggtgagcagagcgaccaccgcccgggagcagcgcggcgagacgcacggtgcgccctatgcccccgcgcccccaccgcccccgccgcggcagccgaagcgcagcgagagaacgcgccaccgcggggcccgggtgcagctagcgaccctctcgccacctgcgcgcagcccgaggtgagcagtgagcggcgagcgggagggcagcgaggcgttcgcgggccccctcctgctgcccgggcccggcccgctcatggcggccatccgcaagaagctggtggtggtgggcgacggcgcgtgtggcaagacgtgcctgctgatcgtgttcagtaaggacgagttccccgaggtgtacgtgcccaccgtcttcgagaactatgtggccgacattgaggtggacggcaagcaggtggagctggcgctgtgggacacggcgggccaggaggactacgaccgcctgcggccgctctcctacccggacaccgacgtcattctcatgtgcttctcggtggacagcccggactcgctggagaacatccccgagaagtgggtccccgaggtgaagcacttctgtcccaatgtgcccatcatcctggtggccaacaaaaaagacctgcgcaggtccagctgtgttgcacaggcctgggctccccactgagtgccaagggtcccctgagcatgcttttctgaagagccgggcctcagagtgtgtggctgtgtgtctgttcgactcccctcgccccattttcaccccacccccgcctctgatccccgggggcgagattggcgcgggagtgtggccgcgccccatcagatgttctcccttcaccagcgggagcttgatatcccttgtctgtaacatagaccccgggtactgcgggaggggagggctgctggggaggatggggggatgttatataaatatagatataattttattttcggagctaagatggtgttatttaagggtggtgatgggtgagcgctctggcccaggctgggccagactcccgcccaagcatgaacaggacttgaccatctttccaacccctggggaagacatttgcaactgacttggggaggacacagcttcagcacagcctctcctgcgggccagcccgctgcgaaccctccaccagctaccggagggaggagggaggatgcgctgtggggttgtttttgccataagcgaactttgtgcctgtcctagaagtgaaaattgttcagtccaagaaactgatgttatttgatttatttaaaggctaaaatttgtttttttattctttgcacaattgtttcattgtttgacacttaatgcactcgtcatttgcatacgacagtagcattctgaccacacttgtacgctgtaacctcatctacttctgatgtttttaaaaaatgacttttaacaaggagagggaaaagaaacccactaaattttgctttgtttccttgaagaatgtggcaacactgttttgtgattttatttgtgcaggtcatgcacacagttttgataaagggcagtaacaagtattggggcctatttttttttttttccacaaggcattctctaaagctatgtgaaattttctctgcacctctgtacagagaatacacctgcccctgtatatccttttttcccctcccctccctcccagtggtacttctactaaattgttgtcttgttttttattttttaaataaactgacaaatgacaaaatggtgagcttatgatgtttacataaaagttctataagctgtgtatacagttttttatgtaaaatattaaaagactatgatgatgacattta

SEQ ID NO: 317520 - DNA, 1955 bp, Homo sapiens
cgcagagcggatctgccaccgcagtctggttggagctgttgtcttgtatgctcagcgaggcccggagagacccgggagagagctaggccgagtccaccgcccgagtctgctgcccgagcccgcgttacgcacaaagccgccgatccccggcctggggtgagcagagcgaccaccgcccgggagcagcgcggcgagacgcacggtgcgccctatgcccccgcgcccccaccgcccccgccgcggcagccgaagcgcagcgagagaacgcgccaccgcggggcccgggtgcagctagcgaccctctcgccacctgcgcgcagcccgaggtgagcagtgagcggcgagcgggagggcagcgaggcgttcgcgggccccctcctgctgcccgggcccggcccgctcatggcggccatccgcaagaagctggtggtggtgggcgacggcgcgtgtggcaagacgtgcctgctgatcgtgttcagtaaggacgagttccccgaggtgtacgtgcccaccgtcttcgagaactatgtggccgacattgaggtggacggcaagcaggtggagctggcgctgtgggacacggcgggccaggaggactacgaccgcctgcggccgctctcctacccggacaccgacgtcattctcatgtgcttctcggtggacagcccggactcgctggagaacatccccgagaagtgggtccccgaggtgaagcacttctgtcccaatgtgcccatcatcctggtggccaacaaaaaagacctgcgcagcgacgagcatgtccgcacagagctggcccgcatgaagcaggaacccgtgcgcacggatgacggccgcgccatggccgtgcgcatccaagcctacgactacctcgagtgctctgccaagaccaaggaaggcgtgcgcgaggtcttcgagacggccacgcgcgccgcgctgcagaagcgctacggctcccagaacggctgcatcaactgctgcaaggtgctatgagggccgcgcccgtcgcgcctgcccctgccggcacggctccccctcctggaccagtcccccgcgagcccggagaaggggagacccgtgtcccacaaggaccccaccggcctgcctggcatctgtctgctgacgcctctggcttgcgccaggacttggcgtgggcaccgggcgcccccatcccagtgtctgtgtgcgtccagctgtgttgcacaggcctgggctccccactgagtgccaagggtcccctgagcatgcttttctgaagagccgggcctcagagtgtgtggctgtgtgtctgttcgactcccctcgccccattttcaccccacccccgcctctgatccccgggggcgagattggcgcgggagtgtggccgcgccccatcagatgttctcccttcaccagcgggagcttgatatcccttgtctgtaacatagaccccgggtactgcgggaggggagggctgctggggaggatggggggatgttatataaatatagatataattttattttcggagctaagatggtgttatttaagggtggtgatgggtgagcgctctggcccaggctgggccagactcccgcccaagcatgaacaggacttgaccatctttccaacccctggggaagacatttgcaactgacttggggaggacacagcttcagcacagcctctcctgcgggccagcccgctgcgaaccctccaccagctaccggagggaggagggaggatgcgagcggagaagacacggcactagcgacacttgtgccggtcatgcgcgacacctgcccagccagacacgatgtcacgaatctcacaggcacactgattgcaacaagacaaggtacccgcggccaaggacccacgcgcacgcatcctcggccctgtcggaccaccacggggacagcctcaggcggccccaccaggggcgcaagccgcactacgccaccagcgggctg

SEQ ID NO: 317521 - DNA, 1842 bp, Homo sapiens
cgcagagcggatctgccaccgcagtctggttggagctgttgtcttgtatgctcagcgaggcccggagagacccgggagagagctaggccgagtccaccgcccgagtctgctgcccgagcccgcgttacgcacaaagccgccgatccccggcctggggtgagcagagcgaccaccgcccgggagcagcgcggcgagacgcacggtgcgccctatgcccccgcgcccccaccgcccccgccgcggcagccgaagcgcagcgagagaacgcgccaccgcggggcccgggtgcagctagcgaccctctcgccacctgcgcgcagcccgaggtgagcagtgagcggcgagcgggagggcagcgaggcgttcgcgggccccctcctgctgcccgggcccggcccgctcatggcggccatccgcaagaagctggtggtggtgggcgacggcgcgtgtggcaagacgtgcctgctgatcgtgttcagtaaggacgagttccccgaggtgtacgtgcccaccgtcttcgagaactatgtggccgacattgaggtggacggcaagcaggtggagctggcgctgtgggacacggcgggccaggaggactacgaccgcctgcggccgctctcctacccggacaccgacgtcattctcatgtgcttctcggtggacagcccggactcgctggagaacatccccgagaagtgggtccccgaggtgaagcacttctgtcccaatgtgcccatcatcctggtggccaacaaaaaagacctgcgcagcgacgagcatgtccgcacagagctggcccgcatgaagcaggaacccgtgcgcacggatgacggccgcgccatggccgtgcgcatccaagcctacgactacctcgagtgctctgccaagaccaaggaaggcgtgcgcgaggtcttcgagacggccacgcgcgccgcgctgcagaagcgctacggctcccagaacggctgcatcaactgctgcaaggtgctatgagggccgcgcccgtcgcgcctgcccctgccggcacggctccccctcctggaccagtcccccgcgagcccggagaaggggagacccgtgtcccacaaggaccccaccggcctgcctggcatctgtctgctgacgcctctggcttgcgccaggacttggcgtgggcaccgggcgcccccatcccagtgtctgtgtgcgtccagctgtgttgcacaggcctgggctccccactgagtgccaagggtcccctgagcatgcttttctgaagagccgggcctcagagtgtgtggctgtgtgtctgttcgactcccctcgccccattttcaccccacccccgcctctgatccccgggggcgagattggcgcgggagtgtggccgcgccccatcagatgttctcccttcaccagcgggagcttgatatcccttgtctgtaacatagaccccgggtactgcgggaggggagggctgctggggaggatggggggatgttatataaatatagatataattttattttcggagctaagatggtgttatttaagggtggtgatgggtgagcgctctggcccaggctgggccagactcccgcccaagcatgaacaggacttgaccatctttccaacccctggggaagacatttgcaactgacttggggaggacacagcttcagcacagcctctcctgcgggccagcccgctgcgaaccctccaccagctacctgaatggagtatgaatgatgcactaagggattgtaattgatcatatccaacatttatccttcgcctataagattcaatttttccattccatgaatcttttgttaatcgaattcatttatatggtttaacccg

SEQ ID NO: 317522 - DNA, 1690 bp, Homo sapiens
cgcagagcggatctgccaccgcagtctggttggagctgttgtcttgtatgctcagcgaggcccggagagacccgggagagagctaggccgagtccaccgcccgagtctgctgcccgagcccgcgttacgcacaaagccgccgatccccggcctggggtgagcagagcgaccaccgcccgggagcagcgcggcgagacgcacggtgcgccctatgcccccgcgcccccaccgcccccgccgcggcagccgaagcgcagcgagagaacgcgccaccgcggggcccgggtgcagctagcgaccctctcgccacctgcgcgcagcccgaggtgagcagtgagcggcgagcgggagggcagcgaggcgttcgcgggccccctcctgctgcccgggcccggcccgctcatggcggccatccgcaagaagctggtggtggtgggcgacggcgcgtgtggcaagacgtgcctgctgatcgtgttcagtaaggacgagttccccgaggtgtacgtgcccaccgtcttcgagaactatgtggccgacattgaggtggacggcaagcaggtggagctggcgctgtgggacacggcgggccaggaggactacgaccgcctgcggccgctctcctacccggacaccgacgtcattctcatgtgcttctcggtggacagcccggactcgctggagaacatccccgagaagtgggtccccgaggtgaagcacttctgtcccaatgtgcccatcatcctggtggccaacaaaaaagacctgcgcagcgacgagcatgtccgcacagagctggcccgcatgaagcaggaacccgtgcgcacggatgacggccgcgccatggccgtgcgcatccaagcctacgactacctcgagtgctctgccaagaccaaggaaggcgtgcgcgaggtcttcgagacggccacgcgcgccgcgctgcagaagcgctacggctcccagaacggctgcatcaactgctgcaaggtgctatgagggccgcgcccgtcgcgcctgcccctgccggcacggctccccctcctggaccagtcccccgcgagcccggagaaggggagacccgtgtcccacaaggaccccaccggcctgcctggcatctgtctgctgacgcctctggcttgcgccaggacttggcgtgggcaccgggcgcccccatcccagtgtctgtgtgcgtccagctgtgttgcacaggcctgggctccccactgagtgccaagggtcccctgagcatgcttttctgaagagccgggcctcagagtgtgtggctgtgtgtctgttcgactcccctcgccccattttcaccccacccccgcctctgatccccgggggcgagattggcgcgggagtgtggccgcgccccatcagatgttctcccttcaccagcgggagcttgatatcccttgtctgtaacatagaccccgggtactgcgggaggggagggctgctggggaggatggggggatgttatataaatatagatataattttattttcggagctaagatggtgttatttaagggtggtgatgggtgagcgctctggcccaggctgggccagactcccgcccaagcatgaacaggacttgaccatctttccaacccctggggaagacatttgcaactgacttggggagcacacgaatgttcaggtaccgagactcgattcgtatcatgta

SEQ ID NO: 317523 - DNA, 1599 bp, Homo sapiens
cgcagagcggatctgccaccgcagtctggttggagctgttgtcttgtatgctcagcgaggcccggagagacccgggagagagctaggccgagtccaccgcccgagtctgctgcccgagcccgcgttacgcacaaagccgccgatccccggcctggggtgagcagagcgaccaccgcccgggagcagcgcggcgagacgcacggtgcgccctatgcccccgcgcccccaccgcccccgccgcggcagccgaagcgcagcgagagaacgcgccaccgcggggcccgggtgcagctagcgaccctctcgccacctgcgcgcagcccgaggtgagcagtgagcggcgagcgggagggcagcgaggcgttcgcgggccccctcctgctgcccgggcccggcccgctcatggcggccatccgcaagaagctggtggtggtgggcgacggcgcgtgtggcaagacgtgcctgctgatcgtgttcagtaaggacgagttccccgaggtgtacgtgcccaccgtcttcgagaactatgtggccgacattgaggtggacggcaagcaggtggagctggcgctgtgggacacggcgggccaggaggactacgaccgcctgcggccgctctcctacccggacaccgacgtcattctcatgtgcttctcggtggacagcccggactcgctggagaacatccccgagaagtgggtccccgaggtgaagcacttctgtcccaatgtgcccatcatcctggtggccaacaaaaaagacctgcgcagcgacgagcatgtccgcacagagctggcccgcatgaagcaggaacccgtgcgcacggatgacggccgcgccatggccgtgcgcatccaagcctacgactacctcgagtgctctgccaagaccaaggaaggcgtgcgcgaggtcttcgagacggccacgcgcgccgcgctgcagaagcgctacggctcccagaacggctgcatcaactgctgcaaggtgctatgagggccgcgcccgtcgcgcctgcccctgccggcacggctccccctcctggaccagtcccccgcgagcccggagaaggggagacccgtgtcccacaaggaccccaccggcctgcctggcatctgtctgctgacgcctctggcttgcgccaggacttggcgtgggcaccgggcgcccccatcccagtgtctgtgtgcgtccagctgtgttgcacaggcctgggctccccactgagtgccaagggtcccctgagcatgcttttctgaagagccgggcctcagagtgtgtggctgtgtgtctgttcgactcccctcgccccattttcaccccacccccgcctctgatccccgggggcgagattggcgcgggagtgtggccgcgccccatcagatgttctcccttcaccagcgggagcttgatatcccttgtctgtaacatagacccctccctcccagtggtacttctactaaattgttgtcttgttttttattttttaaataaactgacaaatgacaaaatggtgagcttatgatgtttacataaaagttctataagctgtgtatacagttttttatgtaaaatattaaaagactatgatgatgacattta

SEQ ID NO: 317524 - DNA, 1716 bp, Homo sapiens
cgcagagcggatctgccaccgcagtctggttggagctgttgtcttgtatgctcagcgaggcccggagagacccgggagagagctaggccgagtccaccgcccgagtctgctgcccgagcccgcgttacgcacaaagccgccgatccccggcctggggtgagcagagcgaccaccgcccgggagcagcgcggcgagacgcacggtgcgccctatgcccccgcgcccccaccgcccccgccgcggcagccgaagcgcagcgagagaacgcgccaccgcggggcccgggtgcagctagcgaccctctcgccacctgcgcgcagcccgaggtgagcagtgagcggcgagcgggagggcagcgaggcgttcgcgggccccctcctgctgcccgggcccggcccgctcatggcggccatccgcaagaagctggtggtggtgggcgacggcgcgtgtggcaagacgtgcctgctgatcgtgttcagtaaggacgagttccccgaggtgtacgtgcccaccgtcttcgagaactatgtggccgacattgaggtggacggcaagcaggtggagctggcgctgtgggacacggcgggccaggaggactacgaccgcctgcggccgctctcctacccggacaccgacgtcattctcatgtgcttctcggtggacagcccggactcgctggagaacatccccgagaagtgggtccccgaggtgaagcacttctgtcccaatgtgcccatcatcctggtggccaacaaaaaagacctgcgcagcgacgagcatgtccgcacagagctggcccgcatgaagcaggaacccgtgcgcacggatgacggccgcgccatggccgtgcgcatccaagcctacgactacctcgagtgctctgccaagaccaaggaaggcgtgcgcgaggtcttcgagacggccacgcgcgccgcgctgcagaagcgctacggctcccagaacggctgcatcaatgacttggggaggacacagcttcagcacagcctctcctgcgggccagcccgctgcgaaccctccaccagctaccggagggaggagggaggatgcgctgtggggttgtttttgccataagcgaactttgtgcctgtcctagaagtgaaaattgttcagtccaagaaactgatgttatttgatttatttaaaggctaaaatttgtttttttattctttgcacaattgtttcattgtttgacacttaatgcactcgtcatttgcatacgacagtagcattctgaccacacttgtacgctgtaacctcatctacttctgatgtttttaaaaaatgacttttaacaaggagagggaaaagaaacccactaaattttgctttgtttccttgaagaatgtggcaacactgttttgtgattttatttgtgcaggtcatgcacacagttttgataaagggcagtaacaagtattggggcctatttttttttttttccacaaggcattctctaaagctatgtgaaattttctctgcacctctgtacagagaatacacctgcccctgtatatccttttttcccctcccctccctcccagtggtacttctactaaattgttgtcttgttttttattttttaaataaactgacaaatgacaaaatggtgagcttatgatgtttacataaaagttctataagctgtgtatacagttttttatgtaaaatattaaaagactatgatgatgacattta

SEQ ID NO: 317525 - DNA, 1466 bp, Homo sapiens
cgcagagcggatctgccaccgcagtctggttggagctgttgtcttgtatgctcagcgaggcccggagagacccgggagagagctaggccgagtccaccgcccgagtctgctgcccgagcccgcgttacgcacaaagccgccgatccccggcctggggtgagcagagcgaccaccgcccgggagcagcgcggcgagacgcacggtgcgccctatgcccccgcgcccccaccgcccccgccgcggcagccgaagcgcagcgagagaacgcgccaccgcggggcccgggtgcagctagcgaccctctcgccacctgcgcgcagcccgaggtgagcagtgagcggcgagcgggagggcagcgaggcgttcgcgggccccctcctgctgcccgggcccggcccgctcatggcggccatccgcaagaagctggtggtggtgggcgacggcgcgtgtggcaagacgtgcctgctgatcgtgttcagtaaggacgagttccccgaggtgtacgtgcccaccgtcttcgagaactatgtggccgacattgaggtggacggcaagcaggtggagctggcgctgtgggacacggcgggccaggaggactacgaccgcctgcggccgctctcctacccggacaccgacgtcattctcatgtgcttctcggtggacagcccggactcgctggagaacatccccgagaagtgggtccccgaggtgaagcacttctgtcccaatgtgcccatcatcctggtggccaacaaaaaagacctgcgcaggcccgctgcgaaccctccaccagctaccggagggaggagggaggatgcgctgtggggttgtttttgccataagcgaactttgtgcctgtcctagaagtgaaaattgttcagtccaagaaactgatgttatttgatttatttaaaggctaaaatttgtttttttattctttgcacaattgtttcattgtttgacacttaatgcactcgtcatttgcatacgacagtagcattctgaccacacttgtacgctgtaacctcatctacttctgatgtttttaaaaaatgacttttaacaaggagagggaaaagaaacccactaaattttgctttgtttccttgaagaatgtggcaacactgttttgtgattttatttgtgcaggtcatgcacacagttttgataaagggcagtaacaagtattggggcctatttttttttttttccacaaggcattctctaaagctatgtgaaattttctctgcacctctgtacagagaatacacctgcccctgtatatccttttttcccctcccctccctcccagtggtacttctactaaattgttgtcttgttttttattttttaaataaactgacaaatgacaaaatggtgagcttatgatgtttacataaaagttctataagctgtgtatacagttttttatgtaaaatattaaaagactatgatgatgacattta

SEQ ID NO: 317526 - DNA, 1138 bp, Homo sapiens
cgcagagcggatctgccaccgcagtctggttggagctgttgtcttgtatgctcagcgaggcccggagagacccgggagagagctaggccgagtccaccgcccgagtctgctgcccgagcccgcgttacgcacaaagccgccgatccccggcctggggtgagcagagcgaccaccgcccgggagcagcgcggcgagacgcacggtgcgccctatgcccccgcgcccccaccgcccccgccgcggcagccgaagcgcagcgagagaacgcgccaccgcggggcccgggtgcagctagcgaccctctcgccacctgcgcgcagcccgaggtgagcagtgagcggcgagcgggagggcagcgaggcgttcgcgggccccctcctgctgcccgggcccggcccgctcatggcggccatccgcaagaagctggtggtggtgggcgacggcgcgtgtggcaagacgtgcctgctgatcgtgttcagtaaggacgagttccccgaggtgtacgtgcccaccgtcttcgagaactatgtggccgacattgaggtggacggcaagcaggtggagctggcgctgtgggacacggcgggccaggaggactacgaccgcctgcggccgctctcctacccggacaccgacgtcattctcatgtgcttctcggtggacagcccggactcgctggagaacatccccgagaagtgggtccccgaggtgaagcacttctgtcccaatgtgcccatcatcctggtggccaacaaaaaagacctgcgcagcgacgagcatgtccgcacagagctggcccgcatgaagcaggaacccgtgcgcacggatgacggccgcgccatggccgtgcgcatccaagcctacgactacctcgagtgctctgccaagaccaaggaaggcgtgcgcgaggtcttcgagacggccacgcgcgccgcgctgcagaagcgctacggctcccagaacggctgcatcaactgctgcaaggtgctatgagggccgcgcccgtcgcgcctgcccctgccggcacggctccccctcctggaccagtcccccgcgagcccggagaaggggagacccgtgtcccacctctgcccgtgtcccacctctccccgtggcccacctctcgggatcctctaga

SEQ ID NO: 317527 - DNA, 2217 bp, Homo sapiens
  misc_feature (72)..(72): n is a, c, g, or t
  misc_feature (93)..(93): n is a, c, g, or t
  misc_feature (97)..(97): n is a, c, g, or t
gggggccccccccccccccccccccgggggggaaaaaaaaaaaaagggggcgccccgggggcccaaaggggnccgggaaagggaaaagggaanaaancccgggccgcgccaccgcggggcccgggtgcagctagcgaccctctcgccacctgcgcgcagcccgaggtgagcagtgagcggcgagcgggagggcagcgaggcgttcgcgggccccctcctgctgcccgggcccggcccgctcatggcggccatccgcaagaagctggtggtggtgggcgacggcgcgtgtggcaagacgtgcctgctgatcgtgttcagtaaggacgagttccccgaggtgtacgtgcccaccgtcttcgagaactatgtggccgacattgaggtggacggcaagcaggtggagctggcgctgtgggacacggcgggccaggaggactacgaccgcctgcggccgctctcctacccggacaccgacgtcattctcatgtgcttctcggtggacagcccggactcgctggagaacatccccgagaagtgggtccccgaggtgaagcacttctgtcccaatgtgcccatcatcctggtggccaacaaaaaagacctgcgcagcgacgagcatgtccgcacagagctggcccgcatgaagcaggaacccgtgcgcacggatgacggccgcgccatggccgtgcgcatccaagcctacgactacctcgagtgctctgccaagaccaaggaaggcgtgcgcgaggtcttcgagacggccacgcgcgccgcgctgcagaagcgctacggctcccagaacggctgcatcaactgctgcaaggtgctatgagggccgcgcccgtcgcgcctgcccctgccggcacggctccccctcctggaccagtcccccgcgagcccggagaaggggagacccgtgtcccacaaggaccccaccggcctgcctggcatctgtctgctgacgcctctggcttgcgccaggacttggcgtgggcaccgggcgcccccatcccagtgtctgtgtgcgtccagctgtgttgcacaggcctgggctccccactgagtgccaagggtcccctgagcatgcttttctgaagagccgggcctcagagtgtgtggctgtgtgtctgttcgactcccctcgccccattttcaccccacccccgcctctgatccccgggggcgagattggcgcgggagtgtggccgcgccccatcagatgttctcccttcaccagcgggagcttgatatcccttgtctgtaacatagaccccgggtactgcgggaggggagggctgctggggaggatggggggatgttatataaatatagatataattttattttcggagctaagatggtgttatttaagggtggtgatgggtgagcgctctggcccaggctgggccagactcccgcccaagcatgaacaggacttgaccatctttccaacccctggggaagacatttgcaactgacttggggaggacacagcttcagcacagcctctcctgcgggccagcccgctgcgaaccctccaccagctaccggagggaggagggaggatgcgctgtggggttgtttttgccataagcgaactttgtgcctgtcctagaagtgaaaattgttcagtccaagaaactgatgttatttgatttatttaaaggctaaaatttgtttttttattctttgcacaattgtttcattgtttgacacttaatgcactcgtcatttgcatacgacagtagcattctgaccacacttgtacgctgtaacctcatctacttctgatgtttttaaaaaatgacttttaacaaggagagggaaaagaaacccactaaattttgctttgtttccttgaagaatgtggcaacactgttttgtgattttatttgtgcaggtcatgcacacagttttgataaagggcagtaacaagtattggggcctatttttttttttttccacaaggcattctctaaagctatgtgaaattttctctgcacctctgtacagagaatacacctgcccctgtatatccttttttcccctcccctccctcccagtggtacttctactaaattgttgtcttgttttttattttttaaataaactgacaaatgacaaaatggtgagcttatgatgtttacataaaagttctataagctgtgtatacagttttttatgtaaaatattaaaagactatgatgatgacattta

SEQ ID NO: 317528 - DNA, 2233 bp, Homo sapiens
  misc_feature (121)..(122): n is a, c, g, or t
  misc_feature (124)..(124): n is a, c, g, or t
agctgttcacatgctttctacagtatctttataaataaaaggtcctttatccaccaaacaacacctgaaatgatctaagttcaaaacattagtatacaaggacctagataaattggcctcnngntcgctgcggaatcggcacgaggctagcgaccctctcgccacctgcgcgcagcccgaggtgagcagtgagcggcgagcgggagggcagcgaggcgttcgcgggccccctcctgctgcccgggcccggcccgctcatggcggccatccgcaagaagctggtggtggtgggcgacggcgcgtgtggcaagacgtgcctgctgatcgtgttcagtaaggacgagttccccgaggtgtacgtgcccaccgtcttcgagaactatgtggccgacattgaggtggacggcaagcaggtggagctggcgctgtgggacacggcgggccaggaggactacgaccgcctgcggccgctctcctacccggacaccgacgtcattctcatgtgcttctcggtggacagcccggactcgctggagaacatccccgagaagtgggtccccgaggtgaagcacttctgtcccaatgtgcccatcatcctggtggccaacaaaaaagacctgcgcagcgacgagcatgtccgcacagagctggcccgcatgaagcaggaacccgtgcgcacggatgacggccgcgccatggccgtgcgcatccaagcctacgactacctcgagtgctctgccaagaccaaggaaggcgtgcgcgaggtcttcgagacggccacgcgcgccgcgctgcagaagcgctacggctcccagaacggctgcatcaactgctgcaaggtgctatgagggccgcgcccgtcgcgcctgcccctgccggcacggctccccctcctggaccagtcccccgcgagcccggagaaggggagacccgtgtcccacaaggaccccaccggcctgcctggcatctgtctgctgacgcctctggcttgcgccaggacttggcgtgggcaccgggcgcccccatcccagtgtctgtgtgcgtccagctgtgttgcacaggcctgggctccccactgagtgccaagggtcccctgagcatgcttttctgaagagccgggcctcagagtgtgtggctgtgtgtctgttcgactcccctcgccccattttcaccccacccccgcctctgatccccgggggcgagattggcgcgggagtgtggccgcgccccatcagatgttctcccttcaccagcgggagcttgatatcccttgtctgtaacatagaccccgggtactgcgggaggggagggctgctggggaggatggggggatgttatataaatatagatataattttattttcggagctaagatggtgttatttaagggtggtgatgggtgagcgctctggcccaggctgggccagactcccgcccaagcatgaacaggacttgaccatctttccaacccctggggaagacatttgcaactgacttggggaggacacagcttcagcacagcctctcctgcgggccagcccgctgcgaaccctccaccagctaccggagggaggagggaggatgcgctgtggggttgtttttgccataagcgaactttgtgcctgtcctagaagtgaaaattgttcagtccaagaaactgatgttatttgatttatttaaaggctaaaatttgtttttttattctttgcacaattgtttcattgtttgacacttaatgcactcgtcatttgcatacgacagtagcattctgaccacacttgtacgctgtaacctcatctacttctgatgtttttaaaaaatgacttttaacaaggagagggaaaagaaacccactaaattttgctttgtttccttgaagaatgtggcaacactgttttgtgattttatttgtgcaggtcatgcacacagttttgataaagggcagtaacaagtattggggcctatttttttttttttccacaaggcattctctaaagctatgtgaaattttctctgcacctctgtacagagaatacacctgcccctgtatatccttttttcccctcccctccctcccagtggtacttctactaaattgttgtcttgttttttattttttaaataaactgacaaatgacaaaatggtgagcttatgatgtttacataaaagttctataagctgtgtatacagttttttatgtaaaatattaaaagactatgatgatgacattta

SEQ ID NO: 317529 - DNA, 2287 bp, Homo sapiens
cgcagagcggatctgccaccgcagtctggttggagctgttgtcttgtatgctcagcgaggcccggagagacccgggagagagctaggccgagtccaccgcccgagtctgctgcccgagcccgcgttacgcacaaagccgccgatccccggcctggggtgagcagagcgaccaccgcccgggagcagcgcggcgagacgcacggtgcgccctatgcccccgcgcccccaccgcccccgccgcggcagccgaagcgcagcgagagaacgcgccaccgcggggcccgggtgcagctagcgaccctctcgccacctgcgcgcagcccgaggtgagcagtgagcggcgagcgggagggcagcgaggcgttcgcgggccccctcctgctgcccgggcccggcccgctcatggcggccatccgcaagaagctggtggtggtgggcgacggcacattgaggtggacggcaagcaggtggagctggcgctgtgggacacggcgggccaggaggactacgaccgcctgcggccgctctcctacccggacaccgacgtcattctcatgtgcttctcggtggacagcccggactcgctggagaacatccccgagaagtgggtccccgaggtgaagcacttctgtcccaatgtgcccatcatcctggtggccaacaaaaaagacctgcgcagcgacgagcatgtccgcacagagctggcccgcatgaagcaggaacccgtgcgcacggatgacggccgcgccatggccgtgcgcatccaagcctacgactacctcgagtgctctgccaagaccaaggaaggcgtgcgcgaggtcttcgagacggccacgcgcgccgcgctgcagaagcgctacggctcccagaacggctgcatcaactgctgcaaggtgctatgagggccgcgcccgtcgcgcctgcccctgccggcacggctccccctcctggaccagtcccccgcgagcccggagaaggggagacccgtgtcccacaaggaccccaccggcctgcctggcatctgtctgctgacgcctctggcttgcgccaggacttggcgtgggcaccgggcgcccccatcccagtgtctgtgtgcgtccagctgtgttgcacaggcctgggctccccactgagtgccaagggtcccctgagcatgcttttctgaagagccgggcctcagagtgtgtggctgtgtgtctgttcgactcccctcgccccattttcaccccacccccgcctctgatccccgggggcgagattggcgcgggagtgtggccgcgccccatcagatgttctcccttcaccagcgggagcttgatatcccttgtctgtaacatagaccccgggtactgcgggaggggagggctgctggggaggatggggggatgttatataaatatagatataattttattttcggagctaagatggtgttatttaagggtggtgatgggtgagcgctctggcccaggctgggccagactcccgcccaagcatgaacaggacttgaccatctttccaacccctggggaagacatttgcaactgacttggggaggacacagcttcagcacagcctctcctgcgggccagcccgctgcgaaccctccaccagctaccggagggaggagggaggatgcgctgtggggttgtttttgccataagcgaactttgtgcctgtcctagaagtgaaaattgttcagtccaagaaactgatgttatttgatttatttaaaggctaaaatttgtttttttattctttgcacaattgtttcattgtttgacacttaatgcactcgtcatttgcatacgacagtagcattctgaccacacttgtacgctgtaacctcatctacttctgatgtttttaaaaaatgacttttaacaaggagagggaaaagaaacccactaaattttgctttgtttccttgaagaatgtggcaacactgttttgtgattttatttgtgcaggtcatgcacacagttttgataaagggcagtaacaagtattggggcctatttttttttttttccacaaggcattctctaaagctatgtgaaattttctctgcacctctgtacagagaatacacctgcccctgtatatccttttttcccctcccctccctcccagtggtacttctactaaattgttgtcttgttttttattttttaaataaactgacaaatgacaaaatggtgagcttatgatgtttacataaaagttctataagctgtgtatacagttttttatgtaaaatattaaaagactatgatgatgacattta

SEQ ID NO: 317530 - DNA, 1775 bp, Homo sapiens
ccttttatccggatattgatgttatttctattgtgcttctcgtgttgtgatattccgtattcgttggataacatttctctctataatgagaagtgggtccccgaggtgaagcacttctgtcccaatgtgcccatcatcctggtggccaacaaaaaagacctgcgcagcgacgagcatgtccgcacagagctggcccgcatgaagcaggaacccgtgcgcacggatgacggccgcgccatggccgtgcgcatccaagcctacgactacctcgagtgctctgccaagaccaaggaaggcgtgcgcgaggtcttcgagacggccacgcgcgccgcgctgcagaagcgctacggctcccagaacggctgcatcaactgctgcaaggtgctatgagggccgcgcccgtcgcgcctgcccctgccggcacggctccccctcctggaccagtcccccgcgagcccggagaaggggagacccgtgtcccacaaggaccccaccggcctgcctggcatctgtctgctgacgcctctggcttgcgccaggacttggcgtgggcaccgggcgcccccatcccagtgtctgtgtgcgtccagctgtgttgcacaggcctgggctccccactgagtgccaagggtcccctgagcatgcttttctgaagagccgggcctcagagtgtgtggctgtgtgtctgttcgactcccctcgccccattttcaccccacccccgcctctgatccccgggggcgagattggcgcgggagtgtggccgcgccccatcagatgttctcccttcaccagcgggagcttgatatcccttgtctgtaacatagaccccgggtactgcgggaggggagggctgctggggaggatggggggatgttatataaatatagatataattttattttcggagctaagatggtgttatttaagggtggtgatgggtgagcgctctggcccaggctgggccagactcccgcccaagcatgaacaggacttgaccatctttccaacccctggggaagacatttgcaactgacttggggaggacacagcttcagcacagcctctcctgcgggccagcccgctgcgaaccctccaccagctaccggagggaggagggaggatgcgctgtggggttgtttttgccataagcgaactttgtgcctgtcctagaagtgaaaattgttcagtccaagaaactgatgttatttgatttatttaaaggctaaaatttgtttttttattctttgcacaattgtttcattgtttgacacttaatgcactcgtcatttgcatacgacagtagcattctgaccacacttgtacgctgtaacctcatctacttctgatgtttttaaaaaatgacttttaacaaggagagggaaaagaaacccactaaattttgctttgtttccttgaagaatgtggcaacactgttttgtgattttatttgtgcaggtcatgcacacagttttgataaagggcagtaacaagtattggggcctatttttttttttttccacaaggcattctctaaagctatgtgaaattttctctgcacctctgtacagagaatacacctgcccctgtatatccttttttcccctcccctccctcccagtggtacttctactaaattgttgtcttgttttttattttttaaataaactgacaaatgacaaaatggtgagcttatgatgtttacataaaagttctataagctgtgtatacagttttttatgtaaaatattaaaagactatgatgatgacattta

SEQ ID NO: 317531 - DNA, 1162 bp, Homo sapiens
cgcagagcggatctgccaccgcagtctggttggagctgttgtcttgtatgctcagcgaggcccggagagacccgggagagagctaggccgagtccaccgcccgagtctgctgcccgagcccgcgttacgcacaaagccgccgatccccggcctggggtgagcagagcgaccaccgccaccagcgggagcttgatatcccttgtctgtaacatagaccccgggtactgcgggaggggagggctgctggggaggatggggggatgttatataaatatagatataattttattttcggagctaagatggtgttatttaagggtggtgatgggtgagcgctctggcccaggctgggccagactcccgcccaagcatgaacaggacttgaccatctttccaacccctggggaagacatttgcaactgacttggggaggacacagcttcagcacagcctctcctgcgggccagcccgctgcgaaccctccaccagctaccggagggaggagggaggatgcgctgtggggttgtttttgccataagcgaactttgtgcctgtcctagaagtgaaaattgttcagtccaagaaactgatgttatttgatttatttaaaggctaaaatttgtttttttattctttgcacaattgtttcattgtttgacacttaatgcactcgtcatttgcatacgacagtagcattctgaccacacttgtacgctgtaacctcatctacttctgatgtttttaaaaaatgacttttaacaaggagagggaaaagaaacccactaaattttgctttgtttccttgaagaatgtggcaacactgttttgtgattttatttgtgcaggtcatgcacacagttttgataaagggcagtaacaagtattggggcctatttttttttttttccacaaggcattctctaaagctatgtgaaattttctctgcacctctgtacagagaatacacctgcccctgtatatccttttttcccctcccctccctcccagtggtacttctactaaattgttgtcttgttttttattttttaaataaactgacaaatgacaaaatggtgagcttatgatgtttacataaaagttctataagctgtgtatacagttttttatgtaaaatattaaaagactatgatgatgacattta

SEQ ID NO: 317532 - DNA, 1153 bp, Homo sapiens
cgcagagcggatctgccaccgcagtctggttggagctgttgtcttgtatgctcagcgaggcccggagagacccgggagagagctaggccgagtccaccgcccgagtctgctgcccgagcccgcgttacgcacaaagccgccgatccccggcctggggtgagcagagcgaccaccgcccgggagcagcgcggcgagacgcacggtgcgccctatgcccccgcgcccccaccgcccccgccgcggcagccgaagcgcagcgagagaacgcgccaccgcggggcccgggtgcagctagcgaccctctcgccacctgcgcgcagcccgaggtgagcagtgagcggcgagcgggagggcagcgaggcgttcgcgggccccctcctgctgcccgggcccggcccgctcatggcggccatccgcaagaagctggtggtggtgggcgacggcgcgtgtggcaagacgtgcctgctgatcgtgttcagtaaggacgagttccccgaggtgtacgtgcccaccgtcttcgagaactatgtggccgacattgaggtggacggcaagcaggtggagctggcgctgtgggacacggcgggccaggaggactacgaccgcctgcggccgctctcctacccggacaccgacgtcattctcatgtgcttctcggtggacagcccggactcgctggagaacatccccgagaagtgggtccccgaggtgaagcacttctgtcccaatgtgcccatcatcctggtggccaacaaaaaagacctgcgcagcgacgagcatgtccgcacagagctggcccgcatgaagcaggaacccgtgcgcacggatgacggccgcgccatggccgtgcgcatccaagcctacgactacctcgagtgctctgccaagaccaaggaaggcgtgcgcgaggtcttcgagacggccacgcgcgccgcgctgcagaagcgctacggctcccagaacggctgcatcaactgctgcaaggtgctatgagggccgcgcccgtcgcgcctgcccctgccggcacggctccccctcctggaccagtcccccgcgagcccggagaaggggagacccgtgtcccacaaggaccccaccggcctgcctggcatctgtctgctgacgccaggcaggccggtggggtccttgtggg

SEQ ID NO: 317533 - DNA, 1417 bp, Homo sapiens
cgcagagcggatctgccaccgcagtctggttggagctgttgtcttgtatgctcagcgaggcccggagagacccgggagagagctaggccgagtccaccgcccgagtctgctgcccgagcccgcgttacgcacaaagccgccgatccccggcctggggtgagcagagcgaccaccgcccgggagcagcgcggcgagacgcacggtgcgccctatgcccccgcgcccccaccgcccccgccgcggcagccgaagcgcagcgagagaacgcgccaccgcggggcccgggtgcagctagcgaccctctcgccacctgcgcgcagcccgaggtgagcagtgagcggcgagcgggagggcagcgaggcgttcgcgggccccctcctgctgcccgggcccggcccgctcatggcggccatccgcaagaagctggtggtggtgggcgacggcgcgtgtggcaagacgtgcctgctgatcgtgttcagtaaggacgagttccccgaggtgtacgtgcccaccgtcttcgagaactatgtggccgacattgaggtggacggcaagcaggtggagctggcgctgtgggacacggcgggccaggaggactacgaccgcctgcggccgctctcctacccggacaccgacgtcattctcatgtgcttctcggtggacagcccggactcgctggagaacatccccgagaagtgggtccccgaggtgaagcacttctgtcccaatgtgcccatcatcctggtggccaacaaaaaagacctgcgcagctgtggggttgtttttgccataagcgaactttgtgcctgtcctagaagtgaaaattgttcagtccaagaaactgatgttatttgatttatttaaaggctaaaatttgtttttttattctttgcacaattgtttcattgtttgacacttaatgcactcgtcatttgcatacgacagtagcattctgaccacacttgtacgctgtaacctcatctacttctgatgtttttaaaaaatgacttttaacaaggagagggaaaagaaacccactaaattttgctttgtttccttgaagaatgtggcaacactgttttgtgattttatttgtgcaggtcatgcacacagttttgataaagggcagtaacaagtattggggcctatttttttttttttccacaaggcattctctaaagctatgtgaaattttctctgcacctctgtacagagaatacacctgcccctgtatatccttttttcccctcccctccctcccagtggtacttctactaaattgttgtcttgttttttattttttaaataaactgacaaatgacaaaatggtgagcttatgatgtttacataaaagttctataagctgtgtatacagttttttatgtaaaatattaaaagactatgatgatgacattta

SEQ ID NO: 317534 - DNA, 1652 bp, Homo sapiens
  misc_feature (1125)..(1126): n is a, c, g, or t
  misc_feature (1137)..(1137): n is a, c, g, or t
cgcagagcggatctgccaccgcagtctggttggagctgttgtcttgtatgctcagcgaggcccggagagacccgggagagagctaggccgagtccaccgcccgagtctgctgcccgagcccgcgttacgcacaaagccgccgatccccggcctggggtgagcagagcgaccaccgcccgggagcagcgcggcgagacgcacggtgcgccctatgcccccgcgcccccaccgcccccgccgcggcagccgaagcgcagcgagagaacgcgccaccgcggggcccgggtgcagctagcgaccctctcgccacctgcgcgcagcccgaggtgagcagtgagcggcgagcgggagggcagcgaggcgttcgcgggccccctcctgctgcccgggcccggcccgctcatggcggccatccgcaagaagctggtggtggtgggcgacggcgcgtgtggcaagacgtgcctgctgatcgtgttcagtaaggacgagttccccgaggtgtacgtgcccaccgtcttcgagaactatgtggccgacattgaggtggacggcaagcaggtggagctggcgctgtgggacacggcgggccaggaggactacgaccgcctgcggccgctctcctacccggacaccgacgtcattctcatgtgcttctcggtggacagcccggactcgctggagaacatccccgagaagtgggtccccgaggtgaagcacttctgtcccaatgtgcccatcatcctggtggccaacaaaaaagacctgcgcagcgacgagcatgtccgcacagagctggcccgcatgaagcaggaacccgtgcgcacggatgacggccgcgccatggccgtgcgcatccaagcctacgactacctcgagtgctctgccaagaccaaggaaggcgtgcgcgaggtcttcgagacggccacgcgcgccgcgctgcagaagcgctacggctcccagaacggctgcatcaactgctgcaaggtgctatgagggccgcgcccgtcgcgcctgcccctgccggcacggctccccctcaccagcgggagcttgatatcccttgtctgtaacatagaccccgggtactgcgggaggggagggctgctggggaggatggcagctctnnattcccttgcngacaaatttcatcctgaagtgcagtgatgggctagtcaccaaagaatgaaattcagcaccggggacatagatcatgataccttaccaacttcttcccaacattgtgtccacctccgtgttgctataacatgtgtcactcatgaacggctatttcttatcgcggccatagccccctattcctacactaaacgctgtagatgtcttcccccctgtggcatcagtaaggaaccaccaagacttcgggcactcgcctactatgttccaaacaccttttttggacaccactttacccctggcggcctaaatttagatactacataacccctgcctgttatacatcgctttgccattttcaacgcgaatggaaaatgcctagtttgcacccccttctagacaatgcttttattgccccccccaatgcccccagtgttggagagcaatcaaccccttgtcaattcactcctacttttcacccggggtaatcccgcgctggcccctctaaatcgccattgatc

SEQ ID NO: 317535 - DNA, 2330 bp, Homo sapiens
cgcagagcggatctgccaccgcagtctggttggagctgttgtcttgtatgctcagcgaggcccggagagacccgggagagagctaggccgagtccaccgcccgagtctgctgcccgagcccgcgttacgcacaaagccgccgatccccggcctggggtgagcagagcgaccaccgcccgggagcagcgcggcgagacgcacggtgcgccctatgcccccgcgcccccaccgcccccgccgcggcagccgaagcgcagcgagagaacgcgccaccgcggggcccgggtgcagctagcgaccctctcgccacctgcgcgcagcccgaggtgagcagtgagcggcgagcgggagggcatggcggccatccgcaagaagctggtggtggtgggcgacggcgcgtgtggcaagacgtgcctgctgatcgtgttcagtaaggacgagttccccgaggtgtacgtgcccaccgtcttcgagaactatgtggccgacattgaggtggacggcaagcaggtggagctggcgctgtgggacacggcgggccaggaggactacgaccgcctgcggccgctctcctacccggacaccgacgtcattctcatgtgcttctcggtggacagcccggactcgctggagaacatccccgagaagtgggtccccgaggtgaagcacttctgtcccaatgtgcccatcatcctggtggccaacaaaaaagacctgcgcagcgacgagcatgtccgcacagagctggcccgcatgaagcaggaacccgtgcgcacggatgacggccgcgccatggccgtgcgcatccaagcctacgactacctcgagtgctctgccaagaccaaggaaggcgtgcgcgaggtcttcgagacggccacgcgcgccgcgctgcagaagcgctacggctcccagaacggctgcatcaactgctgcaaggtgctatgagggccgcgcccgtcgcgcctgcccctgccggcacggctccccctcctggaccagtcccccgcgagcccggagaaggggagacccgtgtcccacaaggaccccaccggcctgcctggcatctgtctgctgacgcctctggcttgcgccaggacttggcgtgggcaccgggcgcccccatcccagtgtctgtgtgcgtccagctgtgttgcacaggcctgggctccccactgagtgccaagggtcccctgagcatgcttttctgaagagccgggcctcagagtgtgtggctgtgtgtctgttcgactcccctcgccccattttcaccccacccccgcctctgatccccgggggcgagattggcgcgggagtgtggccgcgccccatcagatgttctcccttcaccagcgggagcttgatatcccttgtctgtaacatagaccccgggtactgcgggaggggagggctgctggggaggatggggggatgttatataaatatagatataattttattttcggagctaagatggtgttatttaagggtggtgatgggtgagcgctctggcccaggctgggccagactcccgcccaagcatgaacaggacttgaccatctttccaacccctggggaagacatttgcaactgacttggggaggacacagcttcagcacagcctctcctgcgggccagcccgctgcgaaccctccaccagctaccggagggaggagggaggatgcgctgtggggttgtttttgccataagcgaactttgtgcctgtcctagaagtgaaaattgttcagtccaagaaactgatgttatttgatttatttaaaggctaaaatttgtttttttattctttgcacaattgtttcattgtttgacacttaatgcactcgtcatttgcatacgacagtagcattctgaccacacttgtacgctgtaacctcatctacttctgatgtttttaaaaaatgacttttaacaaggagagggaaaagaaacccactaaattttgctttgtttccttgaagaatgtggcaacactgttttgtgattttatttgtgcaggtcatgcacacagttttgataaagggcagtaacaagtattggggcctatttttttttttttccacaaggcattctctaaagctatgtgaaattttctctgcacctctgtacagagaatacacctgcccctgtatatccttttttcccctcccctccctcccagtggtacttctactaaattgttgtcttgttttttattttttaaataaactgacaaatgacaaaatggtgagcttatgatgtttacataaaagttctataagctgtgtatacagttttttatgtaaaatattaaaagactatgatgatgacattta

SEQ ID NO: 317536 - DNA, 2131 bp, Homo sapiens
cgcagagcggatctgccaccgcagtctggttggagctgttgtcttgtatgctcagcgaggcccggagagacccgggagagagctaggccgagtccaccgcccgagtctgctgcccgagcccgcgttacgcacaaagccgccgatccccggcctggggtgagcagagcgaccaccgcccgggagcagcgcggcgagacgcgtgtggcaagacgtgcctgctgatcgtgttcagtaaggacgagttccccgaggtgtacgtgcccaccgtcttcgagaactatgtggccgacattgaggtggacggcaagcaggtggagctggcgctgtgggacacggcgggccaggaggactacgaccgcctgcggccgctctcctacccggacaccgacgtcattctcatgtgcttctcggtggacagcccggactcgctggagaacatccccgagaagtgggtccccgaggtgaagcacttctgtcccaatgtgcccatcatcctggtggccaacaaaaaagacctgcgcagcgacgagcatgtccgcacagagctggcccgcatgaagcaggaacccgtgcgcacggatgacggccgcgccatggccgtgcgcatccaagcctacgactacctcgagtgctctgccaagaccaaggaaggcgtgcgcgaggtcttcgagacggccacgcgcgccgcgctgcagaagcgctacggctcccagaacggctgcatcaactgctgcaaggtgctatgagggccgcgcccgtcgcgcctgcccctgccggcacggctccccctcctggaccagtcccccgcgagcccggagaaggggagacccgtgtcccacaaggaccccaccggcctgcctggcatctgtctgctgacgcctctggcttgcgccaggacttggcgtgggcaccgggcgcccccatcccagtgtctgtgtgcgtccagctgtgttgcacaggcctgggctccccactgagtgccaagggtcccctgagcatgcttttctgaagagccgggcctcagagtgtgtggctgtgtgtctgttcgactcccctcgccccattttcaccccacccccgcctctgatccccgggggcgagattggcgcgggagtgtggccgcgccccatcagatgttctcccttcaccagcgggagcttgatatcccttgtctgtaacatagaccccgggtactgcgggaggggagggctgctggggaggatggggggatgttatataaatatagatataattttattttcggagctaagatggtgttatttaagggtggtgatgggtgagcgctctggcccaggctgggccagactcccgcccaagcatgaacaggacttgaccatctttccaacccctggggaagacatttgcaactgacttggggaggacacagcttcagcacagcctctcctgcgggccagcccgctgcgaaccctccaccagctaccggagggaggagggaggatgcgctgtggggttgtttttgccataagcgaactttgtgcctgtcctagaagtgaaaattgttcagtccaagaaactgatgttatttgatttatttaaaggctaaaatttgtttttttattctttgcacaattgtttcattgtttgacacttaatgcactcgtcatttgcatacgacagtagcattctgaccacacttgtacgctgtaacctcatctacttctgatgtttttaaaaaatgacttttaacaaggagagggaaaagaaacccactaaattttgctttgtttccttgaagaatgtggcaacactgttttgtgattttatttgtgcaggtcatgcacacagttttgataaagggcagtaacaagtattggggcctatttttttttttttccacaaggcattctctaaagctatgtgaaattttctctgcacctctgtacagagaatacacctgcccctgtatatccttttttcccctcccctccctcccagtggtacttctactaaattgttgtcttgttttttattttttaaataaactgacaaatgacaaaatggtgagcttatgatgtttacataaaagttctataagctgtgtatacagttttttatgtaaaatattaaaagactatgatgatgacattta

SEQ ID NO: 317537 - DNA, 2169 bp, Homo sapiens
cgcagagcggatctgccaccgcagtctggttggagctgttgtcttgtatgctcagcgaggcccggagagacccgggagagagctaggccgagtccaccgcccgagtctgctgcccgagcccgcgttacgcacaaagccgccgatccccggcctggggtgagcagagcgaccaccgcccgggagcagcgcggcgagacgcacggtgcgccctatgcccccgcgcccccaccgcccccgccgcggcagccgaagcgcagcgagagaacgcgccaccgcggggcccgggtgcagctagcgaccctctcgccacctgcgcgcagcccgagacattgaggtggacggcaagcaggtggagctggcgctgtgggacacggcgggccaggaggactacgaccgcctgcggccgctctcctacccggacaccgacgtcattctcatgtgcttctcggtggacagcccggactcgctggagaacatccccgagaagtgggtccccgaggtgaagcacttctgtcccaatgtgcccatcatcctggtggccaacaaaaaagacctgcgcagcgacgagcatgtccgcacagagctggcccgcatgaagcaggaacccgtgcgcacggatgacggccgcgccatggccgtgcgcatccaagcctacgactacctcgagtgctctgccaagaccaaggaaggcgtgcgcgaggtcttcgagacggccacgcgcgccgcgctgcagaagcgctacggctcccagaacggctgcatcaactgctgcaaggtgctatgagggccgcgcccgtcgcgcctgcccctgccggcacggctccccctcctggaccagtcccccgcgagcccggagaaggggagacccgtgtcccacaaggaccccaccggcctgcctggcatctgtctgctgacgcctctggcttgcgccaggacttggcgtgggcaccgggcgcccccatcccagtgtctgtgtgcgtccagctgtgttgcacaggcctgggctccccactgagtgccaagggtcccctgagcatgcttttctgaagagccgggcctcagagtgtgtggctgtgtgtctgttcgactcccctcgccccattttcaccccacccccgcctctgatccccgggggcgagattggcgcgggagtgtggccgcgccccatcagatgttctcccttcaccagcgggagcttgatatcccttgtctgtaacatagaccccgggtactgcgggaggggagggctgctggggaggatggggggatgttatataaatatagatataattttattttcggagctaagatggtgttatttaagggtggtgatgggtgagcgctctggcccaggctgggccagactcccgcccaagcatgaacaggacttgaccatctttccaacccctggggaagacatttgcaactgacttggggaggacacagcttcagcacagcctctcctgcgggccagcccgctgcgaaccctccaccagctaccggagggaggagggaggatgcgctgtggggttgtttttgccataagcgaactttgtgcctgtcctagaagtgaaaattgttcagtccaagaaactgatgttatttgatttatttaaaggctaaaatttgtttttttattctttgcacaattgtttcattgtttgacacttaatgcactcgtcatttgcatacgacagtagcattctgaccacacttgtacgctgtaacctcatctacttctgatgtttttaaaaaatgacttttaacaaggagagggaaaagaaacccactaaattttgctttgtttccttgaagaatgtggcaacactgttttgtgattttatttgtgcaggtcatgcacacagttttgataaagggcagtaacaagtattggggcctatttttttttttttccacaaggcattctctaaagctatgtgaaattttctctgcacctctgtacagagaatacacctgcccctgtatatccttttttcccctcccctccctcccagtggtacttctactaaattgttgtcttgttttttattttttaaataaactgacaaatgacaaaatggtgagcttatgatgtttacataaaagttctataagctgtgtatacagttttttatgtaaaatattaaaagactatgatgatgacattta

SEQ ID NO: 317538 - DNA, 2743 bp, Homo sapiens
tcaaacaagtaattttatttaccttttcatgttttaccaacctgtcctccccctaggccttgagtgttttcacgttttcctttcagtgtttgggagctggggactactagggtatcagcattcatttccgccggcgggccccccgcccaggtttcttttctcctcggcgccttcgggtgggggcaggaggagcagagggagttggggatgggggtggttttaagccccaaataccatctcatccctgagtagtcttctccaaccctggtcacccactttcaagtccagcccccattttcctccctaaactcccatcctcagccctgaaaaatcctcttctccgctcctagcatatccacggatccaaccctaagtgactctcaaacctaccctctccctcaatttgtgacccagccccaaactccatcattgctctcctgtccctcaccatatatcccttcttttgctcagtctgggccggggccctgtgccgctgaagacatggagtttgtgtctggataccgggatgagttccttgatttcactgcccttctcttcggctggttccgaaagtttgtggcagagcgtggagctgtagggactagccttgagggccgctgccggcagctggaggcccagatcagaaggctaccccaggaccctgccctttgggtgctccatgtcctgcccaaccatagtgtgggcatcagcctggggcaaggggcagaaccaggtcctggaccaggcctggggactgcctggctcctgggagacaaccctccactccacctgcgagacctgagcccctacatcagctttgtcagcctagaggatggggaggaaggggaggaggaagaggaggaagatgaagaagaagagaagagagaggacgggggtgcaggcagcacagagaaggtggaaccagaggaggaccgggagctagcccctaccagcagggagtccccccaggaaacaaaccctccaggagagtcagaggaggctgcccgggaggcaggaggtggcaaggatggctgccgagaggacagggtggagaacgaaacaagaccccagaagaggaagggacagaggagtgaggctgcccccctgcacgtttcctgtctcttacttgtgacggatgagcatggcaccatcttgggcattgatctgctagtggatggagcccagggaaccgcaagctggggctcagggaccaaggacctggctccttgggcctatgctctcctctgtcacagcatggcctgtcccatgggctctggggatccccgaaagccccgacagcttactgtgggagatgcccggctgcatcgagagctggagagcttggtcccaaggctaggtgtgaagttagccaaaaccccaatgcggacatggggtccccggccaggcttcacctttgcttcccttcgtgctcgaacctgccatgtgtgtcacaggcacagctttgaagcgaagctgacaccttgcccccagtgtagtgctgtcttgtattgtggagaggcttgtctccgggctgactggcagcggtgcccagatgatgtgagtcaccgattttggtgcccaaggcttgcagccttcatggagcgggcaggagaactggcaaccctaccttttacctacaccgcagaggtgaccagtgaaaccttcaacaaagaggccttcctggcctctcggggcctcactcgtggctattggacccagctcagcatgctgattccaggcccgggcttctccagacacccccgaggcaacacgccatccctcagccttcttcgcggtggagacccctaccagcttctccagggagacgggactgccctgatgcctcctgtgcccccacatccaccccggggtgtttttgtccctgagctcaacatccaaaacaaacagtcactgaagatccacgtggtggaggccgggaaggagtttgaccttgtcatggtgttttgggagcttttggtcctgctcccccatgtggccctggagctgcagtttgtaggtgatggcctgccccccgaaagcgacgagcagcattttaccctgcagagggacagcctggaggtgtctgtccggcctggttccggcatatcagcacggcccagctctggcactaaggagaaagggggccgcagggacctgcagatcaaggtgtcagcaaggccctaccacctgttccaggggcccaagcctgacctggttattggatttaactccgggtttgctctcaaggatacgtggctgaggtctctgccccggttacagtccctccgagtgccagccttcttcaccgagagcagcgagtacagctgtgtgatggacggccagaccatggcggtggccactggagggggcaccagccctccccagcccaaccccttccgctccccctttcgcctcagagcggccgacaactgcatgtcctggtactgcaatgccttcatcttccacctggtttacaagcctgctcaagggagcggggcccgcccggcgcccgggcccccacccccatccccaactccctctgctcctcctgcccccacccgaaggcgccgaggagaaaagaaacctgggcggggggcccgccggcggaaatgaatgctgataccctagtagtccccagctcccaaacactgaaaggaaaacgtgaaaacactcaaggcctagggggaggacaggttggtaaaacatgaaaaggtaaataaaattacttgtttgaaaaaaaaga

SEQ ID NO: 317539 - DNA, 2860 bp, Homo sapiens
tcaaacaagtaattttatttaccttttcatgttttaccaacctgtcctccccctaggccttgagtgttttcacgttttcctttcagtgtttgggagctggggactactagggtatcagcattcatttccgccggcgggccccccgcccaggtttcttttctcctcggcgccttcgggtgggggcaggaggagcagagggagttggggatgggggtggttttaagccccaaataccatctcatccctgagtagtcttctccaaccctggtcacccactttcaagtccagcccccattttcctccctaaactcccatcctcagccctgaaaaatcctcttctccgctcctagcatatccacggatccaaccctaagtgactctcaaacctaccctctccctcaatttgtgacccagccccaaactccatcattgctctcctgtccctcaccatatatcccttcttttgctcagtctgggccggggccctgtgccgctgaagacatggagtttgtgtctggataccgggatgagttccttgatttcactgcccttctcttcggctggttccgaaagtttgtggcagagcgtggagctgtagggactagccttgagggccgctgccggcagctggaggcccagatcagaaggctaccccaggaccctgccctttgggtgctccatgtcctgcccaaccatagtgtgggcatcagcctggggcaaggggcagaaccaggtcctggaccaggcctggggactgcctggctcctgggagacaaccctccactccacctgcgagacctgagcccctacatcagctttgtcagcctagaggatggggaggaaggggaggaggaagaggaggaagatgaagaagaagagaagagagaggacgggggtgcaggcagcacagagaaggtggaaccagaggaggaccgggagctagcccctaccagcagggagtccccccaggaaacaaaccctccaggagagtcagaggaggctgcccgggaggcaggaggtggcaaggatggctgccgagaggacagggtggagaacgaaacaagaccccagaagaggaagggacagaggagtgaggctgcccccctgcacgtttcctgtctcttacttgtgacggatgagcatggcaccatcttgggcattgatctgctagtggatggagcccagggaaccgcaagctggggctcagggaccaaggacctggctccttgggcctatgctctcctctgtcacagcatggcctgtcccatgggctctggggatccccgaaagccccgacagcttactgtgggagatgcccggctgcatcgagagctggagagcttggtcccaaggctaggtgtgaagttagccaaaaccccaatgcggacatggggtccccggccaggcttcacctttgcttcccttcgtgctcgaacctgccatgtgtgtcacaggcacagctttgaagcgaagctgacaccttgcccccagtgtagtgctgtcttgtattgtggagaggcttgtctccgggctgactggcagcggtgcccagatgatgtgagtcaccgattttggtgcccaaggcttgcagccttcatggagcgggcaggagaactggcaaccctaccttttacctacaccgcagaggtgaccagtgaaaccttcaacaaagaggccttcctggcctctcggggcctcactcgtggctattggacccagctcagcatgctgattccaggcccgggcttctccagacacccccgaggcaacacgccatccctcagccttcttcgcggtggagacccctaccagcttctccagggagacgggactgccctgatgcctcctgtgcccccacatccaccccggggtgtttttggctcatggcaggattactacacatggcggggcctcagcttggactcccccatagccgtgcttctcacctacccgctgaccgtgtactacgtcatcacccacctggtgccccagtccttccctgagctcaacatccaaaacaaacagtcactgaagatccacgtggtggaggccgggaaggagtttgaccttgtcatggtgttttgggagcttttggtcctgctcccccatgtggccctggagctgcagtttgtaggtgatggcctgccccccgaaagcgacgagcagcattttaccctgcagagggacagcctggaggtgtctgtccggcctggttccggcatatcagcacggcccagctctggcactaaggagaaagggggccgcagggacctgcagatcaaggtgtcagcaaggccctaccacctgttccaggggcccaagcctgacctggttattggatttaactccgggtttgctctcaaggatacgtggctgaggtctctgccccggttacagtccctccgagtgccagccttcttcaccgagagcagcgagtacagctgtgtgatggacggccagaccatggcggtggccactggagggggcaccagccctccccagcccaaccccttccgctccccctttcgcctcagagcggccgacaactgcatgtcctggtactgcaatgccttcatcttccacctggtttacaagcctgctcaagggagcggggcccgcccggcgcccgggcccccacccccatccccaactccctctgctcctcctgcccccacccgaaggcgccgaggagaaaagaaacctgggcggggggcccgccggcggaaatgaatgctgataccctagtagtccccagctcccaaacactgaaaggaaaacgtgaaaacactcaaggcctagggggaggacaggttggtaaaacatgaaaaggtaaataaaattacttgtttgaaaaaaaaga

SEQ ID NO: 317540 - DNA, 1081 bp, Homo sapiens
ccttctttcatcctctcaggagacccctaccagcttctccagggagacgggactgccctgatgcctcctgtgcccccacatccaccccggggtgtttttggctcatggcaggattactacacatggcggggcctcagcttggactcccccatagccgtgcttctcacctacccgctgaccgtgtactacgtcatcacccacctggtgccccagtccttccctgagctcaacatccaaaacaaacagtcactgaagatccacgtggtggaggccgggaaggagtttgaccttgtcatggtgttttgggagcttttggtcctgctcccccatgtggccctggagctgcagtttgtaggtgatggcctgccccccgaaagcgacgagcagcattttaccctgcagagggacagcctggaggtgtctgtccggcctggttccggcatatcagcacggcccagctctggcactaaggagaaagggggccgcagggacctgcagatcaaggtgtcagcaaggccctaccacctgttccaggggcccaagcctgacctggttattggatttaactccgggtttgctctcaaggatacgtggctgaggtctctgccccggttacagtccctccgagtgccagccttcttcaccgagagcagcgagtacagctgtgtgatggacggccagaccatggcggtggccactggagggggcaccagccctccccagcccaaccccttccgctccccctttcgcctcagagcggccgacaactgcatgtcctggtactgcaatgccttcatcttccacctggtttacaagcctgctcaagggagcggggcccgcccggcgcccgggcccccacccccatccccaactccctctgctcctcctgcccccacccgaaggcgccgaggagaaaagaaacctgggcggggggcccgccggcggaaatgaatgctgataccctagtagtccccagctcccaaacactgaaaggaaaacgtgaaaacactcaaggcctagggggaggacaggttggtaaaacatgaaaaggtaaataaaattacttgtttgaaaaaaaaga

SEQ ID NO: 317541 - DNA, 2431 bp, Homo sapiens
gtgtccatcccccttcgtgtgtccatcccccttcgtgtgtccatccgcttcgtgtgtccatcccccttcgtcatggagtttgtgtctggataccgggatgagttccttgatttcactgcccttctcttcggctggttccgaaagtttgtggcagagcgtggagctgtagggactagccttgagggccgctgccggcagctggaggcccagatcagaaggctaccccaggaccctgccctttgggtgctccatgtcctgcccaaccatagtgtgggcatcagcctggggcaaggggcagaaccaggtcctggaccaggcctggggactgcctggctcctgggagacaaccctccactccacctgcgagacctgagcccctacatcagctttgtcagcctagaggatggggaggaaggggaggaggaagaggaggaagatgaagaagaagagaagagagaggacgggggtgcaggcagcacagagaaggtggaaccagaggaggaccgggagctagcccctaccagcagggagtccccccaggaaacaaaccctccaggagagtcagaggaggctgcccgggaggcaggaggtggcaaggatggctgccgagaggacagggtggagaacgaaacaagaccccagaagaggaagggacagaggagtgaggctgcccccctgcacgtttcctgtctcttacttgtgacggatgagcatggcaccatcttgggcattgatctgctagtggatggagcccagggaaccgcaagctggggctcagggaccaaggacctggctccttgggcctatgctctcctctgtcacagcatggcctgtcccatgggctctggggatccccgaaagccccgacagcttactgtgggagatgcccggctgcatcgagagctggagagcttggtcccaaggctaggtgtgaagttagccaaaaccccaatgcggacatggggtccccggccaggcttcacctttgcttcccttcgtgctcgaacctgccatgtgtgtcacaggcacagctttgaagcgaagctgacaccttgcccccagtgtagtgctgtcttgtattgtggagaggcttgtctccgggctgactggcagcggtgcccagatgatgtgagtcaccgattttggtgcccaaggcttgcagccttcatggagcgggcaggagaactggcaaccctaccttttacctacaccgcagaggtgaccagtgaaaccttcaacaaagaggccttcctggcctctcggggcctcactcgtggctattggacccagctcagcatgctgattccaggcccgggcttctccagacacccccgaggcaacacgccatccctcagccttcttcgcggtggagacccctaccagcttctccagggagacgggactgccctgatgcctcctgtgcccccacatccaccccggggtgtttttggctcatggcaggattactacacatggcggggcctcagcttggactcccccatagccgtgcttctcacctacccgctgaccgtgtactacgtcatcacccacctggtgccccagtccttccctgagctcaacatccaaaacaaacagtcactgaagatccacgtggtggaggccgggaaggagtttgaccttgtcatggtgttttgggagcttttggtcctgctcccccatgtggccctggagctgcagtttgtaggtgatggcctgccccccgaaagcgacgagcagcattttaccctgcagagggacagcctggaggtgtctgtccggcctggttccggcatatcagcacggcccagctctggcactaaggagaaagggggccgcagggacctgcagatcaaggtgtcagcaaggccctaccacctgttccaggggcccaagcctgacctggttattggatttaactccgggtttgctctcaaggatacgtggctgaggtctctgccccggttacagtccctccgagtgccagccttcttcaccgagagcagcgagtacagctgtgtgatggacggccagaccatggcggtggccactggagggggcaccagccctccccagcccaaccccttccgctccccctttcgcctcagagcggccgacaactgcatgtcctggtactgcaatgccttcatcttccacctggtttacaagcctgctcaagggagcggggcccgcccggcgcccgggcccccacccccatccccaactccctctgctcctcctgcccccacccgaaggcgccgaggagaaaagaaacctgggcggggggcccgccggcggaaatgaatgctgataccctagtagtccccagctcccaaacactgaaaggaaaacgtgaaaacactcaaggcctagggggaggacaggttggtaaaacatgaaaaggtaaataaaattacttgtttgaaaaaaaaga

SEQ ID NO: 317542 - DNA, 505 bp, Homo sapiens
ggcggctgcaggtaccggaggagtggggcggccgggaggggctaggtctaccggggctgcccgccacgcagatccgagcccagggaaccccctgtttccctttcccataccccacagacgcatccaaaatgcttccctccccaccaaaccgttcccgataggattagccctctctcctctctagccttaatttaaactctgcttttgagggtgtgaactctccaattttaagccccaaataccatctcatccctgagtagtcttctccaaccctggtcacccactttcaagtccagcccccattttcctccctaaactcccatcctcagccctgaaaaatcctcttctccgctcctagcatatccacggatccaaccctaagtgactctcaaacctaccctctccctcaatttgtgacccagccccaaactccatcattgctctcctgtccctcaccatatatcccttcttttgctcagtctgggccggggccctgtgccgctga

SEQ ID NO: 317543 - DNA, 3841 bp, Homo sapiens
agctgtttaaatatgctaatgaaaggatagggcctgaccagtagaacggcgaggcggtgtatcacgtggctcggggacgtgtcaggggcggagcctccgcagcccctgcccgagttaaaaccggagtgtgagagagaaaagcgcttcagtagcgagaggggctgagaaagtggtgacaccgccggggtgcggagggagtccctgaaacttctcccaacagccccagggccaatcttccctcagcccactcccctcttcgccagctcccaggtccccactcctgtaccgggggtggggtggggagccaggcccgtctcccgctgggacacacacaggggccgggagcggggacgggacccccgaggcgggggggacgaaccgacagacagacggctgggcgcccgccccagcgggcaggcaggcaggaggaggcggaggcgggggtacgacggggagcactgggtctggggagtttcctctcaactatcgggggagaaactccccgcagccggaggaaagacccagacagtgttttcctcccgggggccgtgctcccccgccccgcgtagcggcggtcgccgccaccggcgcctccacctctaccatctcctctttctccaccacctcgggccccggtgtccccggccagcactatgcccatcttactgttcctgatagacacgtctgcctctatgaaccagcgcagccatctgggcaccacctacctggacacggccaaaggcgcggtagagaccttcatgaagctccgtgcccgggaccctgccagcagaggagacaggtatatgctggtcactttcgaagagccgccctatgctatcaaggctggatggaaagaaaaccatgcaacgtttatgaatgaattgaaaaaccttcaggctgaaggacttacgactcttggccaatccctaaggacagcttttgatttattaaatttaaatagattagtaactggcatagacaactatgggcagggaagaaacccttttttcttggagccagcaataattatcacaattactgatgggagcaagttgactaccaccagtggagtccaggatgagcttcatttacctcttaattctcctttgcctggaagtgaattgaccaaggaaccttttcgttgggatcagagactctttgcattagtgttgcggttgcctggcaccatgtcagtagaatcagaacagttgacaggtgtgcctttagatgactctgcaatcacaccaatgtgtgaagtgacaggcggccgttcatattctgtgtgttctccaagaatgcttaatcagtgtctggagtccttggtgcagaaagtacaaagtggggtggtaataaactttgaaaaagcaggaccagatccttcccctgtagaagatgggcagccagatatatcaaggccttttggatctcagccttggcatagctgtcacaaactcatatatgtcagaccaaatcctaaaactggggttcctataggtcattggcctgttccagagtctttttggccagatcaaaattcgccaacactaccacctcgtacatctcatcctgtagtgaagttttcctgtacagactgtgaaccaatggttattgataaacttccttttgacaaatatgagttggaaccttcaccactgactcaatttatcctggaaaggaaatctcctcaaacatgttggcaggtgtacgtgagcaatagtgcaaaatacagtgaacttggtcatccttttggttacttgaaagccagtacagcactgaactgtgtcaacttatttgtgatgccttacaattatccagtccttcttcccctcttagatgacttgtttaaagtgcataaagcaaaaccaacattgaagtggagacagtcatttgaaagttatttgaagacaatgcctccctactatcttgggcccttgaagaaagctgttaggatgatgggagcacctaacctaatagcagacagtatggaatatggacttagttacagtgtcatttcatacctcaaaaaactgagtcaacaggccaaaatagaatctgatcgagtcattggatctgtaggcaaaaaagtagtacaggagactggaataaaagtccggagccgatcacatggtttatcaatggcatataggaaagattttcaacaactcctccagggaatttcagaggatgtccctcacagactgctagaccttaatatgaaggaatacactgggttccaagttgctttgctgaataaggatttgaagccacagacatttagaaatgcttatgacataccaagacgaaatcttttggatcacttaacaagaatgagatctaatcttttgaagagcactcgcagatttctgaaaggacaggacgaagatcaagtgcacagtgttcctatagcacaaatggggaactaccaggaatacctcaagcaagtaccttctccactaagagaacttgatcctgatcagccacgaaggttgcatacatttggcaacccctttaagctggataagaagggtatgatgatagatgaagcagatgaatttgtggctggacctcaaaataaacataaacgacccggagaaccaaatatgcaagggatccctaaaagacgtcggtgtatgtctccactactaagaggcagacagcagaatcctgttgtaaacaatcatattgggggaaaaggaccacctgcacctacaactcaagcacagccagatcttattaaacctcttcctcttcataaaatttcagaaaccactaatgattcgataatacatgatgtggttgaaaatcatgttgcagaccaactttcatcagacattacaccaaatgctatggatacggaattttcagcatcttctccagccagtttactggaacggccaaccaatcatatggaggctcttggtcatgaccatttaggaaccaatgacctcactgttggtggatttttagaaaatcatgaggagccaagagataaagaacaatgtgctgaagagaacataccagcatcttcactcaacaaaggaaagaaattgatgcattgcagaagccatgaagaggtcaatactgaactaaaagcacaaataatgaaagagatccgaaagccaggaagaaaatatgaaagaatcttcactttactgaagcatgtgcaaggcagtttacaaacaagactaatatttttacaaaatgtcattaaagaagcatcaaggtttaaaaaacgaatgctaatagaacaactggagaacttcttggatgaaattcatcgaagagccaatcagatcaaccatattaatagcaattaaaagaaaatagaatgtggccacttatttcactatcttcttcaaatacaaagtaaatacaagactgttgtgatcttgcattcattttctgacatgcattgttggctatttgaaatactaaaagcaaatctacagatcctttttccatcattttacagtgaccttttcttcattttggtttatttttgtaatgtgaaaagtatcactctaaaaaacatttttaatttaacaaactaaaaatattcctccaaatctcttgcttgtcattgactcttgcgtgtcaatttccctcaggttctattttcttaaaccaacctttaaaattgtcacctctgttaaggttgaactttgccaaaaaaaaaagaagttactttgtaatttttggggaaaaaagcacatacattaaaactaggtaatgttttgtatatacagttattttggatatattattgtaagttgtacaaatgtattttgaagaatatttaagaaaagcacttttgttattccatcaataaatgctctatttt

SEQ ID NO: 317544 - DNA, 938 bp, Homo sapiens
ggcgggcgggcgctgcgagccgggttcggccggggcccgggctccggccccgggcggtgtgtggggagcgatctgtgtgtgggggacggcgtggaggggtggccgctgcgtgtgcggtactgtgggggcggcggggccgctgggcgccccttctccgcctcgtaacctcgcctctgtgcttccctgtcgcccgccctgttcctcctcccgtcccgcagctccgtgcccgggaccctgccagcagaggagacaggtatatgctggtcactttcgaagagccgccctatgctatcaaggctggatggaaagaaaaccatgcaacgtttatgaatgaattgaaaaaccttcaggctgaaggacttacgactcttggccaatccctaaggacagcttttgatttattaaatttaaatagattagtaactggcatagacaactatgggcagggaagaaacccttttttcttggagccagcaataattatcacaattactgatgggagcaagttgactaccaccagtggagtccaggatgagcttcatttacctcttaattctcctttgcctggaagtgaattgaccaaggaaccttttcgttgggatcagagactctttgcattagtgttgcggttgcctggcaccatgtcagtagaatcagaacagttgacaggtgtgcctttagatgactctgcaatcacaccaatgtgtgaagtgacaggcggcgttcatattccgggtggtctccacagaatgcttaacaggtctggagatcctggtggcaaaagtccacatgggggggataaactttggaaaaacagagccaatcttcccggtgaaaatgggcgccaatataagggcttggaaacaactgggaatggcgacacaattttgaccacctcaaaggggcataagacaggcgcacaattggagaaataaaaa

SEQ ID NO: 317545 - DNA, 758 bp, Homo sapiens
actttcacttgttcttttcagatgtaatactgtagatattaaactttttagacttttatattaggaataaccttagtgcagtgactagaaagacattgaaactatgggctttacatcaaggcaaggctgcattttgatctagacaaggctgttttggtatatttttccccacgctctgtcttttcagattgaattactgatttttccccctttgttttgtttgttgtggttttgatgttttttttcctttcagctaaaggagcagcccagtggttttcaagaagtgctaaagtgcactgactgtctcatgatgactggtgcctcagggagggtcatgattcctggatacaggatcgacctgatcctggatgtcacttcaagcagtcagatcgtggggaaaagccttgtctaatggctagccttcctcaaaagtctgatgctagtcatctcggaaggcctcagaaaaagccttaaaggtgagcagagtagagtgtagttctctctgggggctatgactatttgttggagaatctgattcaacatagaatgacaaccctaaactgataaatccaggttcaattggtaattaactttgagcttataaattggttgatgatgattatcagaccccagcttttgagttagtagaaccaccttgctaagcttaagatctgtaagtgaggaactcggtatttcctggggctcttcacagctttaggttagtatctgttgtcttagaccgaaatagccttgctatc

SEQ ID NO: 317546 - DNA, 707 bp, Homo sapiens
ggcgggcgggcgctgcgagccgggttcggccggggcccgggctccggccccgggcggtgtgtggggagcgatctgtgtgtgggggacggcgtggaggggtggccgctgcgtgtgcggtactgtgggggcggcggggccgctgggcgccccttctccgcctcgtaacctcgcctctgtgcttccctgtcgcccgccctgttcctcctcccgtcccgcagctccgtgcccgggaccctgccagcagaggagacaggtatatgctggtcactttcgaagagccgccctatgctatcaaggctggatggaaagaaaaccatgcaacgtttatgaatgaattgaaaaaccttcaggctgaaggacttacgactcttggccaatccctaaggacagcttttgatttattaaatttaaatagattagtaactggcatagacaactatgggcagggaagaaacccttttttcttggagccagcaataattatcacaattactgatgggagcaagttgactaccaccagtggagtccaggatgaggtactggggacacacagatggaattaagcaaggctagaaaacgtattatctttgaagacaggcaagtaaataaacatttgtaatacattaagataaatctcatggcagaaataaacagaaggttctgagacagcgtaaagaaaggagtaaagttttgagggaagagtaagg

SEQ ID NO: 317547 - DNA, 397 bp, Homo sapiens
ccagatgagagcagtttataaagaattggtgatagttacacttaattttctagacagttgctgcaaaaatacccttccagaatgaattcgttagattttgaattgtgaaagtatattttaaattaattcagcaacagttttccttgtgatacatagttactttggctgtgtataagaatagcggcagctccatacgtttatatttagttctatatttatgttctaggtactggggacacacagatggaattaagcaaggctagaaaacgtattatctttgaagacaggcaagtaaataaacatttgtaatacattaagataaatctcatggcagaaataaacagaaggttctgagacagcgtaaagaaaggagtaaagttttgagggaagagtaagg

SEQ ID NO: 317548 - DNA, 3593 bp, Homo sapiens
agctgtttaaatatgctaatgaaaggatagggcctgaccagtagaacggcgaggcggtgtatcacgtggctcggggacgtgtcaggggcggagcctccgcagcccctgcccgagttaaaaccggagtgtgagagagaaaagcgcttcagtagcgagaggggctgagaaagtggtgacaccgccggggtgcggagggagtccctgaaacttctcccaacagccccagggccaatcttccctcagcccactcccctcttcgccagctcccaggtccccactcctgtaccgggggtggggtggggagccaggcccgtctcccgctgggacacacacaggggccgggagcggggacgggacccccgaggcgggggggacgaaccgacagacagacggctgggcgcccgccccagcgggcaggcaggcaggaggaggcggaggcgggggtacgacggggagcactgggtctggggagtttcctctcaactatcgggggagaaactccccgcagccggaggaaagacccagacagtgttttcctcccgggggccgtgctcccccgccccgcgtagcggcggtcgccgccaccggcgcctccacctctaccatctcctctttctccaccacctcgggccccggtgtccccggccagcactatgcccatcttactgttcctgatagacacgtctgcctctatgaaccagcgcagccatctgggcaccacctacctggacacggccaaaggcgcggtagagaccttcatgaagctccgtgcccgggaccctgccagcagaggagacaggtatatgctggtcactttcgaagagccgccctatgctatcaaggctggatggaaagaaaaccatgcaacgtttatgaatgaattgaaaaaccttcaggctgaaggacttacgactcttggccaatccctaaggacagcttttgatttattaaatttaaatagattagtaactggcatagacaactatgggcagggaagaaacccttttttcttggagccagcaataattatcacaattactgatgggagcaagttgactaccaccagtggagtccaggatgagcttcatttacctcttaattctcctttgcctggaagtgaattgaccaaggaaccttttcgttgggatcagagactctttgcattagtgttgcggttgcctggcaccatgtcagtagaatcagaacagttgacaggtgtgcctttagatgactctgcaatcacaccaatgtgtgaagtgacaggcggccgttcatattctgtgtgttctccaagaatgcttaatcagtgtctggagtccttggtgcagaaagtacaaagtggggtggtaataaactttgaaaaagcaggaccagatccttcccctgtagaagatgggcagccagatatatcaaggccttttggatctcagccttggcatagctgtcacaaactcatatatgtcagaccaaatcctaaaactggggttcctataggtcattggcctgttccagagtctttttggccagatcaaaattcgccaacactaccacctcgtacatctcatcctgtagtgaagttttcctgtacagactgtgaaccaatggttattgataaacttccttttgacaaatatgagttggaaccttcaccactgactcaatttatcctggaaaggaaatctcctcaaacatgttggcaggtgtacgtgagcaatagtgcaaaatacagtgaacttggtcatccttttggttacttgaaagccagtacagcactgaactgtgtcaacttatttgtgatgccttacaattatccagtccttcttcccctcttagatgacttgtttaaagtgcataaagcaaaaccaacattgaagtggagacagtcatttgaaagttatttgaagacaatgcctccctactatcttgggcccttgaagaaagctgttaggatgatgggagcacctaacctaatagcagacagtatggaatatggacttagttacagtgtcatttcatacctcaaaaaactgagtcaacaggccaaaatagaatctgatcgagtcattggatctgtaggcaaaaaagtagtacaggagactggaataaaagtccggagccgatcacatggtttatcaatggcatataggaaagattttcaacaactcctccagggaatttcagaggatgtccctcacagactgctagaccttaatatgaaggaatacactgggttccaagttgctttgctgaataaggatttgaagccacagacatttagaaatgcttatgacataccaagacgaaatcttttggatcacttaacaagaatgagatctaatcttttgaagagcactcgcagatttctgaaaggacaggacgaagatcaagtgcacagtgttcctatagcacaaatggggaactaccaggaatacctcaagcaagtaccttctccactaagagaacttgatcctgatcagccacgaaggttgcatacatttggcaacccctttaagctggataagaagggtatgatgatagatgaagcagatgaatttgtggctggacctcaaaataaacataaacgacccggagaaccaaatatgcaagggatccctaaaagacgtcggtgtatgtctccactactaagaggcagacagcagaatcctgttgtaaacaatcatattgggggaaaaggaccacctgcacctacaactcaagcacagccagatcttattaaacctcttcctcttcataaaatttcagaaaccactaatgattcgataatacatgatgtggttgaaaatcatgttgcagaccaactttcatcagacattacaccaaatgctatggatacggaattttcagcatcttctccagccagtttactggaacggccaaccaatcatatggaggctcttggtcatgaccatttaggaaccaatgacctcactgttggtggatttttagaaaatcatgaggagccaagagataaagaacaatgtgctgaagagaacataccagcatcttcactcaacaaaggaaagaaattgatgcattgcagaagccatgaagaggtcaatactgaactaaaagcacaaataatgaaagagatccgaaagccaggaagaaaatatgaaagaatcttcactttactgaagcatgtgcaaggcagtttacaaacaagactaatatttttacaaaatgtcattaaagaagcatcaaggtttaaaaaacgaatgctaatagaacaactggagaacttcttggatgaaattcatcgaagagccaatcagatcaaccatattaatagcaattaaaagaaaatagaatgtggccacttatttcactatcttcttcaaatacaaagtaaatacaagactgttgtgatcttgcattcattttctgacatgcattgttggctatttgaaatactaaaagcaaatctacagatcctttttccatcattttacagtgaccttttcttcattttggtttatttttgtaatgtgaaaagtatcactctaaaaaacatttttaatttaacaaactaaaaatattcctccaaatctcttgcttgtcattgactcttgcgt

SEQ ID NO: 317549 - DNA, 4130 bp, Homo sapiens
agctgtttaaatatgctaatgaaaggatagggcctgaccagtagaacggcgaggcggtgtatcacgtggctcggggacgtgtcaggggcggagcctccgcagcccctgcccgagttaaaaccggagtgtgagagagaaaagcgcttcagtagcgagaggggctgagaaagtggtgacaccgccggggtgcggagggagtccctgaaacttctcccaacagccccagggccaatcttccctcagcccactcccctcttcgccagctcccaggtccccactcctgtaccgggggtggggtggggagccaggcccgtctcccgctgggacacacacaggggccgggagcggggacgggacccccgaggcgggggggacgaaccgacagacagacggctgggcgcccgccccagcgggcaggcaggcaggaggaggcggaggcgggggtacgacggggagcactgggtctggggagtttcctctcaactatcgggggagaaactccccgcagccggaggaaagacccagacagtgttttcctcccgggggccgtgctcccccgccccgcgtagcggcggtcgccgccaccggcgcctccacctctaccatctcctctttctccaccacctcgggccccggtgtccccggccagcactatgcccatcttactgttcctgatagacacgtctgcctctatgaaccagcgcagccatctgggcaccacctacctggacacggccaaaggcgcggtagagaccttcatgaagctccgtgcccgggaccctgccagcagaggagacaggtatatgctggtcactttcgaagagccgccctatgctatcaaggctggatggaaagaaaaccatgcaacgtttatgaatgaattgaaaaaccttcaggctgaaggacttacgactcttggccaatccctaaggacagcttttgatttattaaatttaaatagattagtaactggcatagacaactatgggcagggaagaaacccttttttcttggagccagcaataattatcacaattactgatgggagcaagttgactaccaccagtggagtccaggatgagcttcatttacctcttaattctcctttgcctggaagtgaattgaccaaggaaccttttcgttgggatcagagactctttgcattagtgttgcggttgcctggcaccatgtcagtagaatcagaacagttgacaggtgtgcctttagatgactctgcaatcacaccaatgtgtgaagtgacaggcggccgttcatattctgtgtgttctccaagaatgcttaatcagtgtctggagtccttggtgcagaaagtacaaagtggggtggtaataaactttgaaaaagcaggaccagatccttcccctgtagaagatgggcagccagatatatcaaggccttttggatctcagccttggcatagctgtcacaaactcatatatgtcagaccaaatcctaaaactggggttcctataggtcattggcctgttccagagtctttttggccagatcaaaattcgccaacactaccacctcgtacatctcatcctgtagtgaagttttcctgtacagactgtgaaccaatggttattgataaacttccttttgacaaatatgagttggaaccttcaccactgactcaatttatcctggaaaggaaatctcctcaaacatgttggcaggtgtacgtgagcaatagtgcaaaatacagtgaacttggtcatccttttggttacttgaaagccagtacagcactgaactgtgtcaacttatttgtgatgccttacaattatccagtccttcttcccctcttagatgacttgtttaaagtgcataaagcaaaaccaacattgaagtggagacagtcatttgaaagttatttgaagacaatgcctccctactatcttgggcccttgaagaaagctgttaggatgatgggagcacctaacctaatagcagacagtatggaatatggacttagttacagtgtcatttcatacctcaaaaaactgagtcaacaggccaaaatagaatctgatcgagtcattggatctgtaggcaaaaaagtagtacaggagactggaataaaagtccggagccgatcacatggtttatcaatggcatataggaaagattttcaacaactcctccagggaatttcagaggatgtccctcacagactgctagaccttaatatgaaggaatacactgggttccaagttgctttgctgaataaggatttgaagccacagacatttagaaatgcttatgacataccaagacgaaatcttttggatcacttaacaagaatgagatctaatcttttgaagagcactcgcagatttctgaaaggacaggacgaagatcaagtgcacagtgttcctatagcacaaatggggaactaccaggaatacctcaagcaagtaccttctccactaagagaacttgatcctgatcagccacgaaggttgcatacatttggcaacccctttaagctggataagaagggtatgatgatagatgaagcagatgaatttgtggctggacctcaaaataaacataaacgacccggagaaccaaatatgcaagggatccctaaaagacgtcggtgtatgtctccactactaagaggcagacagcagaatcctgttgtaaacaatcatattgggggaaaaggaccacctgcacctacaactcaagcacagccagatcttattaaacctcttcctcttcataaaatttcagaaaccactaatgattcgataatacatgatgtggttgaaaatcatgttgcagaccaactttcatcagacattacaccaaatgctatggatacggaattttcagcatcttctccagccagtttactggaacggccaaccaatcatatggaggctcttggtcatgaccatttaggaaccaatgacctcactgttggtggatttttagaaaatcatgaggagccaagagataaagaacaatgtgctgaagagaacataccagcatcttcactcaacaaaggaaagaaattgatgcattgcagaagccatgaagaggtcaatactgaactaaaagcacaaataatgaaagagatccgaaagccaggaagaaaatatgaaagaatcttcactttactgaagcatgtgcaaggcagtttacaaacaagactaatatttttacaaaatgtcattaaagaagcatcaaggtttaaaaaacgaatgctaatagaacaactggagaacttcttggatgaaattcatcgaagagccaatcagatcaaccatattaatagcaattaaaagaaaatagaatgtggccacttatttcactatcttcttcaaatacaaagtaaatacaagactgttgtgatcttgcattcattttctgacatgcattgttggctatttgaaatactaaaagcaaatctacagatcctttttccatcattttacagtgaccttttcttcattttggtttatttttgtaatgtgaaaagtatcactctaaaaaacatttttaatttaacaaactaaaaatattcctccaaatctcttgcttgtcattgactcttgcgtgtcaatttccctcaggttctattttcttaaaccaacctttaaaattgtcacctctgttaaggttgaactttgccaaaaaaaaaagaagttactttgtaatttttggggaaaaaagcacatacattaaaactaggtaatgttttgtatatacagttattttggatatattattgtaagttgtacaaatgtattttgaagaatatttaagaaaagcacttttgttattccatcaataaatgctctattttactcttgtgtggtttaggaaataatcacatttaaagtaatcatttaaaaacatcctaagataatggaattttaaaggccttgctttttagcattggaaaaatacaccacttgaagttcatgtttgttaagcctaactgtaattacatgttacataatctgcattgcctttttactatatgttcgtagtttttgttggccatgccaacatactcccatttctgcctagattatgggaatgactttgtatggggcagatagacagatactttaaaagctatttaaaaagca

SEQ ID NO: 317550 - DNA, 3848 bp, Homo sapiens
  misc_feature (3842)..(3843): n is a, c, g, or t
  misc_feature (3845)..(3845): n is a, c, g, or t
  misc_feature (3847)..(3848): n is a, c, g, or t
agctgtttaaatatgctaatgaaaggatagggcctgaccagtagaacggcgaggcggtgtatcacgtggctcggggacgtgtcaggggcggagcctccgcagcccctgcccgagttaaaaccggagtgtgagagagaaaagcgcttcagtagcgagaggggctgagaaagtggtgacaccgccggggtgcggagggagtccctgaaacttctcccaacagccccagggccaatcttccctcagcccactcccctcttcgccagctcccaggtccccactcctgtaccgggggtggggtggggagccaggcccgtctcccgctgggacacacacaggggccgggagcggggacgggacccccgaggcgggggggacgaaccgacagacagacggctgggcgcccgccccagcgggcaggcaggcaggaggaggcggaggcgggggtacgacggggagcactgggtctggggagtttcctctcaactatcgggggagaaactccccgcagccggaggaaagacccagacagtgttttcctcccgggggccgtgctcccccgccccgcgtagcggcggtcgccgccaccggcgcctccacctctaccatctcctctttctccaccacctcgggccccggtgtccccggccagcactatgcccatcttactgttcctgatagacacgtctgcctctatgaaccagcgcagccatctgggcaccacctacctggacacggccaaaggcgcggtagagaccttcatgaagctccgtgcccgggaccctgccagcagaggagacaggtatatgctggtcactttcgaagagccgccctatgctatcaaggctggatggaaagaaaaccatgcaacgtttatgaatgaattgaaaaaccttcaggctgaaggacttacgactcttggccaatccctaaggacagcttttgatttattaaatttaaatagattagtaactggcatagacaactatgggcagggaagaaacccttttttcttggagccagcaataattatcacaattactgatgggagcaagttgactaccaccagtggagtccaggatgagcttcatttacctcttaattctcctttgcctggaagtgaattgaccaaggaaccttttcgttgggatcagagactctttgcattagtgttgcggttgcctggcaccatgtcagtagaatcagaacagttgacaggtgtgcctttagatgactctgcaatcacaccaatgtgtgaagtgacaggcggccgttcatattctgtgtgttctccaagaatgcttaatcagtgtctggagtccttggtgcagaaagtacaaagtggggtggtaataaactttgaaaaagcaggaccagatccttcccctgtagaagatgggcagccagatatatcaaggccttttggatctcagccttggcatagctgtcacaaactcatatatgtcagaccaaatcctaaaactggggttcctataggtcattggcctgttccagagtctttttggccagatcaaaattcgccaacactaccacctcgtacatctcatcctgtagtgaagttttcctgtacagactgtgaaccaatggttattgataaacttccttttgacaaatatgagttggaaccttcaccactgactcaatttatcctggaaaggaaatctcctcaaacatgttggcaggtgtacgtgagcaatagtgcaaaatacagtgaacttggtcatccttttggttacttgaaagccagtacagcactgaactgtgtcaacttatttgtgatgccttacaattatccagtccttcttcccctcttagatgacttgtttaaagtgcataaagcaaaaccaacattgaagtggagacagtcatttgaaagttatttgaagacaatgcctccctactatcttgggcccttgaagaaagctgttaggatgatgggagcacctaacctaatagcagacagtatggaatatggacttagttacagtgtcatttcatacctcaaaaaactgagtcaacaggccaaaatagaatctgatcgagtcattggatctgtaggcaaaaaagtagtacaggagactggaataaaagtccggagccgatcacatggtttatcaatggcatataggaaagattttcaacaactcctccagggaatttcagaggatgtccctcacagactgctagaccttaatatgaaggaatacactgggttccaagttgctttgctgaataaggatttgaagccacagacatttagaaatgcttatgacataccaagacgaaatcttttggatcacttaacaagaatgagatctaatcttttgaagagcactcgcagatttctgaaaggacaggacgaagatcaagtgcacagtgttcctatagcacaaatggggaactaccaggaatacctcaagcaagtaccttctccactaagagaacttgatcctgatcagccacgaaggttgcatacatttggcaacccctttaagctggataagaagggtatgatgatagatgaagcagatgaatttgtggctggacctcaaaataaacataaacgacccggagaaccaaatatgcaagggatccctaaaagacgtcggtgtatgtctccactactaagaggcagacagcagaatcctgttgtaaacaatcatattgggggaaaaggaccacctgcacctacaactcaagcacagccagatcttattaaacctcttcctcttcataaaatttcagaaaccactaatgattcgataatacatgatgtggttgaaaatcatgttgcagaccaactttcatcagacattacaccaaatgctatggatacggaattttcagcatcttctccagccagtttactggaacggccaaccaatcatatggaggctcttggtcatgaccatttaggaaccaatgacctcactgttggtggatttttagaaaatcatgaggagccaagagataaagaacaatgtgctgaagagaacataccagcatcttcactcaacaaaggaaagaaattgatgcattgcagaagccatgaagaggtcaatactgaactaaaagcacaaataatgaaagagatccgaaagccaggaagaaaatatgaaagaatcttcactttactgaagcatgtgcaaggcagtttacaaacaagactaatatttttacaaaatgtcattaaagaagcatcaaggtttaaaaaacgaatgctaatagaacaactggagaacttcttggatgaaattcatcgaagagccaatcagatcaaccatattaatagcaattaaaagaaaatagaatgtggccacttatttcactatcttcttcaaatacaaaatgggaaaatcaagacttaaagagtttaagaaacttgcccaagatgacataatgagtatgtgatggacctcgattcaaatcaagcctgtgtgtgtgcagagcccatgctctagtcacctacattttgctacctcccatctcgtgtggcatctcacatatagtaggtgcagaaaagaggctgttgactaattgccttattgacaattaatagagtattttatttaatagagtgtttatactggataaaatatattttcatatttgctgtgtgcactttatgcctttggagcacagtgggaaaagaatggaacttaaagccttggttttcctagtaaaccctttgagcacaaagaatcactacaccaattttatatttccccagggacaaggcatttaaaaatttactgttgaaggatactttaaaagggctgctgatattatttttctttgaaaataaaaaagatcaaaatggaaannanann

SEQ ID NO: 317551 - DNA, 3108 bp, Homo sapiens
ggcgggcgggcgctgcgagccgggttcggccggggcccgggctccggccccgggcggtgtgtggggagcgatctgtgtgtgggggacggcgtggaggggtggccgctgcgtgtgcggtactgtgggggcggcggggccgctgggcgccccttctccgcctcgtaacctcgcctctgtgcttccctgtcgcccgccctgttcctcctcccgtcccgcagctccgtgcccgggaccctgccagcagaggagacaggtatatgctggtcactttcgaagagccgccctatgctatcaaggctggatggaaagaaaaccatgcaacgtttatgaatgaattgaaaaaccttcaggctgaaggacttacgactcttggccaatccctaaggacagcttttgatttattaaatttaaatagattagtaactggcatagacaactatgggcagggaagaaacccttttttcttggagccagcaataattatcacaattactgatgggagcaagttgactaccaccagtggagtccaggatgaggtactggggacacacagatggaattaagcaaggctagaaaacgtattatctttgaagacagcttcatttacctcttaattctcctttgcctggaagtgaattgaccaaggaaccttttcgttgggatcagagactctttgcattagtgttgcggttgcctggcaccatgtcagtagaatcagaacagttgacaggtgtgcctttagatgactctgcaatcacaccaatgtgtgaagtgacaggcggccgttcatattctgtgtgttctccaagaatgcttaatcagtgtctggagtccttggtgcagaaagtacaaagtggggtggtaataaactttgaaaaagcaggaccagatccttcccctgtagaagatgggcagccagatatatcaaggccttttggatctcagccttggcatagctgtcacaaactcatatatgtcagaccaaatcctaaaactggggttcctataggtcattggcctgttccagagtctttttggccagatcaaaattcgccaacactaccacctcgtacatctcatcctgtagtgaagttttcctgtacagactgtgaaccaatggttattgataaacttccttttgacaaatatgagttggaaccttcaccactgactcaatttatcctggaaaggaaatctcctcaaacatgttggcaggtgtacgtgagcaatagtgcaaaatacagtgaacttggtcatccttttggttacttgaaagccagtacagcactgaactgtgtcaacttatttgtgatgccttacaattatccagtccttcttcccctcttagatgacttgtttaaagtgcataaagcaaaaccaacattgaagtggagacagtcatttgaaagttatttgaagacaatgcctccctactatcttgggcccttgaagaaagctgttaggatgatgggagcacctaacctaatagcagacagtatggaatatggacttagttacagtgtcatttcatacctcaaaaaactgagtcaacaggccaaaatagaatctgatcgagtcattggatctgtaggcaaaaaagtagtacaggagactggaataaaagtccggagccgatcacatggtttatcaatggcatataggaaagattttcaacaactcctccagggaatttcagaggatgtccctcacagactgctagaccttaatatgaaggaatacactgggttccaagttgctttgctgaataaggatttgaagccacagacatttagaaatgcttatgacataccaagacgaaatcttttggatcacttaacaagaatgagatctaatcttttgaagagcactcgcagatttctgaaaggacaggacgaagatcaagtgcacagtgttcctatagcacaaatggggaactaccaggaatacctcaagcaagtaccttctccactaagagaacttgatcctgatcagccacgaaggttgcatacatttggcaacccctttaagctggataagaagggtatgatgatagatgaagcagatgaatttgtggctggacctcaaaataaacataaacgacccggagaaccaaatatgcaagggatccctaaaagacgtcggtgtatgtctccactactaagaggcagacagcagaatcctgttgtaaacaatcatattgggggaaaaggaccacctgcacctacaactcaagcacagccagatcttattaaacctcttcctcttcataaaatttcagaaaccactaatgattcgataatacatgatgtggttgaaaatcatgttgcagaccaactttcatcagacattacaccaaatgctatggatacggaattttcagcatcttctccagccagtttactggaacggccaaccaatcatatggaggctcttggtcatgaccatttaggaaccaatgacctcactgttggtggatttttagaaaatcatgaggagccaagagataaagaacaatgtgctgaagagaacataccagcatcttcactcaacaaaggaaagaaattgatgcattgcagaagccatgaagaggtcaatactgaactaaaagcacaaataatgaaagagatccgaaagccaggaagaaaatatgaaagaatcttcactttactgaagcatgtgcaaggcagtttacaaacaagactaatatttttacaaaatgtcattaaagaagcatcaaggtttaaaaaacgaatgctaatagaacaactggagaacttcttggatgaaattcatcgaagagccaatcagatcaaccatattaatagcaattaaaagaaaatagaatgtggccacttatttcactatcttcttcaaatacaaagtaaatacaagactgttgtgatcttgcattcattttctgacatgcattgttggctatttgaaatactaaaagcaaatctacagatcctttttccatcattttacagtgaccttttcttcattttggtttatttttgtaatgtgaaaagtatcactctaaaaaacatttttaatttaacaaactaaaaatattcctccaaatctcttgcttgtcattgactcttgcgt

SEQ ID NO: 317552 - DNA, 3101 bp, Homo sapiens
agctgtttaaatatgctaatgaaaggatagggcctgaccagtagaacggcgaggcggtgtatcacgtggctcggggacgtgtcaggggcggagcctccgcagcccctgcccgagttaaaaccggagtgtgagagagaaaagcgcttcagtagcgagaggggctgagaaagtggtgacaccgccgggacacgtctgcctctatgaaccagcgcagccatctgggcaccacctacctggacacggccaaaggcgcggtagagaccttcatgaagctccgtgcccgggaccctgccagcagaggagacaggtatatgctggtcactttcgaagagccgccctatgctatcaaggctggatggaaagaaaaccatgcaacgtttatgaatgaattgaaaaaccttcaggctgaaggacttacgactcttggccaatccctaaggacagcttttgatttattaaatttaaatagattagtaactggcatagacaactatgggcagggaagaaacccttttttcttggagccagcaataattatcacaattactgatgggagcaagttgactaccaccagtggagtccaggatgagcttcatttacctcttaattctcctttgcctggaagtgaattgaccaaggaaccttttcgttgggatcagagactctttgcattagtgttgcggttgcctggcaccatgtcagtagaatcagaacagttgacaggtgtgcctttagatgactctgcaatcacaccaatgtgtgaagtgacaggcggccgttcatattctgtgtgttctccaagaatgcttaatcagtgtctggagtccttggtgcagaaagtacaaagtggggtggtaataaactttgaaaaagcaggaccagatccttcccctgtagaagatgggcagccagatatatcaaggccttttggatctcagccttggcatagctgtcacaaactcatatatgtcagaccaaatcctaaaactggggttcctataggtcattggcctgttccagagtctttttggccagatcaaaattcgccaacactaccacctcgtacatctcatcctgtagtgaagttttcctgtacagactgtgaaccaatggttattgataaacttccttttgacaaatatgagttggaaccttcaccactgactcaatttatcctggaaaggaaatctcctcaaacatgttggcaggtgtacgtgagcaatagtgcaaaatacagtgaacttggtcatccttttggttacttgaaagccagtacagcactgaactgtgtcaacttatttgtgatgccttacaattatccagtccttcttcccctcttagatgacttgtttaaagtgcataaagcaaaaccaacattgaagtggagacagtcatttgaaagttatttgaagacaatgcctccctactatcttgggcccttgaagaaagctgttaggatgatgggagcacctaacctaatagcagacagtatggaatatggacttagttacagtgtcatttcatacctcaaaaaactgagtcaacaggccaaaatagaatctgatcgagtcattggatctgtaggcaaaaaagtagtacaggagactggaataaaagtccggagccgatcacatggtttatcaatggcatataggaaagattttcaacaactcctccagggaatttcagaggatgtccctcacagactgctagaccttaatatgaaggaatacactgggttccaagttgctttgctgaataaggatttgaagccacagacatttagaaatgcttatgacataccaagacgaaatcttttggatcacttaacaagaatgagatctaatcttttgaagagcactcgcagatttctgaaaggacaggacgaagatcaagtgcacagtgttcctatagcacaaatggggaactaccaggaatacctcaagcaagtaccttctccactaagagaacttgatcctgatcagccacgaaggttgcatacatttggcaacccctttaagctggataagaagggtatgatgatagatgaagcagatgaatttgtggctggacctcaaaataaacataaacgacccggagaaccaaatatgcaagggatccctaaaagacgtcggtgtatgtctccactactaagaggcagacagcagaatcctgttgtaaacaatcatattgggggaaaaggaccacctgcacctacaactcaagcacagccagatcttattaaacctcttcctcttcataaaatttcagaaaccactaatgattcgataatacatgatgtggttgaaaatcatgttgcagaccaactttcatcagacattacaccaaatgctatggatacggaattttcagcatcttctccagccagtttactggaacggccaaccaatcatatggaggctcttggtcatgaccatttaggaaccaatgacctcactgttggtggatttttagaaaatcatgaggagccaagagataaagaacaatgtgctgaagagaacataccagcatcttcactcaacaaaggaaagaaattgatgcattgcagaagccatgaagaggtcaatactgaactaaaagcacaaataatgaaagagatccgaaagccaggaagaaaatatgaaagaatcttcactttactgaagcatgtgcaaggcagtttacaaacaagactaatatttttacaaaatgtcattaaagaagcatcaaggtttaaaaaacgaatgctaatagaacaactggagaacttcttggatgaaattcatcgaagagccaatcagatcaaccatattaatagcaattaaaagaaaatagaatgtggccacttatttcactatcttcttcaaatacaaagtaaatacaagactgttgtgatcttgcattcattttctgacatgcattgttggctatttgaaatactaaaagcaaatctacagatcctttttccatcattttacagtgaccttttcttcattttggtttatttttgtaatgtgaaaagtatcactctaaaaaacatttttaatttaacaaactaaaaatattcctccaaatctcttgcttgtcattgactcttgcgt

SEQ ID NO: 317553 - DNA, 3047 bp, Homo sapiens
ggcgggcgggcgctgcgagccgggttcggccggggcccgggctccggccccgggcggtgtgtggggagcgatctgtgtgtgggggacggcgtggaggggtggccgctgcgtgtgcggtactgtgggggcggcggggccgctgggcgccccttctccgcctcgtaacctcgcctctgtgcttccctgtcgcccgccctgttcctcctcccgtcccgcagctccgtgcccgggaccctgccagcagaggagacaggtatatgctggtcactttcgaagagccgccctatgctatcaaggctggatggaaagaaaaccatgcaacgtttatgaatgaattgaaaaaccttcaggctgaaggacttacgactcttggccaatccctaaggacagcttttgatttattaaatttaaatagattagtaactggcatagacaactatgggcagggaagaaacccttttttcttggagccagcaataattatcacaattactgatgggagcaagttgactaccaccagtggagtccaggatgagcttcatttacctcttaattctcctttgcctggaagtgaattgaccaaggaaccttttcgttgggatcagagactctttgcattagtgttgcggttgcctggcaccatgtcagtagaatcagaacagttgacaggtgtgcctttagatgactctgcaatcacaccaatgtgtgaagtgacaggcggccgttcatattctgtgtgttctccaagaatgcttaatcagtgtctggagtccttggtgcagaaagtacaaagtggggtggtaataaactttgaaaaagcaggaccagatccttcccctgtagaagatgggcagccagatatatcaaggccttttggatctcagccttggcatagctgtcacaaactcatatatgtcagaccaaatcctaaaactggggttcctataggtcattggcctgttccagagtctttttggccagatcaaaattcgccaacactaccacctcgtacatctcatcctgtagtgaagttttcctgtacagactgtgaaccaatggttattgataaacttccttttgacaaatatgagttggaaccttcaccactgactcaatttatcctggaaaggaaatctcctcaaacatgttggcaggtgtacgtgagcaatagtgcaaaatacagtgaacttggtcatccttttggttacttgaaagccagtacagcactgaactgtgtcaacttatttgtgatgccttacaattatccagtccttcttcccctcttagatgacttgtttaaagtgcataaagcaaaaccaacattgaagtggagacagtcatttgaaagttatttgaagacaatgcctccctactatcttgggcccttgaagaaagctgttaggatgatgggagcacctaacctaatagcagacagtatggaatatggacttagttacagtgtcatttcatacctcaaaaaactgagtcaacaggccaaaatagaatctgatcgagtcattggatctgtaggcaaaaaagtagtacaggagactggaataaaagtccggagccgatcacatggtttatcaatggcatataggaaagattttcaacaactcctccagggaatttcagaggatgtccctcacagactgctagaccttaatatgaaggaatacactgggttccaagttgctttgctgaataaggatttgaagccacagacatttagaaatgcttatgacataccaagacgaaatcttttggatcacttaacaagaatgagatctaatcttttgaagagcactcgcagatttctgaaaggacaggacgaagatcaagtgcacagtgttcctatagcacaaatggggaactaccaggaatacctcaagcaagtaccttctccactaagagaacttgatcctgatcagccacgaaggttgcatacatttggcaacccctttaagctggataagaagggtatgatgatagatgaagcagatgaatttgtggctggacctcaaaataaacataaacgacccggagaaccaaatatgcaagggatccctaaaagacgtcggtgtatgtctccactactaagaggcagacagcagaatcctgttgtaaacaatcatattgggggaaaaggaccacctgcacctacaactcaagcacagccagatcttattaaacctcttcctcttcataaaatttcagaaaccactaatgattcgataatacatgatgtggttgaaaatcatgttgcagaccaactttcatcagacattacaccaaatgctatggatacggaattttcagcatcttctccagccagtttactggaacggccaaccaatcatatggaggctcttggtcatgaccatttaggaaccaatgacctcactgttggtggatttttagaaaatcatgaggagccaagagataaagaacaatgtgctgaagagaacataccagcatcttcactcaacaaaggaaagaaattgatgcattgcagaagccatgaagaggtcaatactgaactaaaagcacaaataatgaaagagatccgaaagccaggaagaaaatatgaaagaatcttcactttactgaagcatgtgcaaggcagtttacaaacaagactaatatttttacaaaatgtcattaaagaagcatcaaggtttaaaaaacgaatgctaatagaacaactggagaacttcttggatgaaattcatcgaagagccaatcagatcaaccatattaatagcaattaaaagaaaatagaatgtggccacttatttcactatcttcttcaaatacaaagtaaatacaagactgttgtgatcttgcattcattttctgacatgcattgttggctatttgaaatactaaaagcaaatctacagatcctttttccatcattttacagtgaccttttcttcattttggtttatttttgtaatgtgaaaagtatcactctaaaaaacatttttaatttaacaaactaaaaatattcctccaaatctcttgcttgtcattgactcttgcgt

SEQ ID NO: 317554 - DNA, 2798 bp, Homo sapiens
ccagatgagagcagtttataaagaattggtgatagttacacttaattttctagacagttgctgcaaaaatacccttccagaatgaattcgttagattttgaattgtgaaagtatattttaaattaattcagcaacagttttccttgtgatacatagttactttggctgtgtataagaatagcggcagctccatacgtttatatttagttctatatttatgttctaggtactggggacacacagatggaattaagcaaggctagaaaacgtattatctttgaagacagcttcatttacctcttaattctcctttgcctggaagtgaattgaccaaggaaccttttcgttgggatcagagactctttgcattagtgttgcggttgcctggcaccatgtcagtagaatcagaacagttgacaggtgtgcctttagatgactctgcaatcacaccaatgtgtgaagtgacaggcggccgttcatattctgtgtgttctccaagaatgcttaatcagtgtctggagtccttggtgcagaaagtacaaagtggggtggtaataaactttgaaaaagcaggaccagatccttcccctgtagaagatgggcagccagatatatcaaggccttttggatctcagccttggcatagctgtcacaaactcatatatgtcagaccaaatcctaaaactggggttcctataggtcattggcctgttccagagtctttttggccagatcaaaattcgccaacactaccacctcgtacatctcatcctgtagtgaagttttcctgtacagactgtgaaccaatggttattgataaacttccttttgacaaatatgagttggaaccttcaccactgactcaatttatcctggaaaggaaatctcctcaaacatgttggcaggtgtacgtgagcaatagtgcaaaatacagtgaacttggtcatccttttggttacttgaaagccagtacagcactgaactgtgtcaacttatttgtgatgccttacaattatccagtccttcttcccctcttagatgacttgtttaaagtgcataaagcaaaaccaacattgaagtggagacagtcatttgaaagttatttgaagacaatgcctccctactatcttgggcccttgaagaaagctgttaggatgatgggagcacctaacctaatagcagacagtatggaatatggacttagttacagtgtcatttcatacctcaaaaaactgagtcaacaggccaaaatagaatctgatcgagtcattggatctgtaggcaaaaaagtagtacaggagactggaataaaagtccggagccgatcacatggtttatcaatggcatataggaaagattttcaacaactcctccagggaatttcagaggatgtccctcacagactgctagaccttaatatgaaggaatacactgggttccaagttgctttgctgaataaggatttgaagccacagacatttagaaatgcttatgacataccaagacgaaatcttttggatcacttaacaagaatgagatctaatcttttgaagagcactcgcagatttctgaaaggacaggacgaagatcaagtgcacagtgttcctatagcacaaatggggaactaccaggaatacctcaagcaagtaccttctccactaagagaacttgatcctgatcagccacgaaggttgcatacatttggcaacccctttaagctggataagaagggtatgatgatagatgaagcagatgaatttgtggctggacctcaaaataaacataaacgacccggagaaccaaatatgcaagggatccctaaaagacgtcggtgtatgtctccactactaagaggcagacagcagaatcctgttgtaaacaatcatattgggggaaaaggaccacctgcacctacaactcaagcacagccagatcttattaaacctcttcctcttcataaaatttcagaaaccactaatgattcgataatacatgatgtggttgaaaatcatgttgcagaccaactttcatcagacattacaccaaatgctatggatacggaattttcagcatcttctccagccagtttactggaacggccaaccaatcatatggaggctcttggtcatgaccatttaggaaccaatgacctcactgttggtggatttttagaaaatcatgaggagccaagagataaagaacaatgtgctgaagagaacataccagcatcttcactcaacaaaggaaagaaattgatgcattgcagaagccatgaagaggtcaatactgaactaaaagcacaaataatgaaagagatccgaaagccaggaagaaaatatgaaagaatcttcactttactgaagcatgtgcaaggcagtttacaaacaagactaatatttttacaaaatgtcattaaagaagcatcaaggtttaaaaaacgaatgctaatagaacaactggagaacttcttggatgaaattcatcgaagagccaatcagatcaaccatattaatagcaattaaaagaaaatagaatgtggccacttatttcactatcttcttcaaatacaaagtaaatacaagactgttgtgatcttgcattcattttctgacatgcattgttggctatttgaaatactaaaagcaaatctacagatcctttttccatcattttacagtgaccttttcttcattttggtttatttttgtaatgtgaaaagtatcactctaaaaaacatttttaatttaacaaactaaaaatattcctccaaatctcttgcttgtcattgactcttgcgt

SEQ ID NO: 317555 - DNA, 3004 bp, Homo sapiens
agcgagttaaatatggaggatgaggggaagatatcaagaataacggctaggtttttagaacaggttttgtagcttgggggagaagaaacaaattgtacatattgtgtctgaggaacctgtggaagattcaggttatgtctagtgggtagttagatacagcagagaaataggagccatctggccccaacagtagatttgtgaaccaccagggtataagcagtaactgaggccaatagagtcctttatagctatgacatttaaaattatttcctcatagctcattttgttcacaatttgtgagatttttaggaagaggactattaagaggtagattggggagtaacatgcctttttaaaaaaagtattacttttttatacctctagaacaggggtttctaaaataagggtgtgtatcctatagagtttaccaaaatgattgctggaatagggaaggaaacattagaagttctatttatggttatttttctcctattttcataccattttggtatatattttgttatgtacatctacatttataatttgtataattagaaatatatagtgtgttcaaaaactgatcaagatctatgattactttggaagtcgctactctctataagtaattgctacaaatgaagacttgtgagagtttctatatacatttctaattttttggatgtaaaaattaatgaatactcaattactaaattttgcgtaagacctaaaaatattttcatttctatagattttcaagtgtttatctttttgttgtgaatattacataactttagcattacattttcaagtgtttcctttcagcttaatgttgcttttagcagtaaatcaaactcttactagcaagacggaggaactgagtaaattttgataatgaggaatatttagttttgtttctgaaatttcatgtaagtagtaattacaagactttcccctttagccacctcgtacatctcatcctgtagtgaagttttcctgtacagactgtgaaccaatggttattgataaacttccttttgacaaatatgagttggaaccttcaccactgactcaatttatcctggaaaggaaatctcctcaaacatgttggcaggtgtacgtgagcaatagtgcaaaatacagtgaacttggtcatccttttggttacttgaaagccagtacagcactgaactgtgtcaacttatttgtgatgccttacaattatccagtccttcttcccctcttagatgacttgtttaaagtgcataaagcaaaaccaacattgaagtggagacagtcatttgaaagttatttgaagacaatgcctccctactatcttgggcccttgaagaaagctgttaggatgatgggagcacctaacctaatagcagacagtatggaatatggacttagttacagtgtcatttcatacctcaaaaaactgagtcaacaggccaaaatagaatctgatcgagtcattggatctgtaggcaaaaaagtagtacaggagactggaataaaagtccggagccgatcacatggtttatcaatggcatataggaaagattttcaacaactcctccagggaatttcagaggatgtccctcacagactgctagaccttaatatgaaggaatacactgggttccaagttgctttgctgaataaggatttgaagccacagacatttagaaatgcttatgacataccaagacgaaatcttttggatcacttaacaagaatgagatctaatcttttgaagagcactcgcagatttctgaaaggacaggacgaagatcaagtgcacagtgttcctatagcacaaatggggaactaccaggaatacctcaagcaagtaccttctccactaagagaacttgatcctgatcagccacgaaggttgcatacatttggcaacccctttaagctggataagaagggtatgatgatagatgaagcagatgaatttgtggctggacctcaaaataaacataaacgacccggagaaccaaatatgcaagggatccctaaaagacgtcggtgtatgtctccactactaagaggcagacagcagaatcctgttgtaaacaatcatattgggggaaaaggaccacctgcacctacaactcaagcacagccagatcttattaaacctcttcctcttcataaaatttcagaaaccactaatgattcgataatacatgatgtggttgaaaatcatgttgcagaccaactttcatcagacattacaccaaatgctatggatacggaattttcagcatcttctccagccagtttactggaacggccaaccaatcatatggaggctcttggtcatgaccatttaggaaccaatgacctcactgttggtggatttttagaaaatcatgaggagccaagagataaagaacaatgtgctgaagagaacataccagcatcttcactcaacaaaggaaagaaattgatgcattgcagaagccatgaagaggtcaatactgaactaaaagcacaaataatgaaagagatccgaaagccaggaagaaaatatgaaagaatcttcactttactgaagcatgtgcaaggcagtttacaaacaagactaatatttttacaaaatgtcattaaagaagcatcaaggtttaaaaaacgaatgctaatagaacaactggagaacttcttggatgaaattcatcgaagagccaatcagatcaaccatattaatagcaattaaaagaaaatagaatgtggccacttatttcactatcttcttcaaatacaaagtaaatacaagactgttgtgatcttgcattcattttctgacatgcattgttggctatttgaaatactaaaagcaaatctacagatcctttttccatcattttacagtgaccttttcttcattttggtttatttttgtaatgtgaaaagtatcactctaaaaaacatttttaatttaacaaactaaaaatattcctccaaatctcttgcttgtcattgactcttgcgt

SEQ ID NO: 317556 - DNA, 2533 bp, Homo sapiens
ggagtacagagtgggaaggggtatgagggaagaggtcttttagaggttgttacatgccaactcatttttctaaactttgtttgcaatatgcaagggagaaaataagtacttggcatggctgaagtatggagtctgtatggcgtggtggtgggaaggcagatagggaccagatcactgaagatctttatatgtgatattaagtgtctagaccctatttttaggtgattggctgttacttttaccgaacagttttagatagggaaattatatgatcctatttatatttcactgccatggattgatcagacagggactgattagaaactaaacaaagcaaaaagcatttgtactagtctaatctgagaaatgatgaaggcccaaattaaagtggtaagaaatagaagataacatttctagagagatgagagtttagtattgacagaaggcagcaactagtaatgactacctaccatgtttatgtgttctgccacctcgtacatctcatcctgtagtgaagttttcctgtacagactgtgaaccaatggttattgataaacttccttttgacaaatatgagttggaaccttcaccactgactcaatttatcctggaaaggaaatctcctcaaacatgttggcaggtgtacgtgagcaatagtgcaaaatacagtgaacttggtcatccttttggttacttgaaagccagtacagcactgaactgtgtcaacttatttgtgatgccttacaattatccagtccttcttcccctcttagatgacttgtttaaagtgcataaagcaaaaccaacattgaagtggagacagtcatttgaaagttatttgaagacaatgcctccctactatcttgggcccttgaagaaagctgttaggatgatgggagcacctaacctaatagcagacagtatggaatatggacttagttacagtgtcatttcatacctcaaaaaactgagtcaacaggccaaaatagaatctgatcgagtcattggatctgtaggcaaaaaagtagtacaggagactggaataaaagtccggagccgatcacatggtttatcaatggcatataggaaagattttcaacaactcctccagggaatttcagaggatgtccctcacagactgctagaccttaatatgaaggaatacactgggttccaagttgctttgctgaataaggatttgaagccacagacatttagaaatgcttatgacataccaagacgaaatcttttggatcacttaacaagaatgagatctaatcttttgaagagcactcgcagatttctgaaaggacaggacgaagatcaagtgcacagtgttcctatagcacaaatggggaactaccaggaatacctcaagcaagtaccttctccactaagagaacttgatcctgatcagccacgaaggttgcatacatttggcaacccctttaagctggataagaagggtatgatgatagatgaagcagatgaatttgtggctggacctcaaaataaacataaacgacccggagaaccaaatatgcaagggatccctaaaagacgtcggtgtatgtctccactactaagaggcagacagcagaatcctgttgtaaacaatcatattgggggaaaaggaccacctgcacctacaactcaagcacagccagatcttattaaacctcttcctcttcataaaatttcagaaaccactaatgattcgataatacatgatgtggttgaaaatcatgttgcagaccaactttcatcagacattacaccaaatgctatggatacggaattttcagcatcttctccagccagtttactggaacggccaaccaatcatatggaggctcttggtcatgaccatttaggaaccaatgacctcactgttggtggatttttagaaaatcatgaggagccaagagataaagaacaatgtgctgaagagaacataccagcatcttcactcaacaaaggaaagaaattgatgcattgcagaagccatgaagaggtcaatactgaactaaaagcacaaataatgaaagagatccgaaagccaggaagaaaatatgaaagaatcttcactttactgaagcatgtgcaaggcagtttacaaacaagactaatatttttacaaaatgtcattaaagaagcatcaaggtttaaaaaacgaatgctaatagaacaactggagaacttcttggatgaaattcatcgaagagccaatcagatcaaccatattaatagcaattaaaagaaaatagaatgtggccacttatttcactatcttcttcaaatacaaagtaaatacaagactgttgtgatcttgcattcattttctgacatgcattgttggctatttgaaatactaaaagcaaatctacagatcctttttccatcattttacagtgaccttttcttcattttggtttatttttgtaatgtgaaaagtatcactctaaaaaacatttttaatttaacaaactaaaaatattcctccaaatctcttgcttgtcattgactcttgcgt

SEQ ID NO: 317557 - DNA, 2373 bp, Homo sapiens
agcgagttaaatatggaggatgaggggaagatatcaagaataacggctaggtttttagaacaggttttgtagcttgggggagaagaaacaaattgtacatattgtgtctgaggaacctgtggaagattcaggttatgtctagtgggtagttagatacagcagagaaataggagccatctggccccaacagtagatttgtgaaccaccagggtataagcagtaactgaggccaatagagtcctttatagctatgacatttaaaattatttcctcatagctcattttgttcacaatttgtgagatttttaggaagaggactattaagagccacctcgtacatctcatcctgtagtgaagttttcctgtacagactgtgaaccaatggttattgataaacttccttttgacaaatatgagttggaaccttcaccactgactcaatttatcctggaaaggaaatctcctcaaacatgttggcaggtgtacgtgagcaatagtgcaaaatacagtgaacttggtcatccttttggttacttgaaagccagtacagcactgaactgtgtcaacttatttgtgatgccttacaattatccagtccttcttcccctcttagatgacttgtttaaagtgcataaagcaaaaccaacattgaagtggagacagtcatttgaaagttatttgaagacaatgcctccctactatcttgggcccttgaagaaagctgttaggatgatgggagcacctaacctaatagcagacagtatggaatatggacttagttacagtgtcatttcatacctcaaaaaactgagtcaacaggccaaaatagaatctgatcgagtcattggatctgtaggcaaaaaagtagtacaggagactggaataaaagtccggagccgatcacatggtttatcaatggcatataggaaagattttcaacaactcctccagggaatttcagaggatgtccctcacagactgctagaccttaatatgaaggaatacactgggttccaagttgctttgctgaataaggatttgaagccacagacatttagaaatgcttatgacataccaagacgaaatcttttggatcacttaacaagaatgagatctaatcttttgaagagcactcgcagatttctgaaaggacaggacgaagatcaagtgcacagtgttcctatagcacaaatggggaactaccaggaatacctcaagcaagtaccttctccactaagagaacttgatcctgatcagccacgaaggttgcatacatttggcaacccctttaagctggataagaagggtatgatgatagatgaagcagatgaatttgtggctggacctcaaaataaacataaacgacccggagaaccaaatatgcaagggatccctaaaagacgtcggtgtatgtctccactactaagaggcagacagcagaatcctgttgtaaacaatcatattgggggaaaaggaccacctgcacctacaactcaagcacagccagatcttattaaacctcttcctcttcataaaatttcagaaaccactaatgattcgataatacatgatgtggttgaaaatcatgttgcagaccaactttcatcagacattacaccaaatgctatggatacggaattttcagcatcttctccagccagtttactggaacggccaaccaatcatatggaggctcttggtcatgaccatttaggaaccaatgacctcactgttggtggatttttagaaaatcatgaggagccaagagataaagaacaatgtgctgaagagaacataccagcatcttcactcaacaaaggaaagaaattgatgcattgcagaagccatgaagaggtcaatactgaactaaaagcacaaataatgaaagagatccgaaagccaggaagaaaatatgaaagaatcttcactttactgaagcatgtgcaaggcagtttacaaacaagactaatatttttacaaaatgtcattaaagaagcatcaaggtttaaaaaacgaatgctaatagaacaactggagaacttcttggatgaaattcatcgaagagccaatcagatcaaccatattaatagcaattaaaagaaaatagaatgtggccacttatttcactatcttcttcaaatacaaagtaaatacaagactgttgtgatcttgcattcattttctgacatgcattgttggctatttgaaatactaaaagcaaatctacagatcctttttccatcattttacagtgaccttttcttcattttggtttatttttgtaatgtgaaaagtatcactctaaaaaacatttttaatttaacaaactaaaaatattcctccaaatctcttgcttgtcattgactcttgcgt

SEQ ID NO: 317558 - DNA, 1645 bp, Homo sapiens
agctgtttaaatatgctaatgaaaggatagggcctgaccagtagaacggcgaggcggtgtatcacgtggctcggggacgtgtcaggggcggagcctccgcagcccctgcccgagttaaaaccggagtgtgagagagaaaagcgcttcagtagcgagaggggctgagaaagtggtgacaccgccggggtgcggagggagtccctgaaacttctcccaacagccccagggccaatcttccctcagcccactcccctcttcgccagctcccaggtccccactcctgtaccgggggtggggtggggagccaggcccgtctcccgctgggacacacacaggggccgggagcggggacgggacccccgaggcgggggggacgaaccgacagacagacggctgggcgcccgccccagcgggcaggcaggcaggaggaggcggaggcgggggtacgacggggagcactgggtctggggagtttcctctcaactatcgggggagaaactccccgcagccggaggaaagacccagacagtgttttcctcccgggggccgtgctcccccgccccgcgtagcggcggtcgccgccaccggcgcctccacctctaccatctcctctttctccaccacctcgggccccggtgtccccggccagcactatgcccatcttactgttcctgatagacacgtctgcctctatgaaccagcgcagccatctgggcaccacctacctggacacggccaaaggcgcggtagagaccttcatgaagctccgtgcccgggaccctgccagcagaggagacaggtatatgctggtcactttcgaagagccgccctatgctatcaaggctggatggaaagaaaaccatgcaacgtttatgaatgaattgaaaaaccttcaggctgaaggacttacgactcttggccaatccctaaggacagcttttgatttattaaatttaaatagattagtaactggcatagacaactatgggcagggaagaaacccttttttcttggagccagcaataattatcacaattactgatgggagcaagttgactaccaccagtggagtccaggatgaggtactggggacacacagatggaattaagcaaggctagaaaacgtattatctttgaagacagctaaaggagcagcccagtggttttcaagaagtgctaaagtgcactgactgtctcatgatgactggtgcctcagggagggtcatgattcctggatacaggatcgacctgatcctggatgtcacttcaagcagtcagatcgtggggaaaagccttgtctaatggctagccttcctcaaaagtctgatgctagtcatctcggaaggcctcagaaaaagccttaaagaccaatggagaagtaggttttattctttttcttttggtaagaagttgaagatggactcaaaggtgaaggggcagtaaagtctccaagggaagctaggaaaaataggacagtcttcccaaatttaaattgaagttgcatttccttttctgttggctacgaagatgatgacgtaagatatttgggttggcgatattactaaaattaatcatttaaaataacaatatggaaaacctcacttgtattcaagcaaaaaataaactgaatgtaaacaataatttt

SEQ ID NO: 317559 - DNA, 1648 bp, Homo sapiens
agctgtttaaatatgctaatgaaaggatagggcctgaccagtagaacggcgaggcggtgtatcacgtggctcggggacgtgtcaggggcggagcctccgcagcccctgcccgagttaaaaccggagtgtgagagagaaaagcgcttcagtagcgagaggggctgagaaagtggtgacaccgccggggtgcggagggagtccctgaaacttctcccaacagccccagggccaatcttccctcagcccactcccctcttcgccagctcccaggtccccactcctgtaccgggggtggggtggggagccaggcccgtctcccgctgggacacacacaggggccgggagcggggacgggacccccgaggcgggggggacgaaccgacagacagacggctgggcgcccgccccagcgggcaggcaggcaggaggaggcggaggcgggggtacgacggggagcactgggtctggggagtttcctctcaactatcgggggagaaactccccgcagccggaggaaagacccagacagtgttttcctcccgggggccgtgctcccccgccccgcgtagcggcggtcgccgccaccggcgcctccacctctaccatctcctctttctccaccacctcgggccccggtgtccccggccagcactatgcccatcttactgttcctgatagacacgtctgcctctatgaaccagcgcagccatctgggcaccacctacctggacacggccaaaggcgcggtagagaccttcatgaagctccgtgcccgggaccctgccagcagaggagacaggtatatgctggtcactttcgaagagccgccctatgctatcaaggctggatggaaagaaaaccatgcaacgtttatgaatgaattgaaaaaccttcaggctgaaggacttacgactcttggccaatccctaaggacagcttttgatttattaaatttaaatagattagtaactggcatagacaactatgggcagggaagaaacccttttttcttggagccagcaataattatcacaattactgatgggagcaagttgactaccaccagtggagtccaggatgaggtactggggacacacagatggaattaagcaaggctagaaaacgtattatctttgaagacagctaaaggagcagcccagtggttttcaagaagtgctaaagtgcactgactgtctcatgatgactggtgcctcagggagggtcatgattcctggatacaggatcgacctgatcctggatgtcacttcaagcagtcagatcgtggggaaaagccttgtctaatggctagccttcctcaaaagtctgatgctagtcatctcggaaggcctcagaaaaagccttaaaggtgagcagagtagagtgtagttctctctgggggctatgactatttgttggagaatctgattcaacatagaatgacaaccctaaactgataaatccaggttcaattggtaattaactttgagcttataaattggttgatgatgattatcagaccccagcttttgagttagtagaaccaccttgctaagcttaagatctgtaagtgaggaactcggtatttcctggggctcttcacagctttaggttagtatctgttgtcttagaccgaaatagccttgctatc

SEQ ID NO: 317560 - DNA, 857 bp, Homo sapiens
agctgtttaaatatgctaatgaaaggatagggcctgaccagtagaacggcgaggcggtgtatcacgtggctcggggacgtgtcaggggcggagcctccgcagcccctgcccgagttaaaaccggagtgtgagagagaaaagcgcttcagtagcgagaggggctgagaaagtggtgacaccgccggggtgcggagggagtccctgaaacttctcccaacagccccagggccaatcttccctcagcccactcccctcttcgccagctcccaggtccccactcctgtaccgggggtggggtggggagccaggcccgtctcccgctgggacacacacaggggccgggagcggggacgggacccccgaggcgggggggacgaaccgacagacagacggctgggcgcccgccccagcgggcaggcaggcaggaggaggcggaggcgggggtacgacggggagcactgggtctggggagtttcctctcaactatcgggggagaaactccccgcagccggaggaaagacccagacagtgttttcctcccgggggccgtgctcccccgccccgcgtagcggcggtcgccgccaccggcgcctccacctctaccatctcctctttctccaccacctcgggccccggtgtccccggccagcactatgcccatcttactgttcctgatagacacgtctgcctctatgaaccagcgcagccatctgggcaccacctacctggacacggccaaaggcgcggtagagaccttcatgaaggtaccgactgaccgagcccgggcggcgaccccggcccggcggcccgcgggcggcagggtgggggagggcggccggggcgggggtgtcggggac

SEQ ID NO: 317561 - DNA, 1099 bp, Homo sapiens
ggcgggcgggcgctgcgagccgggttcggccggggcccgggctccggccccgggcggtgtgtggggagcgatctgtgtgtgggggacggcgtggaggggtggccgctgcgtgtgcggtactgtgggggcggcggggccgctgggcgccccttctccgcctcgtaacctcgcctctgtgcttccctgtcgcccgccctgttcctcctcccgtcccgcagctccgtgcccgggaccctgccagcagaggagacaggtatatgctggtcactttcgaagagccgccctatgctatcaaggctggatggaaagaaaaccatgcaacgtttatgaatgaattgaaaaaccttcaggctgaaggacttacgactcttggccaatccctaaggacagcttttgatttattaaatttaaatagattagtaactggcatagacaactatgggcagggaagaaacccttttttcttggagccagcaataattatcacaattactgatgggagcaagttgactaccaccagtggagtccaggatgaggtactggggacacacagatggaattaagcaaggctagaaaacgtattatctttgaagacagctaaaggagcagcccagtggttttcaagaagtgctaaagtgcactgactgtctcatgatgactggtgcctcagggagggtcatgattcctggatacaggatcgacctgatcctggatgtcacttcaagcagtcagatcgtggggaaaagccttgtctaatggctagccttcctcaaaagtctgatgctagtcatctcggaaggcctcagaaaaagccttaaagaccaatggagaagtaggttttattctttttcttttggtaagaagttgaagatggactcaaaggtgaaggggcagtaaagtctccaagggaagctaggaaaaataggacagtcttcccaaatttaaattgaagttgcatttccttttctgttggctacgaagatgatgacgtaagatatttgggttggcgatattactaaaattaatcatttaaaataacaatatggaaaacctcacttgtattcaagcaaaaaataaactgaatgtaaacaataatttt

SEQ ID NO: 317562 - DNA, 194 bp, Homo sapiens
acctacaactcaagcacagccagatcttattaaacctcttcctcttcataaaagtaagaattgtttttttcttaaacattatttgctgccttttggttccttttcaaggaagatatttttgttatagattatagaaggaaattgattagtagtacaatgagtgaatgaatgtatagaaaatttgtttaaatgag

SEQ ID NO: 317563 - DNA, 364 bp, Homo sapiens
ttgacttctatgtgtgaaaataatgagtagtgatagtttgttcacattatacgtttctagatgacttgtttaaagtgcataaagcaaaaccaacattgaagtggagacagtcatttgaaagttatttgaagacaatgcctccctactatcttggggtaagaatattatttaaaagaacttgttggccgggcgcagtgactcacgcctgtaatcccagcactttgggaggccgaggcgggtggatcatgaggtcaggagatcaagaccagcctggccaacatggtgaaaccccgtttctactaaaaatacaaaaattagctgggcgtggtggcgggcgcctgtaatcccagctactcgggaggct

SEQ ID NO: 317564 - DNA, 614 bp, Homo sapiens
ggcctctaatcctttttaactacttcaaacggcctttcatcccactgacaaacattttactgaaacataaatacgattgtgttacttccttattgaggaaaagaaggggaaataattttttggagaaaattttaagacagactatacatggaaccataagtttttaataagcttaatattgaatgatgttttcttttttcctatagcccttgaagaaagctgttaggatgatgggagcacctaacctaatagcagacagtatggaatatggacttagttacagtgtcatttcatacctcaaaaaactgagtcaacaggtaatatcaagaaatagagtgagccattaagtattttgaatggttttggctaggatggttaaacaggttaaaagctagttcttgatggttctaatggaattccattatattaatatattacattttagagccatatattacataattctgtctcacatccatggtgtgctatgttttgaaacattaatttgaaaattatataataattcctaatttatgaaaatggcttcatgagtgtggtcctagacttgctatatgtgaacattatttatcttttgagaaatttagattagaaag

SEQ ID NO: 317565 - DNA, 7267 bp, Homo sapiens
ggaagaatatggccgccgggtgtggtgagggcgacgcgcttgcagtcgccgtctcttgcttccccgtcctctgacatcgcctgcagccgagcgggcccgttccgccggagctgaggaccaggtattcaaataaagttaattgcagctttctgtgaaaatgtcagttttgatatcacagagcgtcataaattatgtagaggaagaaaacattcctgctctgaaagctcttcttgaaaaatgcaaagatgtagatgagagaaatgagtgtggccagactccactgatgatagctgccgaacaaggcaatctggaaatagtgaaggaattaattaagaatggagctaactgcaatctggaagatttggataattggacagcacttatatctgcatcgaaagaagggcatgtgcacatcgtagaggaactactgaaatgtggggttaacttggagcaccgtgatatgggaggatggacagctcttatgtgggcatgttacaaaggccgtactgacgtagtagagttgcttctttctcatggtgccaatccaagtgtcactggtctgcagtacagtgtttacccaatcatttgggcagcagggagaggccatgcagatatagttcatcttttactgcaaaatggtgctaaagtcaactgctctgataagtatggaaccacccctttagtttgggctgcacgaaagggtcatttggaatgtgtgaaacatttattggccatgggagctgatgtggatcaagaaggagctaattcaatgactgcacttattgtggcagtgaaaggaggttacacacagtcagtaaaagaaattttgaagaggaatccaaatgtaaacttaacagataaagatggaaatacagctttgatgattgcatcaaaggagggacatacggagattgtgcaggatctgctcgacgctggaacatatgtgaacatacctgacaggagtggggatactgtgttgattggcgctgtcagaggtggtcatgttgaaattgttcgagcgcttctccaaaaatatgctgatatagacattagaggacaggataataaaactgctttgtattgggctgttgagaaaggaaatgcaacaatggtgagagatatcttacagtgcaatcctgacactgaaatatgcacaaaggatggtgaaacgccacttataaaggctaccaagatgagaaacattgaagtggtggagctgctgctagataaaggtgctaaagtgtctgctgtagataagaaaggagatactcccttgcatattgctattcgtggaaggagccggaaactggcagaactgcttttaagaaatcccaaagatgggcgattactttataggcccaacaaagcaggcgagactccttataatattgactgtagccatcagaagagtattttaactcaaatatttggagccagacacttgtctcctactgaaacagacggtgacatgcttggatatgatttatatagcagtgccctggcagatattctcagtgagcctaccatgcagccacccatttgtgtggggttatatgcacagtggggaagtgggaaatctttcttactcaagaaactagaagacgaaatgaaaaccttcgccggacaacagattgagcctctctttcagttctcatggctcatagtgtttcttaccctgctactttgtggagggcttggtttattgtttgccttcacggtccacccaaatcttggaatagcagtgtcactgagcttcttggctctcttatatatattctttattgtcatttactttggtggacgaagagaaggagagagttggaattgggcctgggtcctcagcactagattggcaagacatattggatatttggaactcctccttaaattgatgtttgtgaatccacctgagttgccagagcagactactaaagctttacctgtgaggtttttgtttacagattacaatagactgtccagtgtaggtggagaaacttctctggctgaaatgattgcaaccctctcggatgcttgtgaaagagagtttggctttttggcaaccaggctttttcgagtattcaagactgaagatactcagggtaaaaagaaatggaaaaaaacatgttgtctcccatcttttgtcatcttcctttttatcattggctgcattatatctggaattactcttctggctatatttagagttgacccaaagcatctgactgtaaatgctgtcctcatatcaatcgcatctgtagtgggattggcctttgtgttgaactgtcgtacatggtggcaagtgctggactcgctcctgaattcccaaagaaaacgcctccataatgcagcctccaaactgcacaaattgaaaagtgaaggattcatgaaagttcttaaatgtgaagtggaattgatggccaggatggcaaaaaccattgacagcttcactcagaatcagacaaggctggtggtcatcatcgatggattagatgcctgtgagcaggacaaagtccttcagatgctggacactgtccgagttctgttttcaaaaggcccgttcattgccatttttgcaagtgatccacatattatcataaaggcaattaaccagaacctcaatagtgtgcttcgggattcaaatataaatggccatgactacatgcgcaacatagtccacttgcctgtgttccttaatagtcgtggactaagcaatgcaagaaaatttctcgtaacttcagcaacaaatggagacgttccatgctcagatactacagggatacaggaagatgctgacagaagagtttcacagaacagccttggggagatgacaaaacttggtagcaagacagccctcaatagacgggacacttaccgaagaaggcagatgcagaggaccatcactcgccagatgtcctttgatcttacaaaactgctggttaccgaggactggttcagtgacatcagtccccagaccatgagaagattacttaatattgtttctgtgacaggacgattactgagagccaatcagattagtttcaactgggacaggcttgctagctggatcaaccttactgagcagtggccataccggacttcatggctcatattatatttggaagagactgaaggtattccagatcaaatgacattaaaaaccatctacgaaagaatatcaaagaatattccaacaactaaggatgttgagccacttcttgaaattgatggagatataagaaattttgaagtgtttttgtcttcaaggaccccagttcttgtggctcgagatgtaaaagtctttttgccatgcactgtaaacctagatcccaaactacgggaaattattgcagatgttcgtgctgccagagagcagatcagtattggaggactggcgtaccccccgctccctctacatgagggtcctcctagggcgccatcagggtacagccagcccccatccgtgtgctcttccacgtccttcaatgggcccttcgcaggtggagtggtgtcaccacagcctcacagcagctattacagcggcatgacgggccctcagcatcccttctacaacaggccattctttgccccatacctttacacgccaaggtattaccctggcggctcccaacatctcatctcacgtccatcagtaaaaacgagtttgcccagagatcagaacaatggcctagaagttatcaaggaggatgctgctgaggggctttcttcacccacagactcctcgagggggtcaggcccagccccaggcccagtggtattactgaattcactgaatgtggatgcagtatgtgagaagctgaaacaaatagaagggctggaccagagtatgctgcctcagtattgtaccacgatcaaaaaggcaaacataaatggccgtgtgttagctcagtgtaacattgatgagctgaagaaagagatgaatatgaattttggagactggcaccttttcagaagcacagtactagaaatgagaaacgcagaaagccacgtggtccctgaagacccacgtttcctcagtgagagcagcagtggcccagccccgcacggtgagcctgctcgccgcgcttcccacaacgagctgcctcacaccgagctctccagccagacgccctacacactcaacttcagcttcgaagagctgaacacgcttggcctggatgaaggtgcccctcgtcacagtaatctaagttggcagtcacaaactcgcagaaccccaagtctttcgagtctcaattcccaggattccagtattgaaatttcaaagcttactgataaggtgcaggccgagtatagagatgcctatagagaatacattgctcagatgtcccagttagaagggggccccgggtctacaaccattagtggcagatcttctccacatagcacatattacatgggtcagagttcatcagggggctctattcattcaaacctagagcaagaaaaggggaaggatagtgaaccaaagcccgatgatgggaggaagtcctttctaatgaagaggggagatgttatcgattattcatcatcaggggtttccaccaacgatgcttcccccctggatcctatcactgaagaagatgaaaaatcagatcagtcaggcagtaagcttctcccaggcaagaaatcttccgaaaggtcaagcctcttccagacagatttgaagcttaagggaagtgggctgcgctatcaaaaactcccaagtgacgaggatgaatctggcacagaagaatcagataacactccactgctcaaagatgacaaagacagaaaagccgaagggaaagtagagagagtgccgaagtctccagaacacagtgctgagccgatcagaaccttcattaaagccaaagagtatttatcggatgcgctccttgacaaaaaggattcatcggattcaggagtgagatccagtgaaagttctcccaatcactctctgcacaatgaagtggcggatgactcccagcttgaaaaggcaaatctcatagagctggaagatgacagtcacagcggaaagcggggaatcccacatagcctgagtggcctgcaagatccaattatagctcggatgtccatttgttcagaagacaagaaaagcccttccgaatgcagcttgatagccagcagccctgaagaaaactggcctgcatgccagaaagcctacaacctgaaccgaactcccagcaccgtgactctgaacaacaatagtgctccagccaacagagccaatcaaaatttcgatgagatggagggaattagggagacttctcaagtcattttgaggcctagttccagtcccaacccaaccactattcagaatgagaatctaaaaagcatgacacataagcgaagccaacgttcaagttacacaaggctctccaaagatcctccggagctccatgcagcagcctcttctgagagcacaggctttggagaagaaagagaaagcattctttgagaaaaacaagcaaaggagaagagtgttactgtacccttatgacagaattgtcctggattttgactccatccacgcccatcacctttctacattttgctgacagataactaaccgatgatgaggccgaggtaaaagagacatctgcagtgtgacagaagggagcatgagaagcatggctcaccagccagcctctgtggtctttgtaattagaagcttcagaactcactaatactactgtacctttcattggcgcattaccccataaaactttttgagacgaggtgagatctgagtataaagataggtcagaagtattttaaagggcttaatgtgccaaaaagaaaaaaagctagagaccctttttgcaaacatttggtgaccacacatttgagggaagacgtggcgttaggtgaagcagaagcaaaccctgctcttaggggctcacctaggtgagtgcacagcctgtgacgctacagggagaggctgagtaaaccgagatccagcgttctgtatggcaggggtattgcttatcacagaggttctgaagagtaggaagtacataatgaagagggctttaaaaattgccaacaaagtgagtcaccagggctggcagtagtgtgacggggctgtcctgagctgttaggagagtagatgcggggagggctggtgacctccgtgggtttatatgtcggaaactcttctctccaaatcccaggcctggcttccagcaccatccagctgtgcccaagaagccaccctggtctgttctccaactcttttaaatggtgcccaacttttctaagtgagcttagcaatgagaagaaaaaaaaacatgaattctttttctggaaaatcagggagacatgggtaataataggtactaataaatatttatagatgagtgaatgaggaaataattacatcaaaaaggtcagtgacaattgataaatgacaaggaaatatttaattaggtaaaactaaatcattgctctctatactaggatagactttatctacttcatctgttcctaagtcagcatgttagttctggggaaggatcataagaaaggaaatactttttaaaaaaaaatttggaaacatgtaacaaagcaagggtaaaatatatatatatatctatataagtgctgtgactgtaaaagtgtactttccattaattattagccgagttaagagaatggtcacattgaagtactgtgtggactagaaatgtaccctgtcatcatgcaatgaaatattgttatcgttttaacatagctcatttatgtagaatgaattctggtggtttaccccaagtcacagttaggacggtagatggtgagatcgcagatgcgctattatctagattcagtgttacattttcgatgtttatcactcagtgggtttttattaatatgctgattaagttatttactgggccagtcattgtgctaaatagttgctcttttgtgtttcattgccttgatgtttgagtgtaatctagcattttaatacagtgtttattttgcatgatctttaacaaatgttttaagcaattttaaaaaggcaggatgttattgacattatacactgaagtcttaacattttaacatttatagtgcttatttgcaaaattgtataattaggaattatttcagagacaatgttttctttttcaggtgagtagttgccgcgtaatatcattggagtacattctttatactgtttgtgaaattaatactagcatattaagtgtacaaatagatttagaaaacaataaaaaattgcatgcta

SEQ ID NO: 317566 - DNA, 3755 bp, Homo sapiens
ggaagaatatggccgccgggtgtggtgagggcgacgcgcttgcagtcgccgtctcttgcttccccgtcctctgacatcgcctgcagccgagcgggcccgttccgccggagctgaggaccaggtattcaaataaagttaattgcagctttctgtgaaaatgtcagttttgatatcacagagcgtcataaattatgtagaggaagaaaacattcctgctctgaaagctcttcttgaaaaatgcaaagatgtagatgagagaaatgagtgtggccagactccactgatgatagctgccgaacaaggcaatctggaaatagtgaaggaattaattaagaatggagctaactgcaatctggaagatttggataattggacagcacttatatctgcatcgaaagaagggcatgtgcacatcgtagaggaactactgaaatgtggggttaacttggagcaccgtgatatgggaggatggacagctcttatgtgggcatgttacaaaggccgtactgacgtagtagagttgcttctttctcatggtgccaatccaagtgtcactggtctgcagtacagtgtttacccaatcatttgggcagcagggagaggccatgcagatatagttcatcttttactgcaaaatggtgctaaagtcaactgctctgataagtatggaaccacccctttagtttgggctgcacgaaagggtcatttggaatgtgtgaaacatttattggccatgggagctgatgtggatcaagaaggagctaattcaatgactgcacttattgtggcagtgaaaggaggttacacacagtcagtaaaagaaattttgaagaggaatccaaatgtaaacttaacagataaagatggaaatacagctttgatgattgcatcaaaggagggacatacggagattgtgcaggatctgctcgacgctggaacatatgtgaacatacctgacaggagtggggatactgtgttgattggcgctgtcagaggtggtcatgttgaaattgttcgagcgcttctccaaaaatatgctgatatagacattagaggacaggataataaaactgctttgtattgggctgttgagaaaggaaatgcaacaatggtgagagatatcttacagtgcaatcctgacactgaaatatgcacaaaggatggtgaaacgccacttataaaggctaccaagatgagaaacattgaagtggtggagctgctgctagataaaggtgctaaagtgtctgctgtagataagaaaggagatactcccttgcatattgctattcgtggaaggagccggaaactggcagaactgcttttaagaaatcccaaagatgggcgattactttataggcccaacaaagcaggcgagactccttataatattgactgtagccatcagaagagtattttaactcaaatatttggagccagacacttgtctcctactgaaacagacggtgacatgcttggatatgatttatatagcagtgccctggcagatattctcagtgagcctaccatgcagccacccatttgtgtggggttatatgcacagtggggaagtgggaaatctttcttactcaagaaactagaagacgaaatgaaaaccttcgccggacaacagattgagcctctctttcagttctcatggctcatagtgtttcttaccctgctactttgtggagggcttggtttattgtttgccttcacggtccacccaaatcttggaatagcagtgtcactgagcttcttggctctcttatatatattctttattgtcatttactttggtggacgaagagaaggagagagttggaattgggcctgggtcctcagcactagattggcaagacatattggatatttggaactcctccttaaattgatgtttgtgaatccacctgagttgccagagcagactactaaagctttacctgtgaggtttttgtttacagattacaatagactgtccagtgtaggtggagaaacttctctggctgaaatgattgcaaccctctcggatgcttgtgaaagagagtttggctttttggcaaccaggctttttcgagtattcaagactgaagatactcagggtaaaaagaaatggaaaaaaacatgttgtctcccatcttttgtcatcttcctttttatcattggctgcattatatctggaattactcttctggctatatttagagttgacccaaagcatctgactgtaaatgctgtcctcatatcaatcgcatctgtagtgggattggcctttgtgttgaactgtcgtacatggtggcaagtgctggactcgctcctgaattcccaaagaaaacgcctccataatgcagcctccaaactgcacaaattgaaaagtgaaggattcatgaaagttcttaaatgtgaagtggaattgatggccaggatggcaaaaaccattgacagcttcactcagaatcagacaaggctggtggtcatcatcgatggattagatgcctgtgagcaggacaaagtccttcagatgctggacactgtccgagttctgttttcaaaaggcccgttcattgccatttttgcaagtgatccacatattatcataaaggcaattaaccagaacctcaatagtgtgcttcgggattcaaatataaatggccatgactacatgcgcaacatagtccacttgcctgtgttccttaatagtcgtggactaagcaatgcaagaaaatttctcgtaacttcagcaacaaatggagacgttccatgctcagatactacagggatacaggaagatgctgacagaagagtttcacagaacagccttggggagatgacaaaacttggtagcaagacagccctcaatagacgggacacttaccgaagaaggcagatgcagaggaccatcactcgccagatgtcctttgatcttacaaaactgctggttaccgaggactggttcagtgacatcagtccccagaccatgagaagattacttaatattgtttctgtgacaggacgattactgagagccaatcagattagtttcaactgggacaggcttgctagctggatcaaccttactgagcagtggccataccggacttcatggctcatattatatttggaagagactgaaggtattccagatcaaatgacattaaaaaccatctacgaaagatgctgtggagcagacagttgtgaccgagaccgaattggcatttccaagtcagtgttagttgccatgttgatggagagctgagaaaagccattttaatggcatttgcaaataagcaggacatggaacaggccatgactccctcagagatgcacattcacttgggttatctgcctcgaaggactgaaaatggcaaatattcaaaacttcagcaaccagaggtactggccttcatgagacaacggaatgggtagttgaaacattaaagagcaaacaacagtacagtcacttctgctcctctgaaatgaagacggcctcacatatccctttggaaacaatcaagtgtgcttctcatgactaaaggttaaagctgtaagactgttggcatttactgaactgactgtgacattagtaataaatataaaaaatagatatttagttgaaagggtaattcatcttgattgagccaattgtgttctatgttgtaggacatgctgcttccctgctttcttaatgttaagtacacattccatttgtatgggatttttattcaaatagtcctattaaagtatgcacttttgttggg

SEQ ID NO: 317567 - DNA, 1297 bp, Homo sapiens
gttttaagaaacaacctattactaacataaaatgtatttattttcatttctggtaaatatctatggaaggaaaatgactagcagtctcagcgaagaaatgttgacttgtttatagccagaaatttctggcttgtaatatagtgtttgctaccaaaacttttaaaactaagcctttacatttggtaatttctaatatcttcttaaagaacatgtgtatacagtacctttatagtatgtaaatattagcaccatgatataaaaaatagaggatgtattgaaggaagaacatttcaatcaaatggcaggaattaaacaagataagggaaattcttccaatgaactattgaatctaataaagacatttgtgcccaaaatattagaggttcctgatgataaaagtaatagtttaaaaaaagaaactctctattaatatgtttttataaatcaggaggcaaaaacataaactgttgagtttcagtgttgtatattattttaccatcatgttcatttgtcttcacagtttggctccccccttccccttttcacccacactctcctgttttgtgttgttaggaagttatcaaggaggatgctgctgaggggctttcttcacccacagactcctcgagggtaatggagtagtcctgtggtgtggatcgctggcatctcattgcttctgcctcagtaatgactgtcttaattgtgatgatagcagctcactaactctgcgttgtggtgtgatgagcagctagtgtagagtagctgaatgctaataattatggttcctgaattaattaaaaagcggatgtttaacttcacccattatttcctcctgcttttcccctttttcaatacatgggatggggtttattattattcttcaataaggaagggctttttctatcagctgtcaggggtgttccgttggtagtatttgctcctcagtgtgagctctagctttgcctttgactgtttttgttaagcctgtggttgctattacacatgtggaatattttagaaaagtatccagtatcacccttgagactacaaaaagacacataagctagatggtgtagactaaaaatgcatctttaataactcaatctaggtgtctacatttagttaagtcttagtctgagttttagtgcagtgttataatacttttctttgtctatatatttgttaaaataaattttccagataaacagaagatcgttcagcatgtaaaagaaattatttatttatttatttattttttgccaacaccttaaggtaggtttctttaaaaaaaaaaaac

SEQ ID NO: 317568 - DNA, 424 bp, Homo sapiens
tggttttgaccaggctgtatcagctgtaataaaagctactcattaggttataacagtaactaaatctgttccctaatggtatttccttaccatgctaaacatatttgtttttttttactttacttcatggtataacttaatgagtttttctctgtcacatgacctcattatagatggcattaaatgcttattcatacctgtatttttccttgacttctctaggggtcaggcccagccccaggcccagtggtattactgaattcactgaatgtggatgcagtatgtgagaagctgaaacaaatagaagggctggaccagagtatgctgcctcagtattgtaccacgatcaaaaaggcgaccagggagcccagggaccaccaggtcctccacttgatctagcttacctgagactgcctcgccaaat

SEQ ID NO: 317569 - DNA, 7210 bp, Homo sapiens
ggaagaatatggccgccgggtgtggtgagggcgacgcgcttgcagtcgccgtctcttgcttccccgtcctctgacatcgcctgcagccgagcgggcccgttccgccggagctgaggaccaggtattcaaataaagttaattgcagctttctgtgaaaatgtcagttttgatatcacagagcgtcataaattatgtagaggaagaaaacattcctgctctgaaagctcttcttgaaaaatgcaaagatgtagatgagagaaatgagtgtggccagactccactgatgatagctgccgaacaaggcaatctggaaatagtgaaggaattaattaagaatggagctaactgcaatctggaagatttggataattggacagcacttatatctgcatcgaaagaagggcatgtgcacatcgtagaggaactactgaaatgtggggttaacttggagcaccgtgatatgggaggatggacagctcttatgtgggcatgttacaaaggccgtactgacgtagtagagttgcttctttctcatggtgccaatccaagtgtcactggtctgcagtacagtgtttacccaatcatttgggcagcagggagaggccatgcagatatagttcatcttttactgcaaaatggtgctaaagtcaactgctctgataagtatggaaccacccctttagtttgggctgcacgaaagggtcatttggaatgtgtgaaacatttattggccatgggagctgatgtggatcaagaaggagctaattcaatgactgcacttattgtggcagtgaaaggaggttacacacagtcagtaaaagaaattttgaagaggaatccaaatgtaaacttaacagataaagatggaaatacagctttgatgattgcatcaaaggagggacatacggagattgtgcaggatctgctcgacgctggaacatatgtgaacatacctgacaggagtggggatactgtgttgattggcgctgtcagaggtggtcatgttgaaattgttcgagcgcttctccaaaaatatgctgatatagacattagaggacaggataataaaactgctttgtattgggctgttgagaaaggaaatgcaacaatggtgagagatatcttacagtgcaatcctgacactgaaatatgcacaaaggatggtgaaacgccacttataaaggctaccaagatgagaaacattgaagtggtggagctgctgctagataaaggtgctaaagtgtctgctgtagataagaaaggagatactcccttgcatattgctattcgtggaaggagccggaaactggcagaactgcttttaagaaatcccaaagatgggcgattactttataggcccaacaaagcaggcgagactccttataatattgactgtagccatcagaagagtattttaactcaaatatttggagccagacacttgtctcctactgaaacagacggtgacatgcttggatatgatttatatagcagtgccctggcagatattctcagtgagcctaccatgcagccacccatttgtgtggggttatatgcacagtggggaagtgggaaatctttcttactcaagaaactagaagacgaaatgaaaaccttcgccggacaacagattgagcctctctttcagttctcatggctcatagtgtttcttaccctgctactttgtggagggcttggtttattgtttgccttcacggtccacccaaatcttggaatagcagtgtcactgagcttcttggctctcttatatatattctttattgtcatttactttggtggacgaagagaaggagagagttggaattgggcctgggtcctcagcactagattggcaagacatattggatatttggaactcctccttaaattgatgtttgtgaatccacctgagttgccagagcagactactaaagctttacctgtgaggtttttgtttacagattacaatagactgtccagtgtaggtggagaaacttctctggctgaaatgattgcaaccctctcggatgcttgtgaaagagagtttggctttttggcaaccaggctttttcgagtattcaagactgaagatactcagggtaaaaagaaatggaaaaaaacatgttgtctcccatcttttgtcatcttcctttttatcattggctgcattatatctggaattactcttctggctatatttagagttgacccaaagcatctgactgtaaatgctgtcctcatatcaatcgcatctgtagtgggattggcctttgtgttgaactgtcgtacatggtggcaagtgctggactcgctcctgaattcccaaagaaaacgcctccataatgcagcctccaaactgcacaaattgaaaagtgaaggattcatgaaagttcttaaatgtgaagtggaattgatggccaggatggcaaaaaccattgacagcttcactcagaatcagacaaggctggtggtcatcatcgatggattagatgcctgtgagcaggacaaagtccttcagatgctggacactgtccgagttctgttttcaaaaggcccgttcattgccatttttgcaagtgatccacatattatcataaaggcaattaaccagaacctcaatagtgtgcttcgggattcaaatataaatggccatgactacatgcgcaacatagtccacttgcctgtgttccttaatagtcgtggactaagcaatgcaagaaaatttctcgtaacttcagcaacaaatggagacgttccatgctcagatactacagggatacaggaagatgctgacagaagagtttcacagaacagccttggggagatgacaaaacttggtagcaagacagccctcaatagacgggacacttaccgaagaaggcagatgcagaggaccatcactcgccagatgtcctttgatcttacaaaactgctggttaccgaggactggttcagtgacatcagtccccagaccatgagaagattacttaatattgtttctgtgacaggacgattactgagagccaatcagattagtttcaactgggacaggcttgctagctggatcaaccttactgagcagtggccataccggacttcatggctcatattatatttggaagagactgaaggtattccagatcaaatgacattaaaaaccatctacgaaagaatatcaaagaatattccaacaactaaggatgttgagccacttcttgaaattgatggagatataagaaattttgaagtgtttttgtcttcaaggaccccagttcttgtggctcgagatgtaaaagtctttttgccatgcactgtaaacctagatcccaaactacgggaaattattgcagatgttcgtgctgccagagagcagatcagtattggaggactggcgtaccccccgctccctctacatgagggtcctcctagggcgccatcagggtacagccagcccccatccgtgtgctcttccacgtccttcaatgggcccttcgcaggtggagtggtgtcaccacagcctcacagcagctattacagcggcatgacgggccctcagcatcccttctacaacaggccattctttgccccatacctttacacgccaaggtattaccctggcggctcccaacatctcatctcacgtccatcagtaaaaacgagtttgcccagagatcagaacaatggcctagggtcaggcccagccccaggcccagtggtattactgaattcactgaatgtggatgcagtatgtgagaagctgaaacaaatagaagggctggaccagagtatgctgcctcagtattgtaccacgatcaaaaaggcaaacataaatggccgtgtgttagctcagtgtaacattgatgagctgaagaaagagatgaatatgaattttggagactggcaccttttcagaagcacagtactagaaatgagaaacgcagaaagccacgtggtccctgaagacccacgtttcctcagtgagagcagcagtggcccagccccgcacggtgagcctgctcgccgcgcttcccacaacgagctgcctcacaccgagctctccagccagacgccctacacactcaacttcagcttcgaagagctgaacacgcttggcctggatgaaggtgcccctcgtcacagtaatctaagttggcagtcacaaactcgcagaaccccaagtctttcgagtctcaattcccaggattccagtattgaaatttcaaagcttactgataaggtgcaggccgagtatagagatgcctatagagaatacattgctcagatgtcccagttagaagggggccccgggtctacaaccattagtggcagatcttctccacatagcacatattacatgggtcagagttcatcagggggctctattcattcaaacctagagcaagaaaaggggaaggatagtgaaccaaagcccgatgatgggaggaagtcctttctaatgaagaggggagatgttatcgattattcatcatcaggggtttccaccaacgatgcttcccccctggatcctatcactgaagaagatgaaaaatcagatcagtcaggcagtaagcttctcccaggcaagaaatcttccgaaaggtcaagcctcttccagacagatttgaagcttaagggaagtgggctgcgctatcaaaaactcccaagtgacgaggatgaatctggcacagaagaatcagataacactccactgctcaaagatgacaaagacagaaaagccgaagggaaagtagagagagtgccgaagtctccagaacacagtgctgagccgatcagaaccttcattaaagccaaagagtatttatcggatgcgctccttgacaaaaaggattcatcggattcaggagtgagatccagtgaaagttctcccaatcactctctgcacaatgaagtggcggatgactcccagcttgaaaaggcaaatctcatagagctggaagatgacagtcacagcggaaagcggggaatcccacatagcctgagtggcctgcaagatccaattatagctcggatgtccatttgttcagaagacaagaaaagcccttccgaatgcagcttgatagccagcagccctgaagaaaactggcctgcatgccagaaagcctacaacctgaaccgaactcccagcaccgtgactctgaacaacaatagtgctccagccaacagagccaatcaaaatttcgatgagatggagggaattagggagacttctcaagtcattttgaggcctagttccagtcccaacccaaccactattcagaatgagaatctaaaaagcatgacacataagcgaagccaacgttcaagttacacaaggctctccaaagatcctccggagctccatgcagcagcctcttctgagagcacaggctttggagaagaaagagaaagcattctttgagaaaaacaagcaaaggagaagagtgttactgtacccttatgacagaattgtcctggattttgactccatccacgcccatcacctttctacattttgctgacagataactaaccgatgatgaggccgaggtaaaagagacatctgcagtgtgacagaagggagcatgagaagcatggctcaccagccagcctctgtggtctttgtaattagaagcttcagaactcactaatactactgtacctttcattggcgcattaccccataaaactttttgagacgaggtgagatctgagtataaagataggtcagaagtattttaaagggcttaatgtgccaaaaagaaaaaaagctagagaccctttttgcaaacatttggtgaccacacatttgagggaagacgtggcgttaggtgaagcagaagcaaaccctgctcttaggggctcacctaggtgagtgcacagcctgtgacgctacagggagaggctgagtaaaccgagatccagcgttctgtatggcaggggtattgcttatcacagaggttctgaagagtaggaagtacataatgaagagggctttaaaaattgccaacaaagtgagtcaccagggctggcagtagtgtgacggggctgtcctgagctgttaggagagtagatgcggggagggctggtgacctccgtgggtttatatgtcggaaactcttctctccaaatcccaggcctggcttccagcaccatccagctgtgcccaagaagccaccctggtctgttctccaactcttttaaatggtgcccaacttttctaagtgagcttagcaatgagaagaaaaaaaaacatgaattctttttctggaaaatcagggagacatgggtaataataggtactaataaatatttatagatgagtgaatgaggaaataattacatcaaaaaggtcagtgacaattgataaatgacaaggaaatatttaattaggtaaaactaaatcattgctctctatactaggatagactttatctacttcatctgttcctaagtcagcatgttagttctggggaaggatcataagaaaggaaatactttttaaaaaaaaatttggaaacatgtaacaaagcaagggtaaaatatatatatatatctatataagtgctgtgactgtaaaagtgtactttccattaattattagccgagttaagagaatggtcacattgaagtactgtgtggactagaaatgtaccctgtcatcatgcaatgaaatattgttatcgttttaacatagctcatttatgtagaatgaattctggtggtttaccccaagtcacagttaggacggtagatggtgagatcgcagatgcgctattatctagattcagtgttacattttcgatgtttatcactcagtgggtttttattaatatgctgattaagttatttactgggccagtcattgtgctaaatagttgctcttttgtgtttcattgccttgatgtttgagtgtaatctagcattttaatacagtgtttattttgcatgatctttaacaaatgttttaagcaattttaaaaaggcaggatgttattgacattatacactgaagtcttaacattttaacatttatagtgcttatttgcaaaattgtataattaggaattatttcagagacaatgttttctttttcaggtgagtagttgccgcgtaatatcattggagtacattctttatactgtttgtgaaattaatactagcatattaagtgtacaaatagatttagaaaacaataaaaaattgcatgcta

SEQ ID NO: 317570 - DNA, 6281 bp, Homo sapiens
gatactaatgaagtggacccatggcctaggaggagctgcagggagaaagcctgttgcttctcctctttcactgagttaagaaaaggggaaaagaatgaccttcattctagagggctgtgggagaaacagtatctgagcaaagctggatgaggagctacagaaggatattatggggaagatagagataaaaattcatattatatatgtgctttatatgaaaaataagaaaagttcagattttgttattttacagaaacatgaaaattgttactgtctgcatactatatataaagataagaaagttcaagtttcgtactattattttacagaaaggagatactcccttgcatattgctattcgtggaaggagccggaaactggcagaactgcttttaagaaatcccaaagatgggcgattactttataggcccaacaaagcaggcgagactccttataatattgactgtagccatcagaagagtattttaactcaaatatttggagccagacacttgtctcctactgaaacagacggtgacatgcttggatatgatttatatagcagtgccctggcagatattctcagtgagcctaccatgcagccacccatttgtgtggggttatatgcacagtggggaagtgggaaatctttcttactcaagaaactagaagacgaaatgaaaaccttcgccggacaacagattgagcctctctttcagttctcatggctcatagtgtttcttaccctgctactttgtggagggcttggtttattgtttgccttcacggtccacccaaatcttggaatagcagtgtcactgagcttcttggctctcttatatatattctttattgtcatttactttggtggacgaagagaaggagagagttggaattgggcctgggtcctcagcactagattggcaagacatattggatatttggaactcctccttaaattgatgtttgtgaatccacctgagttgccagagcagactactaaagctttacctgtgaggtttttgtttacagattacaatagactgtccagtgtaggtggagaaacttctctggctgaaatgattgcaaccctctcggatgcttgtgaaagagagtttggctttttggcaaccaggctttttcgagtattcaagactgaagatactcagggtaaaaagaaatggaaaaaaacatgttgtctcccatcttttgtcatcttcctttttatcattggctgcattatatctggaattactcttctggctatatttagagttgacccaaagcatctgactgtaaatgctgtcctcatatcaatcgcatctgtagtgggattggcctttgtgttgaactgtcgtacatggtggcaagtgctggactcgctcctgaattcccaaagaaaacgcctccataatgcagcctccaaactgcacaaattgaaaagtgaaggattcatgaaagttcttaaatgtgaagtggaattgatggccaggatggcaaaaaccattgacagcttcactcagaatcagacaaggctggtggtcatcatcgatggattagatgcctgtgagcaggacaaagtccttcagatgctggacactgtccgagttctgttttcaaaaggcccgttcattgccatttttgcaagtgatccacatattatcataaaggcaattaaccagaacctcaatagtgtgcttcgggattcaaatataaatggccatgactacatgcgcaacatagtccacttgcctgtgttccttaatagtcgtggactaagcaatgcaagaaaatttctcgtaacttcagcaacaaatggagacgttccatgctcagatactacagggatacaggaagatgctgacagaagagtttcacagaacagccttggggagatgacaaaacttggtagcaagacagccctcaatagacgggacacttaccgaagaaggcagatgcagaggaccatcactcgccagatgtcctttgatcttacaaaactgctggttaccgaggactggttcagtgacatcagtccccagaccatgagaagattacttaatattgtttctgtgacaggacgattactgagagccaatcagattagtttcaactgggacaggcttgctagctggatcaaccttactgagcagtggccataccggacttcatggctcatattatatttggaagagactgaaggtattccagatcaaatgacattaaaaaccatctacgaaagaatatcaaagaatattccaacaactaaggatgttgagccacttcttgaaattgatggagatataagaaattttgaagtgtttttgtcttcaaggaccccagttcttgtggctcgagatgtaaaagtctttttgccatgcactgtaaacctagatcccaaactacgggaaattattgcagatgttcgtgctgccagagagcagatcagtattggaggactggcgtaccccccgctccctctacatgagggtcctcctagggcgccatcagggtacagccagcccccatccgtgtgctcttccacgtccttcaatgggcccttcgcaggtggagtggtgtcaccacagcctcacagcagctattacagcggcatgacgggccctcagcatcccttctacaacaggccattctttgccccatacctttacacgccaaggtattaccctggcggctcccaacatctcatctcacgtccatcagtaaaaacgagtttgcccagagatcagaacaatggcctagggtcaggcccagccccaggcccagtggtattactgaattcactgaatgtggatgcagtatgtgagaagctgaaacaaatagaagggctggaccagagtatgctgcctcagtattgtaccacgatcaaaaaggcaaacataaatggccgtgtgttagctcagtgtaacattgatgagctgaagaaagagatgaatatgaattttggagactggcaccttttcagaagcacagtactagaaatgagaaacgcagaaagccacgtggtccctgaagacccacgtttcctcagtgagagcagcagtggcccagccccgcacggtgagcctgctcgccgcgcttcccacaacgagctgcctcacaccgagctctccagccagacgccctacacactcaacttcagcttcgaagagctgaacacgcttggcctggatgaaggtgcccctcgtcacagtaatctaagttggcagtcacaaactcgcagaaccccaagtctttcgagtctcaattcccaggattccagtattgaaatttcaaagcttactgataaggtgcaggccgagtatagagatgcctatagagaatacattgctcagatgtcccagttagaagggggccccgggtctacaaccattagtggcagatcttctccacatagcacatattacatgggtcagagttcatcagggggctctattcattcaaacctagagcaagaaaaggggaaggatagtgaaccaaagcccgatgatgggaggaagtcctttctaatgaagaggggagatgttatcgattattcatcatcaggggtttccaccaacgatgcttcccccctggatcctatcactgaagaagatgaaaaatcagatcagtcaggcagtaagcttctcccaggcaagaaatcttccgaaaggtcaagcctcttccagacagatttgaagcttaagggaagtgggctgcgctatcaaaaactcccaagtgacgaggatgaatctggcacagaagaatcagataacactccactgctcaaagatgacaaagacagaaaagccgaagggaaagtagagagagtgccgaagtctccagaacacagtgctgagccgatcagaaccttcattaaagccaaagagtatttatcggatgcgctccttgacaaaaaggattcatcggattcaggagtgagatccagtgaaagttctcccaatcactctctgcacaatgaagtggcggatgactcccagcttgaaaaggcaaatctcatagagctggaagatgacagtcacagcggaaagcggggaatcccacatagcctgagtggcctgcaagatccaattatagctcggatgtccatttgttcagaagacaagaaaagcccttccgaatgcagcttgatagccagcagccctgaagaaaactggcctgcatgccagaaagcctacaacctgaaccgaactcccagcaccgtgactctgaacaacaatagtgctccagccaacagagccaatcaaaatttcgatgagatggagggaattagggagacttctcaagtcattttgaggcctagttccagtcccaacccaaccactattcagaatgagaatctaaaaagcatgacacataagcgaagccaacgttcaagttacacaaggctctccaaagatcctccggagctccatgcagcagcctcttctgagagcacaggctttggagaagaaagagaaagcattctttgagaaaaacaagcaaaggagaagagtgttactgtacccttatgacagaattgtcctggattttgactccatccacgcccatcacctttctacattttgctgacagataactaaccgatgatgaggccgaggtaaaagagacatctgcagtgtgacagaagggagcatgagaagcatggctcaccagccagcctctgtggtctttgtaattagaagcttcagaactcactaatactactgtacctttcattggcgcattaccccataaaactttttgagacgaggtgagatctgagtataaagataggtcagaagtattttaaagggcttaatgtgccaaaaagaaaaaaagctagagaccctttttgcaaacatttggtgaccacacatttgagggaagacgtggcgttaggtgaagcagaagcaaaccctgctcttaggggctcacctaggtgagtgcacagcctgtgacgctacagggagaggctgagtaaaccgagatccagcgttctgtatggcaggggtattgcttatcacagaggttctgaagagtaggaagtacataatgaagagggctttaaaaattgccaacaaagtgagtcaccagggctggcagtagtgtgacggggctgtcctgagctgttaggagagtagatgcggggagggctggtgacctccgtgggtttatatgtcggaaactcttctctccaaatcccaggcctggcttccagcaccatccagctgtgcccaagaagccaccctggtctgttctccaactcttttaaatggtgcccaacttttctaagtgagcttagcaatgagaagaaaaaaaaacatgaattctttttctggaaaatcagggagacatgggtaataataggtactaataaatatttatagatgagtgaatgaggaaataattacatcaaaaaggtcagtgacaattgataaatgacaaggaaatatttaattaggtaaaactaaatcattgctctctatactaggatagactttatctacttcatctgttcctaagtcagcatgttagttctggggaaggatcataagaaaggaaatactttttaaaaaaaaatttggaaacatgtaacaaagcaagggtaaaatatatatatatatctatataagtgctgtgactgtaaaagtgtactttccattaattattagccgagttaagagaatggtcacattgaagtactgtgtggactagaaatgtaccctgtcatcatgcaatgaaatattgttatcgttttaacatagctcatttatgtagaatgaattctggtggtttaccccaagtcacagttaggacggtagatggtgagatcgcagatgcgctattatctagattcagtgttacattttcgatgtttatcactcagtgggtttttattaatatgctgattaagttatttactgggccagtcattgtgctaaatagttgctcttttgtgtttcattgccttgatgtttgagtgtaatctagcattttaatacagtgtttattttgcatgatctttaacaaatgttttaagcaattttaaaaaggcaggatgttattgacattatacactgaagtcttaacattttaacatttatagtgcttatttgcaaaattgtataattaggaattatttcagagacaatgttttctttttcaggtgagtagttgccgcgtaatatcattggagtacattctttatactgtttgtgaaattaatactagcatattaagtgtacaaatagatttagaaaacaataaaaaattgcatgcta

SEQ ID NO: 317571 - DNA, 4152 bp, Homo sapiens
gttttaagaaacaacctattactaacataaaatgtatttattttcatttctggtaaatatctatggaaggaaaatgactagcagtctcagcgaagaaatgttgacttgtttatagccagaaatttctggcttgtaatatagtgtttgctaccaaaacttttaaaactaagcctttacatttggtaatttctaatatcttcttaaagaacatgtgtatacagtacctttatagtatgtaaatattagcaccatgatataaaaaatagaggatgtattgaaggaagaacatttcaatcaaatggcaggaattaaacaagataagggaaattcttccaatgaactattgaatctaataaagacatttgtgcccaaaatattagaggttcctgatgataaaagtaatagtttaaaaaaagaaactctctattaatatgtttttataaatcaggaggcaaaaacataaactgttgagtttcagtgttgtatattattttaccatcatgttcatttgtcttcacagtttggctccccccttccccttttcacccacactctcctgttttgtgttgttaggaagttatcaaggaggatgctgctgaggggctttcttcacccacagactcctcgagggggtcaggcccagccccaggcccagtggtattactgaattcactgaatgtggatgcagtatgtgagaagctgaaacaaatagaagggctggaccagagtatgctgcctcagtattgtaccacgatcaaaaaggcaaacataaatggccgtgtgttagctcagtgtaacattgatgagctgaagaaagagatgaatatgaattttggagactggcaccttttcagaagcacagtactagaaatgagaaacgcagaaagccacgtggtccctgaagacccacgtttcctcagtgagagcagcagtggcccagccccgcacggtgagcctgctcgccgcgcttcccacaacgagctgcctcacaccgagctctccagccagacgccctacacactcaacttcagcttcgaagagctgaacacgcttggcctggatgaaggtgcccctcgtcacagtaatctaagttggcagtcacaaactcgcagaaccccaagtctttcgagtctcaattcccaggattccagtattgaaatttcaaagcttactgataaggtgcaggccgagtatagagatgcctatagagaatacattgctcagatgtcccagttagaagggggccccgggtctacaaccattagtggcagatcttctccacatagcacatattacatgggtcagagttcatcagggggctctattcattcaaacctagagcaagaaaaggggaaggatagtgaaccaaagcccgatgatgggaggaagtcctttctaatgaagaggggagatgttatcgattattcatcatcaggggtttccaccaacgatgcttcccccctggatcctatcactgaagaagatgaaaaatcagatcagtcaggcagtaagcttctcccaggcaagaaatcttccgaaaggtcaagcctcttccagacagatttgaagcttaagggaagtgggctgcgctatcaaaaactcccaagtgacgaggatgaatctggcacagaagaatcagataacactccactgctcaaagatgacaaagacagaaaagccgaagggaaagtagagagagtgccgaagtctccagaacacagtgctgagccgatcagaaccttcattaaagccaaagagtatttatcggatgcgctccttgacaaaaaggattcatcggattcaggagtgagatccagtgaaagttctcccaatcactctctgcacaatgaagtggcggatgactcccagcttgaaaaggcaaatctcatagagctggaagatgacagtcacagcggaaagcggggaatcccacatagcctgagtggcctgcaagatccaattatagctcggatgtccatttgttcagaagacaagaaaagcccttccgaatgcagcttgatagccagcagccctgaagaaaactggcctgcatgccagaaagcctacaacctgaaccgaactcccagcaccgtgactctgaacaacaatagtgctccagccaacagagccaatcaaaatttcgatgagatggagggaattagggagacttctcaagtcattttgaggcctagttccagtcccaacccaaccactattcagaatgagaatctaaaaagcatgacacataagcgaagccaacgttcaagttacacaaggctctccaaagatcctccggagctccatgcagcagcctcttctgagagcacaggctttggagaagaaagagaaagcattctttgagaaaaacaagcaaaggagaagagtgttactgtacccttatgacagaattgtcctggattttgactccatccacgcccatcacctttctacattttgctgacagataactaaccgatgatgaggccgaggtaaaagagacatctgcagtgtgacagaagggagcatgagaagcatggctcaccagccagcctctgtggtctttgtaattagaagcttcagaactcactaatactactgtacctttcattggcgcattaccccataaaactttttgagacgaggtgagatctgagtataaagataggtcagaagtattttaaagggcttaatgtgccaaaaagaaaaaaagctagagaccctttttgcaaacatttggtgaccacacatttgagggaagacgtggcgttaggtgaagcagaagcaaaccctgctcttaggggctcacctaggtgagtgcacagcctgtgacgctacagggagaggctgagtaaaccgagatccagcgttctgtatggcaggggtattgcttatcacagaggttctgaagagtaggaagtacataatgaagagggctttaaaaattgccaacaaagtgagtcaccagggctggcagtagtgtgacggggctgtcctgagctgttaggagagtagatgcggggagggctggtgacctccgtgggtttatatgtcggaaactcttctctccaaatcccaggcctggcttccagcaccatccagctgtgcccaagaagccaccctggtctgttctccaactcttttaaatggtgcccaacttttctaagtgagcttagcaatgagaagaaaaaaaaacatgaattctttttctggaaaatcagggagacatgggtaataataggtactaataaatatttatagatgagtgaatgaggaaataattacatcaaaaaggtcagtgacaattgataaatgacaaggaaatatttaattaggtaaaactaaatcattgctctctatactaggatagactttatctacttcatctgttcctaagtcagcatgttagttctggggaaggatcataagaaaggaaatactttttaaaaaaaaatttggaaacatgtaacaaagcaagggtaaaatatatatatatatctatataagtgctgtgactgtaaaagtgtactttccattaattattagccgagttaagagaatggtcacattgaagtactgtgtggactagaaatgtaccctgtcatcatgcaatgaaatattgttatcgttttaacatagctcatttatgtagaatgaattctggtggtttaccccaagtcacagttaggacggtagatggtgagatcgcagatgcgctattatctagattcagtgttacattttcgatgtttatcactcagtgggtttttattaatatgctgattaagttatttactgggccagtcattgtgctaaatagttgctcttttgtgtttcattgccttgatgtttgagtgtaatctagcattttaatacagtgtttattttgcatgatctttaacaaatgttttaagcaattttaaaaaggcaggatgttattgacattatacactgaagtcttaacattttaacatttatagtgcttatttgcaaaattgtataattaggaattatttcagagacaatgttttctttttcaggtgagtagttgccgcgtaatatcattggagtacattctttatactgtttgtgaaattaatactagcatattaagtgtacaaatagatttagaaaacaataaaaaattgcatgcta

SEQ ID NO: 317572 - DNA, 7705 bp, Homo sapiens
  misc_feature (7705)..(7705): n is a, c, g, or t
ggaagaatatggccgccgggtgtggtgagggcgacgcgcttgcagtcgccgtctcttgcttccccgtcctctgacatcgcctgcagccgagcgggcccgttccgccggagctgaggaccaggtattcaaataaagttaattgcagctttctgtgaaaatgtcagttttgatatcacagagcgtcataaattatgtagaggaagaaaacattcctgctctgaaagctcttcttgaaaaatgcaaagatgtagatgagagaaatgagtgtggccagactccactgatgatagctgccgaacaaggcaatctggaaatagtgaaggaattaattaagaatggagctaactgcaatctggaagatttggataattggacagcacttatatctgcatcgaaagaagggcatgtgcacatcgtagaggaactactgaaatgtggggttaacttggagcaccgtgatatgggaggatggacagctcttatgtgggcatgttacaaaggccgtactgacgtagtagagttgcttctttctcatggtgccaatccaagtgtcactggtctgcagtacagtgtttacccaatcatttgggcagcagggagaggccatgcagatatagttcatcttttactgcaaaatggtgctaaagtcaactgctctgataagtatggaaccacccctttagtttgggctgcacgaaagggtcatttggaatgtgtgaaacatttattggccatgggagctgatgtggatcaagaaggagctaattcaatgactgcacttattgtggcagtgaaaggaggttacacacagtcagtaaaagaaattttgaagaggaatccaaatgtaaacttaacagataaagatggaaatacagctttgatgattgcatcaaaggagggacatacggagattgtgcaggatctgctcgacgctggaacatatgtgaacatacctgacaggagtggggatactgtgttgattggcgctgtcagaggtggtcatgttgaaattgttcgagcgcttctccaaaaatatgctgatatagacattagaggacaggataataaaactgctttgtattgggctgttgagaaaggaaatgcaacaatggtgagagatatcttacagtgcaatcctgacactgaaatatgcacaaaggatggtgaaacgccacttataaaggctaccaagatgagaaacattgaagtggtggagctgctgctagataaaggtgctaaagtgtctgctgtagataagaaaggagatactcccttgcatattgctattcgtggaaggagccggaaactggcagaactgcttttaagaaatcccaaagatgggcgattactttataggcccaacaaagcaggcgagactccttataatattgactgtagccatcagaagagtattttaactcaaatatttggagccagacacttgtctcctactgaaacagacggtgacatgcttggatatgatttatatagcagtgccctggcagatattctcagtgagcctaccatgcagccacccatttgtgtggggttatatgcacagtggggaagtgggaaatctttcttactcaagaaactagaagacgaaatgaaaaccttcgccggacaacagattgagcctctctttcagttctcatggctcatagtgtttcttaccctgctactttgtggagggcttggtttattgtttgccttcacggtccacccaaatcttggaatagcagtgtcactgagcttcttggctctcttatatatattctttattgtcatttactttggtggacgaagagaaggagagagttggaattgggcctgggtcctcagcactagattggcaagacatattggatatttggaactcctccttaaattgatgtttgtgaatccacctgagttgccagagcagactactaaagctttacctgtgaggtttttgtttacagattacaatagactgtccagtgtaggtggagaaacttctctggctgaaatgattgcaaccctctcggatgcttgtgaaagagagtttggctttttggcaaccaggctttttcgagtattcaagactgaagatactcagggtaaaaagaaatggaaaaaaacatgttgtctcccatcttttgtcatcttcctttttatcattggctgcattatatctggaattactcttctggctatatttagagttgacccaaagcatctgactgtaaatgctgtcctcatatcaatcgcatctgtagtgggattggcctttgtgttgaactgtcgtacatggtggcaagtgctggactcgctcctgaattcccaaagaaaacgcctccataatgcagcctccaaactgcacaaattgaaaagtgaaggattcatgaaagttcttaaatgtgaagtggaattgatggccaggatggcaaaaaccattgacagcttcactcagaatcagacaaggctggtggtcatcatcgatggattagatgcctgtgagcaggacaaagtccttcagatgctggacactgtccgagttctgttttcaaaaggcccgttcattgccatttttgcaagtgatccacatattatcataaaggcaattaaccagaacctcaatagtgtgcttcgggattcaaatataaatggccatgactacatgcgcaacatagtccacttgcctgtgttccttaatagtcgtggactaagcaatgcaagaaaatttctcgtaacttcagcaacaaatggagacgttccatgctcagatactacagggatacaggaagatgctgacagaagagtttcacagaacagccttggggagatgacaaaacttggtagcaagacagccctcaatagacgggacacttaccgaagaaggcagatgcagaggaccatcactcgccagatgtcctttgatcttacaaaactgctggttaccgaggactggttcagtgacatcagtccccagaccatgagaagattacttaatattgtttctgtgacaggacgattactgagagccaatcagattagtttcaactgggacaggcttgctagctggatcaaccttactgagcagtggccataccggacttcatggctcatattatatttggaagagactgaaggtattccagatcaaatgacattaaaaaccatctacgaaagaatatcaaagaatattccaacaactaaggatgttgagccacttcttgaaattgatggagatataagaaattttgaagtgtttttgtcttcaaggaccccagttcttgtggctcgagatgtaaaagtctttttgccatgcactgtaaacctagatcccaaactacgggaaattattgcagatgttcgtgctgccagagagcagatcagtattggaggactggcgtaccccccgctccctctacatgagggtcctcctagggcgccatcagggtacagccagcccccatccgtgtgctcttccacgtccttcaatgggcccttcgcaggtggagtggtgtcaccacagcctcacagcagctattacagcggcatgacgggccctcagcatcccttctacaacaggccattctttgccccatacctttacacgccaaggtattaccctggcggctcccaacatctcatctcacgtccatcagtaaaaacgagtttgcccagagatcagaacaatggcctagggtcaggcccagccccaggcccagtggtattactgaattcactgaatgtggatgcagtatgtgagaagctgaaacaaatagaagggctggaccagagtatgctgcctcagtattgtaccacgatcaaaaaggcaaacataaatggccgtgtgttagctcagtgtaacattgatgagctgaagaaagagatgaatatgaattttggagactggcaccttttcagaagcacagtactagaaatgagaaacgcagaaagccacgtggtccctgaagacccacgtttcctcagtgagagcagcagtggcccagccccgcacggtgagcctgctcgccgcgcttcccacaacgagctgcctcacaccgagctctccagccagacgccctacacactcaacttcagcttcgaagagctgaacacgcttggcctggatgaaggtgcccctcgtcacagtaatctaagttggcagtcacaaactcgcagaaccccaagtctttcgagtctcaattcccaggattccagtattgaaatttcaaagcttactgataaggtgcaggccgagtatagagatgcctatagagaatacattgctcagatgtcccagttagaagggggccccgggtctacaaccattagtggcagatcttctccacatagcacatattacatgggtcagagttcatcagggggctctattcattcaaacctagagcaagaaaaggggaaggatagtgaaccaaagcccgatgatgggaggaagtcctttctaatgaagaggggagatgttatcgattattcatcatcaggggtttccaccaacgatgcttcccccctggatcctatcactgaagaagatgaaaaatcagatcagtcaggcagtaagcttctcccaggcaagaaatcttccgaaaggtcaagcctcttccagacagatttgaagcttaagggaagtgggctgcgctatcaaaaactcccaagtgacgaggatgaatctggcacagaagaatcagataacactccactgctcaaagatgacaaagacagaaaagccgaagggaaagtagagagagtgccgaagtctccagaacacagtgctgagccgatcagaaccttcattaaagccaaagagtatttatcggatgcgctccttgacaaaaaggattcatcggattcaggagtgagatccagtgaaagttctcccaatcactctctgcacaatgaagtggcggatgactcccagcttgaaaaggcaaatctcatagagctggaagatgacagtcacagcggaaagcggggaatcccacatagcctgagtggcctgcaagatccaattatagctcggatgtccatttgttcagaagacaagaaaagcccttccgaatgcagcttgatagccagcagccctgaagaaaactggcctgcatgccagaaagcctacaacctgaaccgaactcccagcaccgtgactctgaacaacaatagtgctccagccaacagagccaatcaaaatttcgatgagatggagggaattagggagacttctcaagtcattttgaggcctagttccagtcccaacccaaccactattcagaatgagaatctaaaaagcatgacacataagcgaagccaacgttcaagttacacaaggctctccaaagatcctccggagctccatgcagcagcctcttctgagagcacaggctttggagaagaaagagaaagcattctttgagaaaaacaagcaaaggagaagagtgttactgtacccttatgacagaattgtcctggattttgactccatccacgcccatcacctttctacattttgctgacagataactaaccgatgatgaggccgaggtaaaagagacatctgcagtgtgacagaagggagcatgagaagcatggctcaccagccagcctctgtggtctttgtaattagaagcttcagaactcactaatactactgtacctttcattggcgcattaccccataaaactttttgagacgaggtgagatctgagtataaagataggtcagaagtattttaaagggcttaatgtgccaaaaagaaaaaaagctagagaccctttttgcaaacatttggtgaccacacatttgagggaagacgtggcgttaggtgaagcagaagcaaaccctgctcttaggggctcacctaggtgagtgcacagcctgtgacgctacagggagaggctgagtaaaccgagatccagcgttctgtatggcaggggtattgcttatcacagaggttctgaagagtaggaagtacataatgaagagggctttaaaaattgccaacaaagtgagtcaccagggctggcagtagtgtgacggggctgtcctgagctgttaggagagtagatgcggggagggctggtgacctccgtgggtttatatgtcggaaactcttctctccaaatcccaggcctggcttccagcaccatccagctgtgcccaagaagccaccctggtctgttctccaactcttttaaatggtgcccaacttttctaagtgagcttagcaatgagaagaaaaaaaaacatgaattctttttctggaaaatcagggagacatgggtaataataggtactaataaatatttatagatgagtgaatgaggaaataattacatcaaaaaggtcagtgacaattgataaatgacaaggaaatatttaattaggtaaaactaaatcattgctctctatactaggatagactttatctacttcatctgttcctaagtcagcatgttagttctggggaaggatcataagaaaggaaatactttttaaaaaaaaatttggaaacatgtaacaaagcaagggtaaaatatatatatatatctatataagtgctgtgactgtaaaagtgtactttccattaattattagccgagttaagagaatggtcacattgaagtactgtgtggactagaaatgtaccctgtcatcatgcaatgaaatattgttatcgttttaacatagctcatttatgtagaatgaattctggtggtttaccccaagtcacagttaggacggtagatggtgagatcgcagatgcgctattatctagattcagtgttacattttcgatgtttatcactcagtgggtttttattaatatgctgattaagttatttactgggccagtcattgtgctaaatagttgctcttttgtgtttcattgccttgatgtttgagtgtaatctagcattttaatacagtgtttattttgcatgatctttaacaaatgttttaagcaattttaaaaaggcaggatgttattgacattatacactgaagtcttaacattttaacatttatagtgcttatttgcaaaattgtataattaggaattatttcagagacaatgttttctttttcaggtgagtagttgccgcgtaatatcattggagtacattctttatactgtttgtgaaattaatactagcatattaagtgtacaaatagatttagaaaacaataaaaaattgcatgctattctgactcatgaatttttattcactatgatgattcacattttgattaaaaataaaagtagtttgtgtgtttaaaaaaaaaaaaaaaaaaaaaaaaaaaaaaaaaaaaaaaaaaaaagggcgggccaccacaaaaaatcacccacggggaggcgcaaatgtcttgaccgcacccccggctttcttggtacaaaagaggggcccccaaacgcgggagacgtatacttaacacgccagacgcgcggcgcgcgcgttattaacaaacaccgtacgcagggggaaaaacccgtgcgacagcgagcagacccgttgttagaagagaacccctcaactttgcggggggtggggaccacaatactgtgggcacccccaccactcaggcagtttaacccctacaagcgaaaaactacgacctaaccgcctacaccgggacccaaccggaatatcagggtgtaaagactgcgccaaaggcatcgtccaaacaaattaccggggn

SEQ ID NO: 317573 - DNA, 4412 bp, Homo sapiens
ggaagaatatggccgccgggtgtggtgagggcgacgcgcttgcagtcgccgtctcttgcttccccgtcctctgacatcgcctgcagccgagcgggcccgttccgccggagctgaggaccaggtattcaaataaagttaattgcagctttctgtgaaaatgtcagttttgatatcacagagcgtcataaattatgtagaggaagaaaacattcctgctctgaaagctcttcttgaaaaatgcaaagatgtagatgagagaaatgagtgtggccagactccactgatgatagctgccgaacaaggcaatctggaaatagtgaaggaattaattaagaatggagctaactgcaatctggaagatttggataattggacagcacttatatctgcatcgaaagaagggcatgtgcacatcgtagaggaactactgaaatgtggggttaacttggagcaccgtgatatgggaggatggacagctcttatgtgggcatgttacaaaggccgtactgacgtagtagagttgcttctttctcatggtgccaatccaagtgtcactggtctgcagtacagtgtttacccaatcatttgggcagcagggagaggccatgcagatatagttcatcttttactgcaaaatggtgctaaagtcaactgctctgataagtatggaaccacccctttagtttgggctgcacgaaagggtcatttggaatgtgtgaaacatttattggccatgggagctgatgtggatcaagaaggagctaattcaatgactgcacttattgtggcagtgaaaggaggttacacacagtcagtaaaagaaattttgaagaggaatccaaatgtaaacttaacagataaagatggaaatacagctttgatgattgcatcaaaggagggacatacggagattgtgcaggatctgctcgacgctggaacatatgtgaacatacctgacaggagtggggatactgtgttgattggcgctgtcagaggtggtcatgttgaaattgttcgagcgcttctccaaaaatatgctgatatagacattagaggacaggataataaaactgctttgtattgggctgttgagaaaggaaatgcaacaatggtgagagatatcttacagtgcaatcctgacactgaaatatgcacaaaggatggtgaaacgccacttataaaggctaccaagatgagaaacattgaagtggtggagctgctgctagataaaggtgctaaagtgtctgctgtagataagaaaggagatactcccttgcatattgctattcgtggaaggagccggaaactggcagaactgcttttaagaaatcccaaagatgggcgattactttataggcccaacaaagcaggcgagactccttataatattgactgtagccatcagaagagtattttaactcaaatatttggagccagacacttgtctcctactgaaacagacggtgacatgcttggatatgatttatatagcagtgccctggcagatattctcagtgagcctaccatgcagccacccatttgtgtggggttatatgcacagtggggaagtgggaaatctttcttactcaagaaactagaagacgaaatgaaaaccttcgccggacaacagattgagcctctctttcagttctcatggctcatagtgtttcttaccctgctactttgtggagggcttggtttattgtttgccttcacggtccacccaaatcttggaatagcagtgtcactgagcttcttggctctcttatatatattctttattgtcatttactttggtggacgaagagaaggagagagttggaattgggcctgggtcctcagcactagattggcaagacatattggatatttggaactcctccttaaattgatgtttgtgaatccacctgagttgccagagcagactactaaagctttacctgtgaggtttttgtttacagattacaatagactgtccagtgtaggtggagaaacttctctggctgaaatgattgcaaccctctcggatgcttgtgaaagagagtttggctttttggcaaccaggctttttcgagtattcaagactgaagatactcagggtaaaaagaaatggaaaaaaacatgttgtctcccatcttttgtcatcttcctttttatcattggctgcattatatctggaattactcttctggctatatttagagttgacccaaagcatctgactgtaaatgctgtcctcatatcaatcgcatctgtagtgggattggcctttgtgttgaactgtcgtacatggtggcaagtgctggactcgctcctgaattcccaaagaaaacgcctccataatgcagcctccaaactgcacaaattgaaaagtgaaggattcatgaaagttcttaaatgtgaagtggaattgatggccaggatggcaaaaaccattgacagcttcactcagaatcagacaaggctggtggtcatcatcgatggattagatgcctgtgagcaggacaaagtccttcagatgctggacactgtccgagttctgttttcaaaaggcccgttcattgccatttttgcaagtgatccacatattatcataaaggcaattaaccagaacctcaatagtgtgcttcgggattcaaatataaatggccatgactacatgcgcaacatagtccacttgcctgtgttccttaatagtcgtggactaagcaatgcaagaaaatttctcgtaacttcagcaacaaatggagacgttccatgctcagatactacagggatacaggaagatgctgacagaagagtttcacagaacagccttggggagatgacaaaacttggtagcaagacagccctcaatagacgggacacttaccgaagaaggcagatgcagaggaccatcactcgccagatgtcctttgatcttacaaaactgctggttaccgaggactggttcagtgacatcagtccccagaccatgagaagattacttaatattgtttctgtgacaggacgattactgagagccaatcagattagtttcaactgggacaggcttgctagctggatcaaccttactgagcagtggccataccggacttcatggctcatattatatttggaagagactgaaggtattccagatcaaatgacattaaaaaccatctacgaaagaatatcaaagaatattccaacaactaaggatgttgagccacttcttgaaattgatggagatataagaaattttgaagtgtttttgtcttcaaggaccccagttcttgtggctcgagatgtaaaagtctttttgccatgcactgtaaacctagatcccaaactacgggaaattattgcagatgttcgtgctgccagagagcagatcagtattggaggactggcgtaccccccgctccctctacatgagggtcctcctagggcgccatcagggtacagccagcccccatccgtgtgctcttccacgtccttcaatgggcccttcgcaggtggagtggtgtcaccacagcctcacagcagctattacagcggcatgacgggccctcagcatcccttctacaacaggccattctttgccccatacctttacacgccaaggtattaccctggcggctcccaacatctcatctcacgtccatcagtaaaaacgagtttgcccagagatcagaacaatggcctagaagttatcaaggaggatgctgctgaggggctttcttcacccacagactcctcgagggtaatggagtagtcctgtggtgtggatcgctggcatctcattgcttctgcctcagtaatgactgtcttaattgtgatgatagcagctcactaactctgcgttgtggtgtgatgagcagctagtgtagagtagctgaatgctaataattatggttcctgaattaattaaaaagcggatgtttaacttcacccattatttcctcctgcttttcccctttttcaatacatgggatggggtttattattattcttcaataaggaagggctttttctatcagctgtcaggggtgttccgttggtagtatttgctcctcagtgtgagctctagctttgcctttgactgtttttgttaagcctgtggttgctattacacatgtggaatattttagaaaagtatccagtatcacccttgagactacaaaaagacacataagctagatggtgtagactaaaaatgcatctttaataactcaatctaggtgtctacatttagttaagtcttagtctgagttttagtgcagtgttataatacttttctttgtctatatatttgttaaaataaattttccagataaacagaagatcgttcagcatgtaaaagaaattatttatttatttatttattttttgccaacaccttaaggtaggtttctttaaaaaaaaaaaac

SEQ ID NO: 317574 - DNA, 3532 bp, Homo sapiens
ggaagaatatggccgccgggtgtggtgagggcgacgcgcttgcagtcgccgtctcttgcttccccgtcctctgacatcgcctgcagccgagcgggcccgttccgccggagctgaggaccaggtattcaaataaagttaattgcagctttctgtgaaaatgtcagttttgatatcacagagcgtcataaattatgtagaggaagaaaacattcctgctctgaaagctcttcttgaaaaatgcaaagatgtagatgagagaaatgagtgtggccagactccactgatgatagctgccgaacaaggcaatctggaaatagtgaaggaattaattaagaatggagctaactgcaatctggaagatttggataattggacagcacttatatctgcatcgaaagaagggcatgtgcacatcgtagaggaactactgaaatgtggggttaacttggagcaccgtgatatgggaggatggacagctcttatgtgggcatgttacaaaggccgtactgacgtagtagagttgcttctttctcatggtgccaatccaagtgtcactggtctgcagtacagtgtttacccaatcatttgggcagcagggagaggccatgcagatatagttcatcttttactgcaaaatggtgctaaagtcaactgctctgataagtatggaaccacccctttagtttgggctgcacgaaagggtcatttggaatgtgtgaaacatttattggccatgggagctgatgtggatcaagaaggagctaattcaatgactgcacttattgtggcagtgaaaggaggttacacacagtcagtaaaagaaattttgaagaggaatccaaatgtaaacttaacagataaagatggaaatacagctttgatgattgcatcaaaggagggacatacggagattgtgcaggatctgctcgacgctggaacatatgtgaacatacctgacaggagtggggatactgtgttgattggcgctgtcagaggtggtcatgttgaaattgttcgagcgcttctccaaaaatatgctgatatagacattagaggacaggataataaaactgctttgtattgggctgttgagaaaggaaatgcaacaatggtgagagatatcttacagtgcaatcctgacactgaaatatgcacaaaggatggtgaaacgccacttataaaggctaccaagatgagaaacattgaagtggtggagctgctgctagataaaggtgctaaagtgtctgctgtagataagaaaggagatactcccttgcatattgctattcgtggaaggagccggaaactggcagaactgcttttaagaaatcccaaagatgggcgattactttataggcccaacaaagcaggcgagactccttataatattgactgtagccatcagaagagtattttaactcaaatatttggagccagacacttgtctcctactgaaacagacggtgacatgcttggatatgatttatatagcagtgccctggcagatattctcagtgagcctaccatgcagccacccatttgtgtggggttatatgcacagtggggaagtgggaaatctttcttactcaagaaactagaagacgaaatgaaaaccttcgccggacaacagattgagcctctctttcagttctcatggctcatagtgtttcttaccctgctactttgtggagggcttggtttattgtttgccttcacggtccacccaaatcttggaatagcagtgtcactgagcttcttggctctcttatatatattctttattgtcatttactttggtggacgaagagaaggagagagttggaattgggcctgggtcctcagcactagattggcaagacatattggatatttggaactcctccttaaattgatgtttgtgaatccacctgagttgccagagcagactactaaagctttacctgtgaggtttttgtttacagattacaatagactgtccagtgtaggtggagaaacttctctggctgaaatgattgcaaccctctcggatgcttgtgaaagagagtttggctttttggcaaccaggctttttcgagtattcaagactgaagatactcagggtaaaaagaaatggaaaaaaacatgttgtctcccatcttttgtcatcttcctttttatcattggctgcattatatctggaattactcttctggctatatttagagttgacccaaagcatctgactgtaaatgctgtcctcatatcaatcgcatctgtagtgggattggcctttgtgttgaactgtcgtacatggtggcaagtgctggactcgctcctgaattcccaaagaaaacgcctccataatgcagcctccaaactgcacaaattgaaaagtgaaggattcatgaaagttcttaaatgtgaagtggaattgatggccaggatggcaaaaaccattgacagcttcactcagaatcagacaaggctggtggtcatcatcgatggattagatgcctgtgagcaggacaaagtccttcagatgctggacactgtccgagttctgttttcaaaaggcccgttcattgccatttttgcaagtgatccacatattatcataaaggcaattaaccagaacctcaatagtgtgcttcgggattcaaatataaatggccatgactacatgcgcaacatagtccacttgcctgtgttccttaatagtcgtggactaagcaatgcaagaaaatttctcgtaacttcagcaacaaatggagacgttccatgctcagatactacagggatacaggaagatgctgacagaagagtttcacagaacagccttggggagatgacaaaacttggtagcaagacagccctcaatagacgggacacttaccgaagaaggcagatgcagaggaccatcactcgccagatgtcctttgatcttacaaaactgctggttaccgaggactggttcagtgacatcagtccccagaccatgagaagattacttaatattgtttctgtgacaggacgattactgagagccaatcagattagtttcaactgggacaggcttgctagctggatcaaccttactgagcagtggccataccggacttcatggctcatattatatttggaagagactgaaggtattccagatcaaatgacattaaaaaccatctacgaaagaatatcaaagaatattccaacaactaaggatgttgagccacttcttgaaattgatggagatataagaaattttgaagtgtttttgtcttcaaggaccccagttcttgtggctcgagatgtaaaagtctttttgccatgcactgtaaacctagatcccaaactacgggaaattattgcagatgttcgtgctgccagagagcagatcagtattggaggactggcgtaccccccgctccctctacatgagggtcctcctagggcgccatcagggtacagccagcccccatccgtgtgctcttccacgtccttcaatgggcccttcgcagtgaaatgtgaatggacgagcgatcatctttttttt

SEQ ID NO: 317575 - DNA, 3420 bp, Homo sapiens
ggaagaatatggccgccgggtgtggtgagggcgacgcgcttgcagtcgccgtctcttgcttccccgtcctctgacatcgcctgcagccgagcgggcccgttccgccggagctgaggaccaggtattcaaataaagttaattgcagctttctgtgaaaatgtcagttttgatatcacagagcgtcataaattatgtagaggaagaaaacattcctgctctgaaagctcttcttgaaaaatgcaaagatgtagatgagagaaatgagtgtggccagactccactgatgatagctgccgaacaaggcaatctggaaatagtgaaggaattaattaagaatggagctaactgcaatctggaagatttggataattggacagcacttatatctgcatcgaaagaagggcatgtgcacatcgtagaggaactactgaaatgtggggttaacttggagcaccgtgatatgggaggatggacagctcttatgtgggcatgttacaaaggccgtactgacgtagtagagttgcttctttctcatggtgccaatccaagtgtcactggtctgcagtacagtgtttacccaatcatttgggcagcagggagaggccatgcagatatagttcatcttttactgcaaaatggtgctaaagtcaactgctctgataagtatggaaccacccctttagtttgggctgcacgaaagggtcatttggaatgtgtgaaacatttattggccatgggagctgatgtggatcaagaaggagctaattcaatgactgcacttattgtggcagtgaaaggaggttacacacagtcagtaaaagaaattttgaagaggaatccaaatgtaaacttaacagataaagatggaaatacagctttgatgattgcatcaaaggagggacatacggagattgtgcaggatctgctcgacgctggaacatatgtgaacatacctgacaggagtggggatactgtgttgattggcgctgtcagaggtggtcatgttgaaattgttcgagcgcttctccaaaaatatgctgatatagacattagaggacaggataataaaactgctttgtattgggctgttgagaaaggaaatgcaacaatggtgagagatatcttacagtgcaatcctgacactgaaatatgcacaaaggatggtgaaacgccacttataaaggctaccaagatgagaaacattgaagtggtggagctgctgctagataaaggtgctaaagtgtctgctgtagataagaaaggagatactcccttgcatattgctattcgtggaaggagccggaaactggcagaactgcttttaagaaatcccaaagatgggcgattactttataggcccaacaaagcaggcgagactccttataatattgactgtagccatcagaagagtattttaactcaaatatttggagccagacacttgtctcctactgaaacagacggtgacatgcttggatatgatttatatagcagtgccctggcagatattctcagtgagcctaccatgcagccacccatttgtgtggggttatatgcacagtggggaagtgggaaatctttcttactcaagaaactagaagacgaaatgaaaaccttcgccggacaacagattgagcctctctttcagttctcatggctcatagtgtttcttaccctgctactttgtggagggcttggtttattgtttgccttcacggtccacccaaatcttggaatagcagtgtcactgagcttcttggctctcttatatatattctttattgtcatttactttggtggacgaagagaaggagagagttggaattgggcctgggtcctcagcactagattggcaagacatattggatatttggaactcctccttaaattgatgtttgtgaatccacctgagttgccagagcagactactaaagctttacctgtgaggtttttgtttacagattacaatagactgtccagtgtaggtggagaaacttctctggctgaaatgattgcaaccctctcggatgcttgtgaaagagagtttggctttttggcaaccaggctttttcgagtattcaagactgaagatactcagggtaaaaagaaatggaaaaaaacatgttgtctcccatcttttgtcatcttcctttttatcattggctgcattatatctggaattactcttctggctatatttagagttgacccaaagcatctgactgtaaatgctgtcctcatatcaatcgcatctgtagtgggattggcctttgtgttgaactgtcgtacatggtggcaagtgctggactcgctcctgaattcccaaagaaaacgcctccataatgcagcctccaaactgcacaaattgaaaagtgaaggattcatgaaagttcttaaatgtgaagtggaattgatggccaggatggcaaaaaccattgacagcttcactcagaatcagacaaggctggtggtcatcatcgatggattagatgcctgtgagcaggacaaagtccttcagatgctggacactgtccgagttctgttttcaaaaggcccgttcattgccatttttgcaagtgatccacatattatcataaaggcaattaaccagaacctcaatagtgtgcttcgggattcaaatataaatggccatgactacatgcgcaacatagtccacttgcctgtgttccttaatagtcgtggactaagcaatgcaagaaaatttctcgtaacttcagcaacaaatggagacgttccatgctcagatactacagggatacaggaagatgctgacagaagagtttcacagaacagccttggggagatgacaaaacttggtagcaagacagccctcaatagacgggacacttaccgaagaaggcagatgcagaggaccatcactcgccagatgtcctttgatcttacaaaactgctggttaccgaggactggttcagtgacatcagtccccagaccatgagaagattacttaatattgtttctgtgacaggacgattactgagagccaatcagattagtttcaactgggacaggcttgctagctggatcaaccttactgagcagtggccataccggacttcatggctcatattatatttggaagagactgaaggtattccagatcaaatgacattaaaaaccatctacgaaagaatatcaaagaatattccaacaactaaggatgttgagccacttcttgaaattgatggagatataagaaattttgaagtgtttttgtcttcaaggaccccagttcttgtggctcgagatgtaaaagtctttttgccatgcactgtaaacctagatcccaaactacgggaaattattgcaggtgggtattagtagtaaatttaatttttcatctaaagttctaagaatttttcatgtttctaacttatttg

SEQ ID NO: 317576 - DNA, 565 bp, Homo sapiens
tccattgtgggtgaatggatgttctgctcaatgatcgtgggtggcgttgaactgtgtgacacagttctgaaagatgtttgcctgcatatacgtggtcgaagaagtatatctcaccagtggcaaatcaaacaaccaaaaaattgctttagaattaaaattgtgtttaagccctaaaagctttacttaatgcagctctttggattttagaagccatggcagtactagatttgaatttgtagtataaattaaatggtaaattttagaaatttaaaatatttgtgaatatactaaatgttttacttaacatgctatcacacatctattaattttaaaatgcttttgtattttttaaaaggacgattactgagagccaatcagattagtttcaactgggacaggcttgctagctggatcaaccttactgagcagtggccataccggacttcatggctcatattatatttggaagagactgaaggtattccagatcaaatgacattaaaaaccatctacgaaaggtaccttttgtgacctctttgtattttactttattttaggttgagtt

SEQ ID NO: 317577 - DNA, 598 bp, Homo sapiens
atcggcgtaccaagagtcccccactcctgctgcctccccttagtaatgttccatccacgacccccaccctgccccttggtggtagatccccactcattcgtgcttattccgagttggactcccttctgtagtgagactgcttacccctgttgccatagttctgaataaaatctggacctaccgccctactcctggccagctctggttttgacacaagccagctgcatttttctttgtcctcaagttaagttttaaacagaagtaataatttaatggacaaattgcagtgtagtatatgtatggtggtttctaccattgcttcctttagtattaatgaacatgaaagataagctgatgtataaaacaaattcactagaaattcacttaccagaagtatgctttctcattgctgttgcaatagctttataatgtttggtatttctaaatatttctaaagcttctaaaatatgatttgttagtgtaaatatttatgtttttcttctgttaaggtactagaaatgagaaacgcagaaagccacgtggtccctgaagacccacgtttcctcagtgagagcagcagtggcccagccccgcacgg

SEQ ID NO: 317578 - DNA, 214 bp, Homo sapiens
aagagtttcacagaacagccttggggagatgacaaaacttggtagcaagacagccctcaatagacgggtaagatgccattggcttcgagctgtatgtttgtattgctattcaatttaatacaaataaagatgatgccacttaaataatactttgtaaatattgcattaaacgcttcaaataaacattatcattgaatttcctttcagcttcatg

SEQ ID NO: 317579 - DNA, 350 bp, Homo sapiens
gaaatgaccaatataaaaatgtaagtaatatttcttaagtttgagtttagcatcttatggaatatgagtgaggcttttttttcttttgttttgtcatttgcattaaagttttggagttgtatcttattggtttcatttgaaaaatctcattacactttcatttctgtaattgtttaccccttttttgttacatgtttttccatagccattctttgccccatacctttacacgccaaggtattaccctggcggctcccaacatctcatctcacgtccatcagtaaaaacgagtttgcccagagatcagaacaatggcctagtaagtatataaaagggtaacgcaaatatta

SEQ ID NO: 317580 - DNA, 356 bp, Homo sapiens
tgatgataaaagtaatagtttaaaaaaagaaactctctattaatatgtttttataaatcaggaggcaaaaacataaactgttgagtttcagtgttgtatattattttaccatcatgttcatttgtcttcacagtttggctccccccttccccttttcacccacactctcctgttttgtgttgttaggaagttatcaaggaggatgctgctgaggggctttcttcacccacagactcctcgagggtaatggagtagtcctgtggtgtggatcgctggcatctcattgcttctgcctcagtaatgactgtcttaattgtgatgatagcagctcactaactctgcgttgtggtgtgatg

SEQ ID NO: 317581 - DNA, 431 bp, Homo sapiens
  misc_feature (18)..(18): n is a, c, g, or t
  misc_feature (20)..(20): n is a, c, g, or t
ggagagagagagagagananagagagagagagagccattgttctttgacacacaacgccactgtcgagtgtggctctccatgatttgcttcaggaaggctacaggcagcgcctcttccagcagtcctctcctttgaccatggaagtggccacagaaactcttactttttcctcaagtctgaaatatctcttagactgtgacataggaacacatccctacacctcagttttcttatttgtataacgagaccataaaactaactaattcataaaatttactgtgagagttaaatgagagatagcatgtggaattggacctcagctcactctgacgacagagtcttatcttctttttgtacctggggcagacagccagttggatggcctcaggagctgttattttttcaggctgccattgatttttagatttaa

SEQ ID NO: 317582 - DNA, 932 bp, Homo sapiens
ggttccaacatccattctacataaatttctaacaactatgtatagaggattttttttttcttaaaatgataaatatcaaatatacaaaatgaaaaatcaagattcttattaaagaaaaagtaaccatcagcctttgcctttaaaagagattatagataaagcaagaatatgaccctttttgcagttcaaatgcacagtatctacttgaggggaaaaagagaagctcagatatggcaaagtgcaccattttttataattacttggctacacatacaaggggaaaaagggacaagtaaacatactaacaatattgtaaaagctccacaaaaagggaaaatcaactgcagaacaacttacatgtggcacattattcatataaaataaatccactcacatggtaattttttaaattattaaatgctcagacacaaattttcctcagaacacaacatttatgcaaaggaatatatagaatgggtacggtagctcatgcctgtaatcccagcactttgggaggccaaggtgggtggatcacctgaggtcaggagttcgagaccagcctggccaacatggcgaaaccctgtctctactaaaaatacaaaaattaaccagccatggtggcaagcacctgtaatcccagctacttgggaagctgaggcaggagaatcacttgaacctgggagacagaagctgcagtgagctgagatcgcgccactgcactctagtgtgggtgacagagcgagactctgtctcaaaaaaaaaaaaaaaaagtataaagcccaattaaatggatgaagaaaagaaaacatgaattctagttaacaaaattaaacatagtaatgacaacaaaaataccaaaaagactgggaaactataagagctaagaccaacattctaaatatctagagaaaggaagatttttgtattagtaa

SEQ ID NO: 317583 - DNA, 504 bp, Homo sapiens
cctgtttcttaaggtagaaattactacaagggaccaagagcaatgttgtcacagggaaggataaattaggacattcacctggagtcttttaccttagggggggatcctacagtcatcctgggatgggtgggtggacctacaatgaagtgactccaactagcaccaagatggtcctgcctacctttccttttccacatttcttctctctactgcctcccatcttagttcattctgtgctgctgtaacagaatacctgagactggctattttaaaaggaatagaaatttatttctcacagttctggaggctgggaagtccaagatcaaggtgccagcatctggtgagggctgctttctgcctccaagatggcacctcgaatgctgcatcctcctatggcagaaggtggatgggcaaagagtgatgaactcccttcatcaaacccctttataaggacacctaaggaaggagccctcatagcctgatcacttcttagaggccatcttt

SEQ ID NO: 317584 - DNA, 1411 bp, Homo sapiens
agcgtgggcgcctggcaagtgaacaatcgcggtgagaggggcgcgccgcagctcctcaacgccgcaacgcgccggcccaactgcaggaaggtctgtgctctggagccaggtaaatggttataaaattatacaccatggccctcctaaagacactctaggaaaaccatgtcatcctgatcttaaaacacctgcaagaaagagcacagtacttcaccattaataaagtagatatttcatcctgctcagaaaaccaacatttccagcaatggctttactaccggtgttgtttctggttactgtgctgcttccatctttacctgcagaaggaaaggatcccgcttttactgctttgttaaccacccagttgcaagtgcaaagggagattgtaaataaacacaatgaactaaggaaagcagtctctccacctgccagtaacatgctaaagatggaatggagcagagaggtaacaacgaatgcccaaaggtgggcaaacaagtgcactttacaacatagtgatccagaggaccgcaaaaccagtacaagatgtggtgagaatctctatatgtcaagtgaccctacttcctggtcttctgcaatccaaagctggtatgacgagatcctagattttgtctatggtgtaggaccaaagagtcccaatgcagttgttggacattatactcagcttgtttggtactcgacttaccaggtaggctgtggaattgcctactgtcccaatcaagatagtctaaaatactactatgtttgccaatattgtcctgctggtaataatatgaatagaaagaataccccgtaccaacaaggaacaccttgtgccggttgccctgatgactgtgacaaaggactatgcaccaatagttgccagtatcaagatctcctaagtaactgtgattccttgaagaatacagctggctgtgaacatgagttactcaaggaaaagtgcaaggctacttgcctatgtgagaacaaaatttactgatttacctagtgagcattgtgcaagactgcatggataagggctgcatcatttaattgcgacataccagtggaaattgtatgtatgttagtgacaaatttgatttcaaagagcaatgcatcttctcccccagatcatcacagaaatcactttcaggcaatgatttacaaaagtagcatagtagatgatgacaactgtgaactctgacataaatttagtgctttataacgaactgaatcaggttgaggattttgaaaactgtataaccataggatttaggtcactaggactttggatcaaaatggtgcattacgtatttcctgaaacatgctaaagaagaagactgtaacatcattgccattcctactacctgagtttttacttgcataaacaataaattcaaagctttacatctgc

SEQ ID NO: 317585 - DNA, 1386 bp, Homo sapiens
agcgtgggcgcctggcaagtgaacaatcgcggtgagaggggcgcgccgcagctcctcaacgccgcaacgcgccggcccaactgcaggaagggttataaaattatacaccatggccctcctaaagacactctaggaaaaccatgtcatcctgatcttaaaacacctgcaagaaagagcacagtacttcaccattaataaagtagatatttcatcctgctcagaaaaccaacatttccagcaatggctttactaccggtgttgtttctggttactgtgctgcttccatctttacctgcagaaggaaaggatcccgcttttactgctttgttaaccacccagttgcaagtgcaaagggagattgtaaataaacacaatgaactaaggaaagcagtctctccacctgccagtaacatgctaaagatggaatggagcagagaggtaacaacgaatgcccaaaggtgggcaaacaagtgcactttacaacatagtgatccagaggaccgcaaaaccagtacaagatgtggtgagaatctctatatgtcaagtgaccctacttcctggtcttctgcaatccaaagctggtatgacgagatcctagattttgtctatggtgtaggaccaaagagtcccaatgcagttgttggacattatactcagcttgtttggtactcgacttaccaggtaggctgtggaattgcctactgtcccaatcaagatagtctaaaatactactatgtttgccaatattgtcctgctggtaataatatgaatagaaagaataccccgtaccaacaaggaacaccttgtgccggttgccctgatgactgtgacaaaggactatgcaccaatagttgccagtatcaagatctcctaagtaactgtgattccttgaagaatacagctggctgtgaacatgagttactcaaggaaaagtgcaaggctacttgcctatgtgagaacaaaatttactgatttacctagtgagcattgtgcaagactgcatggataagggctgcatcatttaattgcgacataccagtggaaattgtatgtatgttagtgacaaatttgatttcaaagagcaatgcatcttctcccccagatcatcacagaaatcactttcaggcaatgatttacaaaagtagcatagtagatgatgacaactgtgaactctgacataaatttagtgctttataacgaactgaatcaggttgaggattttgaaaactgtataaccataggatttaggtcactaggactttggatcaaaatggtgcattacgtatttcctgaaacatgctaaagaagaagactgtaacatcattgccattcctactacctgagtttttacttgcataaacaataaattcaaagctttacatctgc

SEQ ID NO: 317586 - DNA, 802 bp, Homo sapiens
agcgtgggcgcctggcaagtgaacaatcgcggtgagaggggcgcgccgcagctcctcaacgccgcaacgcgccggcccaactgcaggaaggtctgtgctctggagccaggtaaatggttataaaattatacaccatggccctcctaaagacactctaggaaaaccatgtcatcctgatcttaaaacacctgcaagaaagagcacagtacttcaccattatttccagcaatggctttactaccggtgttgtttctggttactgtgctgcttccatctttacctgcagaaggaaaggatcccgcttttactgctttgttaaccacccagttgcaagtgcaaagggagattgtaaataaacacaatgaactaaggaaagcagtctctccacctgccagtaacatgctaaagatggaatggagcagagaggtaacaacgaatgcccaaaggtgggcaaacaagtgcactttacaacatagtgatccagaggaccgcaaaaccagtacaagatgtggtgagaatctctatatgtcaagtgaccctacttcctggtcttctgcaatccaaagctggtatgacgagatcctagattttgtctatggtgtaggaccaaagagtcccaatgcagttgttggacattatactcagcttgtttggtactcgacttaccaggtaggctgtggaattgcctactgtcccaatcaagatagtctaaaatactactatgtttgccaatattgtcctgcaatgaaaacatatctcaataaaagggaggggataaacgtttggaaatgttttttaaggt

SEQ ID NO: 317587 - DNA, 1374 bp, Homo sapiens
agcgtgggcgcctggcaagtgaacaatcgcggtgagaggggcgcgccgcagctcctcaacgccgcaacgcgccggcccaactgcaggaaggtctgtgctctggagccaggtaaatggttataaaattatacaccatggccctcctaaagacactctaggaaaaccatgtcatcctgatcttaaaacacctgcaagaaagagcacagtacttcaccattatttccagcaatggctttactaccggtgttgtttctggttactgtgctgcttccatctttacctgcagaaggaaaggatcccgcttttactgctttgttaaccacccagttgcaagtgcaaagggagattgtaaataaacacaatgaactaaggaaagcagtctctccacctgccagtaacatgctaaagatggaatggagcagagaggtaacaacgaatgcccaaaggtgggcaaacaagtgcactttacaacatagtgatccagaggaccgcaaaaccagtacaagatgtggtgagaatctctatatgtcaagtgaccctacttcctggtcttctgcaatccaaagctggtatgacgagatcctagattttgtctatggtgtaggaccaaagagtcccaatgcagttgttggacattatactcagcttgtttggtactcgacttaccaggtaggctgtggaattgcctactgtcccaatcaagatagtctaaaatactactatgtttgccaatattgtcctgctggtaataatatgaatagaaagaataccccgtaccaacaaggaacaccttgtgccggttgccctgatgactgtgacaaaggactatgcaccaatagttgccagtatcaagatctcctaagtaactgtgattccttgaagaatacagctggctgtgaacatgagttactcaaggaaaagtgcaaggctacttgcctatgtgagaacaaaatttactgatttacctagtgagcattgtgcaagactgcatggataagggctgcatcatttaattgcgacataccagtggaaattgtatgtatgttagtgacaaatttgatttcaaagagcaatgcatcttctcccccagatcatcacagaaatcactttcaggcaatgatttacaaaagtagcatagtagatgatgacaactgtgaactctgacataaatttagtgctttataacgaactgaatcaggttgaggattttgaaaactgtataaccataggatttaggtcactaggactttggatcaaaatggtgcattacgtatttcctgaaacatgctaaagaagaagactgtaacatcattgccattcctactacctgagtttttacttgcataaacaataaattcaaagctttacatctgc

SEQ ID NO: 317588 - DNA, 1349 bp, Homo sapiens
agcgtgggcgcctggcaagtgaacaatcgcggtgagaggggcgcgccgcagctcctcaacgccgcaacgcgccggcccaactgcaggaagggttataaaattatacaccatggccctcctaaagacactctaggaaaaccatgtcatcctgatcttaaaacacctgcaagaaagagcacagtacttcaccattatttccagcaatggctttactaccggtgttgtttctggttactgtgctgcttccatctttacctgcagaaggaaaggatcccgcttttactgctttgttaaccacccagttgcaagtgcaaagggagattgtaaataaacacaatgaactaaggaaagcagtctctccacctgccagtaacatgctaaagatggaatggagcagagaggtaacaacgaatgcccaaaggtgggcaaacaagtgcactttacaacatagtgatccagaggaccgcaaaaccagtacaagatgtggtgagaatctctatatgtcaagtgaccctacttcctggtcttctgcaatccaaagctggtatgacgagatcctagattttgtctatggtgtaggaccaaagagtcccaatgcagttgttggacattatactcagcttgtttggtactcgacttaccaggtaggctgtggaattgcctactgtcccaatcaagatagtctaaaatactactatgtttgccaatattgtcctgctggtaataatatgaatagaaagaataccccgtaccaacaaggaacaccttgtgccggttgccctgatgactgtgacaaaggactatgcaccaatagttgccagtatcaagatctcctaagtaactgtgattccttgaagaatacagctggctgtgaacatgagttactcaaggaaaagtgcaaggctacttgcctatgtgagaacaaaatttactgatttacctagtgagcattgtgcaagactgcatggataagggctgcatcatttaattgcgacataccagtggaaattgtatgtatgttagtgacaaatttgatttcaaagagcaatgcatcttctcccccagatcatcacagaaatcactttcaggcaatgatttacaaaagtagcatagtagatgatgacaactgtgaactctgacataaatttagtgctttataacgaactgaatcaggttgaggattttgaaaactgtataaccataggatttaggtcactaggactttggatcaaaatggtgcattacgtatttcctgaaacatgctaaagaagaagactgtaacatcattgccattcctactacctgagtttttacttgcataaacaataaattcaaagctttacatctgc

SEQ ID NO: 317589 - DNA, 1860 bp, Homo sapiens
gtgtctttttaggagataatgaaaatacgaaacaatcttcttaccaaataatggattgagtaaacttgaataagctatatcttcaatgcattaattgtattttttgtatacagagaaatttgaaaatattcacaagtataaggaagaaaataaacataacttctagttactccattagggaaataacagctaataaagtatttgcacaaccatatctgtgtaatcacaaccttgtcatcttaattagagtctggtataaataaaaggacaaaccgttttacttttcgtatagaatagccaattgagagatggtacatattgaaaataaactttcctccaaaaattgagatgaagaatgaatgtcagtactataattaactattaaggaatctattttctttttgatggcgtaagggtaacagaagtaggcagaaagaagggagtaggtctctctcttttatagatgtacctcaagggcatcagtagagttcttcagctttttctttattgtcactatcaaagacaaggttggcctcattatgattctactagtaccatagggcaattcttcttttgttccattgttaatgaatctgggaatcacagttcctttgagataatcgagatcattatattggtattccccctcttagaagttttttaaactacatatttcaatgcagacctttgtttttcttgacttagtttccagcaatggctttactaccggtgttgtttctggttactgtgctgcttccatctttacctgcagaaggaaaggatcccgcttttactgctttgttaaccacccagttgcaagtgcaaagggagattgtaaataaacacaatgaactaaggaaagcagtctctccacctgccagtaacatgctaaagatggaatggagcagagaggtaacaacgaatgcccaaaggtgggcaaacaagtgcactttacaacatagtgatccagaggaccgcaaaaccagtacaagatgtggtgagaatctctatatgtcaagtgaccctacttcctggtcttctgcaatccaaagctggtatgacgagatcctagattttgtctatggtgtaggaccaaagagtcccaatgcagttgttggacattatactcagcttgtttggtactcgacttaccaggtaggctgtggaattgcctactgtcccaatcaagatagtctaaaatactactatgtttgccaatattgtcctgctggtaataatatgaatagaaagaataccccgtaccaacaaggaacaccttgtgccggttgccctgatgactgtgacaaaggactatgcaccaatagttgccagtatcaagatctcctaagtaactgtgattccttgaagaatacagctggctgtgaacatgagttactcaaggaaaagtgcaaggctacttgcctatgtgagaacaaaatttactgatttacctagtgagcattgtgcaagactgcatggataagggctgcatcatttaattgcgacataccagtggaaattgtatgtatgttagtgacaaatttgatttcaaagagcaatgcatcttctcccccagatcatcacagaaatcactttcaggcaatgatttacaaaagtagcatagtagatgatgacaactgtgaactctgacataaatttagtgctttataacgaactgaatcaggttgaggattttgaaaactgtataaccataggatttaggtcactaggactttggatcaaaatggtgcattacgtatttcctgaaacatgctaaagaagaagactgtaacatcattgccattcctactacctgagtttttacttgcataaacaataaattcaaagctttacatctgc

SEQ ID NO: 317590 - DNA, 1455 bp, Homo sapiens
agcgtgggcgcctggcaagtgaacaatcgcggtgagaggggcgcgccgcagctcctcaacgccgcaacgcgccggcccaactgcaggaaggtctgtgctctggagccaggtaaatatgtaagacccggattggagactagaaatggctagggacggggaggtggggtgaagcacaggggagagaaccatcgttgagggttataaaattatacaccatggccctcctaaagacactctaggaaaaccatgtcatcctgatcttaaaacacctgcaagaaagagcacagtacttcaccattatttccagcaatggctttactaccggtgttgtttctggttactgtgctgcttccatctttacctgcagaaggaaaggatcccgcttttactgctttgttaaccacccagttgcaagtgcaaagggagattgtaaataaacacaatgaactaaggaaagcagtctctccacctgccagtaacatgctaaagatggaatggagcagagaggtaacaacgaatgcccaaaggtgggcaaacaagtgcactttacaacatagtgatccagaggaccgcaaaaccagtacaagatgtggtgagaatctctatatgtcaagtgaccctacttcctggtcttctgcaatccaaagctggtatgacgagatcctagattttgtctatggtgtaggaccaaagagtcccaatgcagttgttggacattatactcagcttgtttggtactcgacttaccaggtaggctgtggaattgcctactgtcccaatcaagatagtctaaaatactactatgtttgccaatattgtcctgctggtaataatatgaatagaaagaataccccgtaccaacaaggaacaccttgtgccggttgccctgatgactgtgacaaaggactatgcaccaatagttgccagtatcaagatctcctaagtaactgtgattccttgaagaatacagctggctgtgaacatgagttactcaaggaaaagtgcaaggctacttgcctatgtgagaacaaaatttactgatttacctagtgagcattgtgcaagactgcatggataagggctgcatcatttaattgcgacataccagtggaaattgtatgtatgttagtgacaaatttgatttcaaagagcaatgcatcttctcccccagatcatcacagaaatcactttcaggcaatgatttacaaaagtagcatagtagatgatgacaactgtgaactctgacataaatttagtgctttataacgaactgaatcaggttgaggattttgaaaactgtataaccataggatttaggtcactaggactttggatcaaaatggtgcattacgtatttcctgaaacatgctaaagaagaagactgtaacatcattgccattcctactacctgagtttttacttgcataaacaataaattcaaagctttacatctgc

SEQ ID NO: 317591 - DNA, 1793 bp, Homo sapiens
ctattatagtgctgagaatgaattgttcggcactagaaagaaagaacaaataggtcataagcgaattcactccttttcgctttgaaaacaactgtgaatagaagaaaatgcacctattactcatccgccttctgagagagaaaacatgtctttaacccatgcttgatacgtatgctaaacttgcagccagtagccttgggtcaggagttctgcgtattttcataagagttgttcctgttactcttcgtgaattttctcaccataaaactgttgccaacggggaagagggacaagaacatgaagtgtttatgagggagcctgaaactgacaacctgtgtaactggagtgcgtcgttggcatgacactggcagcgcactgcaaacttaagcacctgtggactcctaattagctctttaaattgaactacattaattcaggcattcttgtttgaatgcgaacgcctcctttttcaagccaccccctgggcaacccgaatccttatatgacctccctcctcctcctagtacggcgcagggttataaaattatacaccatggccctcctaaagacactctaggaaaaccatgtcatcctgatcttaaaacacctgcaagaaagagcacagtacttcaccattatttccagcaatggctttactaccggtgttgtttctggttactgtgctgcttccatctttacctgcagaaggaaaggatcccgcttttactgctttgttaaccacccagttgcaagtgcaaagggagattgtaaataaacacaatgaactaaggaaagcagtctctccacctgccagtaacatgctaaagatggaatggagcagagaggtaacaacgaatgcccaaaggtgggcaaacaagtgcactttacaacatagtgatccagaggaccgcaaaaccagtacaagatgtggtgagaatctctatatgtcaagtgaccctacttcctggtcttctgcaatccaaagctggtatgacgagatcctagattttgtctatggtgtaggaccaaagagtcccaatgcagttgttggacattatactcagcttgtttggtactcgacttaccaggtaggctgtggaattgcctactgtcccaatcaagatagtctaaaatactactatgtttgccaatattgtcctgctggtaataatatgaatagaaagaataccccgtaccaacaaggaacaccttgtgccggttgccctgatgactgtgacaaaggactatgcaccaatagttgccagtatcaagatctcctaagtaactgtgattccttgaagaatacagctggctgtgaacatgagttactcaaggaaaagtgcaaggctacttgcctatgtgagaacaaaatttactgatttacctagtgagcattgtgcaagactgcatggataagggctgcatcatttaattgcgacataccagtggaaattgtatgtatgttagtgacaaatttgatttcaaagagcaatgcatcttctcccccagatcatcacagaaatcactttcaggcaatgatttacaaaagtagcatagtagatgatgacaactgtgaactctgacataaatttagtgctttataacgaactgaatcaggttgaggattttgaaaactgtataaccataggatttaggtcactaggactttggatcaaaatggtgcattacgtatttcctgaaacatgctaaagaagaagactgtaacatcattgccattcctactacctgagtttttacttgcataaacaataaattcaaagctttacatctgc

SEQ ID NO: 317592 - DNA, 1093 bp, Homo sapiens
agcgtgggcgcctggcaagtgaacaatcgcggtgagaggggcgcgccgcagctcctcaacgccgcaacgcgccggcccaactgcaggaaggtctgtgctctggagccaggtaaatggttataaaattatacaccatggccctcctaaagacactctaggaaaaccatgtcatcctgatcttaaaacacctgcaagaaagagcacagtacttcaccattatttccagcaatggctttactaccggtgttgtttctggttactgtgctgcttccatctttacctgcagaaggaaaggatcccgcttttactgctttgttaaccacccagttgcaagtgcaaagggagattgtaaataaacacaatgaactaaggaaagcagtctctccacctgccagtaacatgctaaagatggaatggagcagagaggtaacaacgaatgcccaaaggtgggcaaacaagtgcactttacaacatagtgatccagaggaccgcaaaaccagtacaagatgtggtgagaatctctatatgtcaagtgaccctacttcctggtcttctgcaatccaaagctggtatgacgagatcctagattttgtctatggtgtaggaccaaagagtcccaatgcagttgttggacattatactcagcttgtttggtactcgacttaccaggtaggctgtggaattgcctactgtcccaatcaagatagtctaaaatactactatgtttgccaatattgtcctgctggtaataatatgaatagaaagaataccccgtaccaacaaggaacaccttgtgccggttgccctgatgactgtgacaaaggactatgcagttccacataccaacaaaactagtgatgccagctgctctgaacgacctagcaagaaactgactcatggaggaatgcagtttcaacatcctgatgattacatcccccttaccctgaccaatcaacaatccaaatttttcagcttctcatcctccacagtctccttaaaggaccccttcatggagcaaatttgtggcttgagatttcctctcatttcctagttcaaaggccttgtgattattaaactcattctcggctgtaaa

SEQ ID NO: 317593 - DNA, 1492 bp, Homo sapiens
agcgtgggcgcctggcaagtgaacaatcgcggtgagaggggcgcgccgcagctcctcaacgccgcaacgcgccggcccaactgcaggaaggtctgtgctctggagccaggtaaatatgtaagacccggattggagactagaaatggctagggacggggaggtggggtgaagcacaggggagagaaccatcgttgagggttataaaattatacaccatggccctcctaaagacactctaggaaaaccatgtcatcctgatcttaaaacacctgcaagaaagagcacagtacttcaccattaataaagtagatatttcatcctgctcagaaaaccaacatttccagcaatggctttactaccggtgttgtttctggttactgtgctgcttccatctttacctgcagaaggaaaggatcccgcttttactgctttgttaaccacccagttgcaagtgcaaagggagattgtaaataaacacaatgaactaaggaaagcagtctctccacctgccagtaacatgctaaagatggaatggagcagagaggtaacaacgaatgcccaaaggtgggcaaacaagtgcactttacaacatagtgatccagaggaccgcaaaaccagtacaagatgtggtgagaatctctatatgtcaagtgaccctacttcctggtcttctgcaatccaaagctggtatgacgagatcctagattttgtctatggtgtaggaccaaagagtcccaatgcagttgttggacattatactcagcttgtttggtactcgacttaccaggtaggctgtggaattgcctactgtcccaatcaagatagtctaaaatactactatgtttgccaatattgtcctgctggtaataatatgaatagaaagaataccccgtaccaacaaggaacaccttgtgccggttgccctgatgactgtgacaaaggactatgcaccaatagttgccagtatcaagatctcctaagtaactgtgattccttgaagaatacagctggctgtgaacatgagttactcaaggaaaagtgcaaggctacttgcctatgtgagaacaaaatttactgatttacctagtgagcattgtgcaagactgcatggataagggctgcatcatttaattgcgacataccagtggaaattgtatgtatgttagtgacaaatttgatttcaaagagcaatgcatcttctcccccagatcatcacagaaatcactttcaggcaatgatttacaaaagtagcatagtagatgatgacaactgtgaactctgacataaatttagtgctttataacgaactgaatcaggttgaggattttgaaaactgtataaccataggatttaggtcactaggactttggatcaaaatggtgcattacgtatttcctgaaacatgctaaagaagaagactgtaacatcattgccattcctactacctgagtttttacttgcataaacaataaattcaaagctttacatctgc

SEQ ID NO: 317594 - DNA, 1738 bp, Homo sapiens
gtgtctttttaggagataatgaaaatacgaaacaatcttcttaccaaataatggattgagtaaacttgaataagctatatcttcaatgcattaattgtattttttgtatacagagaaatttgaaaatattcacaagtataaggaagaaaataaacataacttctagttactccattagggaaataacagctaataaagtatttgcacaaccatatctgtgtaatcacaaccttgtcatcttaattagagtctggtataaataaaaggacaaaccgttttacttttcgtatagaatagccaattgagagatggtacatattgaaaataaactttcctccaaaaattgagatgaagaatgaatgtcagtactataattaactattaaggaatctattttctttttgatggcgtaagggtaacagaagtaggcagaaagaagggagtaggtctctctcttttatagatgtacctcaagggcatcagtagagttcttcagctttttctttattgtcactatcaaagacaaggttggcctcattatgattctactagtaccatagggcaattcttcttttgttccattgttaatgaatctgggaatcacagttcctttgagataatcgagatcattatattggtattccccctcttagaagttttttaaactacatatttcaatgcagacctttgtttttcttgacttagtttccagcaatggctttactaccggtgttgtttctggttactgtgctgcttccatctttacctgcagaaggaaaggatcccgcttttactgctttgttaaccacccagttgcaagtgcaaagggagattgtaaataaacacaatgaactaaggaaagcagtctctccacctgccagtaacatgctaaagatggaatggagcagagaggtaacaacgaatgcccaaaggtgggcaaacaagtgcactttacaacatagtgatccagaggaccgcaaaaccagtacaagatgtggtgagaatctctatatgtcaagtgaccctacttcctggtcttctgcaatccaaagctggtatgacgagatcctagattttgtctatggtgtaggaccaaagagtcccaattggtaataatatgaatagaaagaataccccgtaccaacaaggaacaccttgtgccggttgccctgatgactgtgacaaaggactatgcaccaatagttgccagtatcaagatctcctaagtaactgtgattccttgaagaatacagctggctgtgaacatgagttactcaaggaaaagtgcaaggctacttgcctatgtgagaacaaaatttactgatttacctagtgagcattgtgcaagactgcatggataagggctgcatcatttaattgcgacataccagtggaaattgtatgtatgttagtgacaaatttgatttcaaagagcaatgcatcttctcccccagatcatcacagaaatcactttcaggcaatgatttacaaaagtagcatagtagatgatgacaactgtgaactctgacataaatttagtgctttataacgaactgaatcaggttgaggattttgaaaactgtataaccataggatttaggtcactaggactttggatcaaaatggtgcattacgtatttcctgaaacatgctaaagaagaagactgtaacatcattgccattcctactacctgagtttttacttgcataaacaataaattcaaagctttacatctgc

SEQ ID NO: 317595 - DNA, 1289 bp, Homo sapiens
agcgtgggcgcctggcaagtgaacaatcgcggtgagaggggcgcgccgcagctcctcaacgccgcaacgcgccggcccaactgcaggaaggtctgtgctctggagccaggtaaatggttataaaattatacaccatggccctcctaaagacactctaggaaaaccatgtcatcctgatcttaaaacacctgcaagaaagagcacagtacttcaccattaataaagtagatatttcatcctgctcagaaaaccaacatttccagcaatggctttactaccggtgttgtttctggttactgtgctgcttccatctttacctgcagaaggaaaggatcccgcttttactgctttgttaaccacccagttgcaagtgcaaagggagattgtaaataaacacaatgaactaaggaaagcagtctctccacctgccagtaacatgctaaagatggaatggagcagagaggtaacaacgaatgcccaaaggtgggcaaacaagtgcactttacaacatagtgatccagaggaccgcaaaaccagtacaagatgtggtgagaatctctatatgtcaagtgaccctacttcctggtcttctgcaatccaaagctggtatgacgagatcctagattttgtctatggtgtaggaccaaagagtcccaattggtaataatatgaatagaaagaataccccgtaccaacaaggaacaccttgtgccggttgccctgatgactgtgacaaaggactatgcaccaatagttgccagtatcaagatctcctaagtaactgtgattccttgaagaatacagctggctgtgaacatgagttactcaaggaaaagtgcaaggctacttgcctatgtgagaacaaaatttactgatttacctagtgagcattgtgcaagactgcatggataagggctgcatcatttaattgcgacataccagtggaaattgtatgtatgttagtgacaaatttgatttcaaagagcaatgcatcttctcccccagatcatcacagaaatcactttcaggcaatgatttacaaaagtagcatagtagatgatgacaactgtgaactctgacataaatttagtgctttataacgaactgaatcaggttgaggattttgaaaactgtataaccataggatttaggtcactaggactttggatcaaaatggtgcattacgtatttcctgaaacatgctaaagaagaagactgtaacatcattgccattcctactacctgagtttttacttgcataaacaataaattcaaagctttacatctgc

SEQ ID NO: 317596 - DNA, 1839 bp, Homo sapiens
aaggaatcaaacttgactagtaaagccaataaaggccccttcagaaaactggcctcataccttgtctacacagtccctctacagggttcttcacctttggtcataagcgaattcactccttttcgctttgaaaacaactgtgaatagaagaaaatgcacctattactcatccgccttctgagagagaaaacatgtctttaacccatgcttgatacgtatgctaaacttgcagccagtagccttgggtcaggagttctgcgtattttcataagagttgttcctgttactcttcgtgaattttctcaccataaaactgttgccaacggggaagagggacaagaacatgaagtgtttatgagggagcctgaaactgacaacctgtgtaactggagtgcgtcgttggcatgacactggcagcgcactgcaaacttaagcacctgtggactcctaattagctctttaaattgaactacattaattcaggcattcttgtttgaatgcgaacgcctcctttttcaagccaccccctgggcaacccgaatccttatatgacctccctcctcctcctagtacggcgcagggttataaaattatacaccatggccctcctaaagacactctaggaaaaccatgtcatcctgatcttaaaacacctgcaagaaagagcacagtacttcaccattatttccagcaatggctttactaccggtgttgtttctggttactgtgctgcttccatctttacctgcagaaggaaaggatcccgcttttactgctttgttaaccacccagttgcaagtgcaaagggagattgtaaataaacacaatgaactaaggaaagcagtctctccacctgccagtaacatgctaaagatggaatggagcagagaggtaacaacgaatgcccaaaggtgggcaaacaagtgcactttacaacatagtgatccagaggaccgcaaaaccagtacaagatgtggtgagaatctctatatgtcaagtgaccctacttcctggtcttctgcaatccaaagctggtatgacgagatcctagattttgtctatggtgtaggaccaaagagtcccaatgcagttgttggacattatactcagcttgtttggtactcgacttaccaggtaggctgtggaattgcctactgtcccaatcaagatagtctaaaatactactatgtttgccaatattgtcctgctggtaataatatgaatagaaagaataccccgtaccaacaaggaacaccttgtgccggttgccctgatgactgtgacaaaggactatgcaccaatagttgccagtatcaagatctcctaagtaactgtgattccttgaagaatacagctggctgtgaacatgagttactcaaggaaaagtgcaaggctacttgcctatgtgagaacaaaatttactgatttacctagtgagcattgtgcaagactgcatggataagggctgcatcatttaattgcgacataccagtggaaattgtatgtatgttagtgacaaatttgatttcaaagagcaatgcatcttctcccccagatcatcacagaaatcactttcaggcaatgatttacaaaagtagcatagtagatgatgacaactgtgaactctgacataaatttagtgctttataacgaactgaatcaggttgaggattttgaaaactgtataaccataggatttaggtcactaggactttggatcaaaatggtgcattacgtatttcctgaaacatgctaaagaagaagactgtaacatcattgccattcctactacctgagtttttacttgcataaacaataaattcaaagctttacatctgc

SEQ ID NO: 317597 - DNA, 908 bp, Homo sapiens
gtgaaagcaatttcagaataaaaagtgtcacctagcaagaaagacttgcgttctgcgcatgtgcccccctcccccatattccagcttgcctgcaaggctggtagttctaaccaacagtaaaagaaaaacgaactgactaaaatccatactctgattgttcagcaagagacattgctaaatttcctgtccaccatttgtacttttatgtattttagggctacctagagagttcttaaaggcccagatgatgaaaatcggctgcccttcttcccaaatgagttgcacagtccatctggagagggcactcacacttttgtatgaagctgtaggccataaaatggaaagtaaagaattaaaaactgcagccatttggtagcagttataaaaaaaaaaaaataggacgggggaaggtagaaggttgtgtggtgggggcagttgctccagcaaattagatttacagaatgggttatagagtaagcctttattgaaagttccttttcacatctctgcaagatatttttttgcttacatttttttctggcctattgcctatcctttgctcctgaccgttcctcttcatgtctccacacccgtgtcactgcccccccaccccatgcattttcctggaaagtctgataattcttgagctcccaatggatctcacttcttaaggttctggttccttttcccttcaagttccctccaaaacaagcattctcagacaattctgattatagaaggaggaagaacaactgtgccggaaccaactggaaaatttggaaagctgacagctagctgcagctgtgctgtactatgttgtataactaatgcactaagattaaatgatttttgtacatcaataaacaatgtggctcatggtatgtcaacaaataaattgagtaacaaag

SEQ ID NO: 317598 - DNA, 387 bp, Homo sapiens
aacaaagactgacaatgcccaatgccagatggagacagagaggtaaagacacaacttctgccatctcagaacttacattctagctagctggggctttgagaggtgcccactcacagtagggaagaattcagcactgggaagattttcctgtcttattttggcaaatcttaggtgagccactgtattcatctgctgagactgccgtaacaaagaaccacagactgggtggccgaagcaacaggaatgtacttcctcacagtcctggaggcacagtccaaggtcaaggtgctgccagcattggtttcctctggggccttcctccttcgttcacagatggcagtgttctggatgcctcttctcgtgattgtccagttgtacacatgtctg

SEQ ID NO: 317599 - DNA, 739 bp, Homo sapiens
ctttccccctatcctttctggcttaaagtttcatttcttggagaatttgtaggagaaatagaaaaatcatgttggacttaagtgtcactatgtgaattttcagccgtagccatgaataaatcttattaaaaagtactactgagtagtattcttaagagatttttagacacaggtaggagaaagaaatcaaaattgtctgtttcacagtgcattattttacttgcaggctttcttgtaattttcttatcagatcgacatttaaagtagctatatttggtcacagtagaagttttgctggttatttaagtgcagtgtcactatggaggtagttgaatgaagtcaataaaagtactgcttacatagcattgatgaaagttcctctttacactttacatatgtaagcaagcatggtaaacagtggcttacgtatccttccagaaattttctgtacctctataagcctgtgtgtgtgtacatgtgtcccaattctaccagtaggattatacaatcactactgttctacaactttatttttttcatttgagggtaaatcttgagtgtctttctgtatcaccacatataaatctctcattttttaaaaactctcataactgaactaccatttgtcagcttctgattctgttagttgaggtctgtggtagcaaataacagaaaccaactctggttaatgtaaacagaagatttgattggaaatattggatggttcacagacaggaaa

SEQ ID NO: 317600 - DNA, 1003 bp, Homo sapiens
gctttcaggatctcagctccaacaccaaggcctctgtgttccctagagaagccactccggatggtctctctgaagtctgcctccttccctggccagctctacaacttagaatgcctgaatatatacaaatatgaacaagacccacaaggactgctcatcaccccagtattccatttacaacatcctgaatgaactcccgaccaggcctataattctctcttgcagccaaatatcctgcttactcctggtatctacctggtcagcagacctcatgagttatcgcccagtgacaaaaccatcccaaagatgcaccagtccagcacaaagtatgactgtcaatctcacaaaagatgtagggttctacgaggatactcagagtataagaattacgctaagtgaaataagccaagcccagaaagacacatactttattatttcatgtatctgtggaatctaaaagagtcaaattcatggcagcagggagagggctgaagaagggggagatgttgatcaaagtttctatgtatacaaagaccaaaccatcacattatgcctcataaatatatacaattattatttgctaattacaagtaaagcaatacaagaagaaaaaaaggaatcataagtaaatccatgacaagtgaaaacgcaatggagagaagggaatcaatgattgaagaagagaaaggacagtggatttacaactgcttcgaaagagtgatttgactggcaaaggactggggagaggtcctttgggaaatggacaaagccctcgaatggttaggaaagacaatctctttataaatgcagggcataagctgagcacaaggtgaagtttggcatgtactgccgtgggatgttgtaaaaattatgtcaaaagcaaagcaattcttggttcatctgtgttcactgtgagactagcctattattggggttaaacttataaacaaacttctattcatcatttttttctccaaaataaagtgatcaaattgtcccacag

SEQ ID NO: 317601 - DNA, 684 bp, Homo sapiens
agctaggctgctgccccctctcatttacacaagtaggaagaggaaagagaacctggaggaggtatggcacacatggcctctgcttacatatcagagaactcagtgtcctggccacagtcaaatacaatagaggccaggaaaggttgtgtatctcggctaacacatgtccagctacaagtttctattacagctgatgaaagagacaactagcgggctctgtacattgattcaatcctgtctgaggatgaccatatagaagcataaggagaggagacaagtgagtcagatagtggccaagtttctgatttgggataccattcacaaagatggggagaagaaaaagtagaagacatttggaagaagaaaaaacattgcaattggacaagttgactttgagattcctatgagcaggggtatactgacaaacctgctctcccagaaaacaaaaacaaaaatcctgtttatagcctttgatgacttccacgatctaaatgtacccatcatggcctatttcaagctaccaagatgatgtcactgaatgagcagttggaaagaaatgtgcatgaataggctttcataagccagcaaaggctgggttcagctcacctctaccagtgaggatttccaaatggaggcatcttaaagacactgggatatgcagagctcaagctaaggagtagaatc

SEQ ID NO: 317602 - DNA, 1271 bp, Homo sapiens
accaatcagcgcgctggctggagcgcgggtctgcccctctggacgcacatgcgcgctgtcctggctggggagatggacggccgccgtgttttgggccggttctggagtggctggcggcggggcctgggtgtccgcccagtgcccgaggacgcaggctttggcaccgaagcccggcatcagaggcaaccccgcggctcctgccaacggtcggggcccctcggggaccagcccttcgcggggctgctgccaaaaaacctcagtcgggaggagctggttgatgcgctgcgggcagccgtggtggaccggaaaggacctctagtgacgttgaacaagccacagggtctaccagtgacaggaaaaccaggagagctgacgttgttctcagtgctgccagagctgagccagtccctagggctcagggagcaggagcttcaggttgtccgagcatctgggaaagaaagctctgggcttgtactcctctccagctgtccccagacagctagtcgcctccagaagtacttcacccatgcacggagagcccaaaggcccacagccacctactgtgctgtcactgatgggatcccagctgcttctgaggggaagatccaggctgccctgaaactggaacacattgatggggtcaatctcacagttccagtgaaggccccatcccgaaaggacatcctggaaggtgtcaagaagactctcagtcactttcgtgtggtagccacaggctctggctgtgccctggtccagctgcagccactgacagtgttctccagtcaactacaggtgcacatggtactacagctctgccctgtgcttggggaccacatgtactctgcccgtgtgggcactgtcctgggccagcgatttctgctgccagctgagaacaacaagccccaaagacaggtcctggatgaagccctcctcagacgcctccacctgaccccctcccaggctgcccagctgcccttgcacctccacctacatcggctccttctcccaggcaccagggccagggacacccctgttgagctcctggcaccactgcccccttatttctccaggaccctacagtgcctggggctccgcttacaatagtcctccctctgttcctgaccccctcacacacactggaaagtgagggtgggggctctgcagtcagacaaacctaagatcacatcctggacaggccacttgcttgctgtgtggcattgggcaagtaactttacctctctggacttgtgataataaaagttcctacctca

SEQ ID NO: 317603 - DNA, 1327 bp, Homo sapiens
accaatcagcgcgctggctggagcgcgggtctgcccctctggacgcacatgcgcgctgtcctggctggggagatggacggccgccgtgttttgggccggttctggagtggctggcggcggggcctgggtgtccgcccagtgcccgaggacgcaggctttggcaccgaagcccggcatcagaggcaaccccgcggctcctgccaacggtcggggcccctcggggaccagcccttcgcggggctgctgccaaaaaacctcagtcgggaggagctggttgatgcgctgcgggcagccgtggtggaccggaaaggacctctagtgacgttgaacaagccacagggtctaccagtgacaggaaaaccaggagagctgacgttgttctcagtgctgccagagctgagccagtccctagggctcagggagcaggagcttcaggttgtccgagcatctgggaaagaaagctctgggcttgtactcctctccagctgtccccagacagctagtcgcctccagaagtacttcacccatgcacggagagcccaaaggcccacagccacctactgtgctgtcactgatgggatcccagctgcttctgaggggaagatccaggctgccctgaaactggaacacattgatggggtcaatctcacagttccagtgaaggccccatcccgaaaggacatcctggaaggtgtcaagaagactctcagtcactttcgtgtggtagccacaggctctggctgtgccctggtccagctgcagccactgacagtgttctccagtcaactacaggtgcacatggtactacagctctgccctgtgcttggggaccacatgtactctgcccgtgtgggcactgtcctgggccagcgatttctgctgccagctgagaacaacaagccccaaagacaggtcctggatgaagccctcctcagacgcctccacctgaccccctcccaggctgcccagctgcccttgcacctccacctacatcggctccttctcccaggcaccagggccagggacacccctgttgagctcctggcaccactgcccccttatttctccaggaccctacagtgcctggggctccgcttacaatagtcctccctctgttcctgaccccctcacacacactggaaagtgagggtgggggctctgcagtcagacaaacctaagatcacatcctggacaggccacttgcttgctgtgtggcattgggcaagtaactttacctctctggacttgtgataataaaagttcctacctcacatgttatggttttgaggatttgctaagaaagtaaatgtttattacggatcttgct

SEQ ID NO: 317604 - DNA, 1140 bp, Homo sapiens
accaatcagcgcgctggctggagcgcgggtctgcccctctggacgcacatgcgcgctgtcctggctggggagatggacggccgccgtgttttgggccggttctggagtggctggcggcggggcctgggtgtccgcccagtgcccgaggacgcaggctttggcaccgaagcccggcatcagaggcaaccccgcggctcctgccaacggtcggggcccctcggggaccagcccttcgcggggctgctgccaaaaaacctcagtcgggaggagctggttgatgcgctgcgggcagccgtggtggaccggaaaggacctctagtgacgttgaacaagccacagggtctaccagtgacaggaaaaccaggagagctgacgttgttctcagtgctgccagagctgagccagtccctagggctcagggagcaggagcttcaggttgtccgagcatctgggaaagaaagctctgggcttgtactcctctccagctgtccccagacagctagtcgcctccagaagtacttcacccatgcacggagagcccaaaggcccacagccacctactgtgctgtcactgatgggatcccagctgcttctgaggggaagatccaggctgccctgaaactggaacacattgatggggtcaatctcacagttccagtgaaggccccatcccgaaaggacatcctggaaggtgtcaagaagactctcagtcactttcgtgtggtagccacaggctctggctgtgccctggtccagctgcagccactgacagtgttctccagtcaactacaggtgcacatggtactacagctctgccctgtgcttggggaccacatgtactctgcccgtgtgggcactgtcctgggccagcgatttctgctgccagctgagaacaacaagccccaaagacagaatagtcctccctctgttcctgaccccctcacacacactggaaagtgagggtgggggctctgcagtcagacaaacctaagatcacatcctggacaggccacttgcttgctgtgtggcattgggcaagtaactttacctctctggacttgtgataataaaagttcctacctcacatgttatggttttgaggatttgctaagaaagtaaatgtttattacggatcttgct

SEQ ID NO: 317605 - DNA, 1559 bp, Homo sapiens
accaatcagcgcgctggctggagcgcgggtctgcccctctggacgcacatgcgcgctgtcctggctggggagatggacggccgccgtgttttgggccggttctggagtggctggcggcggggcctgggtgtccgcccagtgcccgaggacgcaggctttggcaccgaagcccggtgattaagtaccccctctctcatgcgggacggaggctagggcagggggaaggcacgtgcgggatctggatcaggtagatgttacccgaaaacagccccgttggcctctctgagcctcggtgccctccgctgtagaatgggaccggtcgtacctgaattttcgaggtcagcccagacattgtgaggcatttgtcagaggccgcaggatttgggaagaggcgtccggagataggaatgggtggcacctcgggatggaatgactcccattgcttctccctccttgtccaggcatcagaggcaaccccgcggctcctgccaacggtcggggcccctcggggaccagcccttcgcggggctgctgccaaaaaacctcagtcgggaggagctggttgatgcgctgcgggcagccgtggtggaccggaaaggacctctagtgacgttgaacaagccacagggtctaccagtgacaggaaaaccaggagagctgacgttgttctcagtgctgccagagctgagccagtccctagggctcagggagcaggagcttcaggttgtccgagcatctgggaaagaaagctctgggcttgtactcctctccagctgtccccagacagctagtcgcctccagaagtacttcacccatgcacggagagcccaaaggcccacagccacctactgtgctgtcactgatgggatcccagctgcttctgaggggaagatccaggctgccctgaaactggaacacattgatggggtcaatctcacagttccagtgaaggccccatcccgaaaggacatcctggaaggtgtcaagaagactctcagtcactttcgtgtggtagccacaggctctggctgtgccctggtccagctgcagccactgacagtgttctccagtcaactacaggtgcacatggtactacagctctgccctgtgcttggggaccacatgtactctgcccgtgtgggcactgtcctgggccagcgatttctgctgccagctgagaacaacaagccccaaagacaggtcctggatgaagccctcctcagacgcctccacctgaccccctcccaggctgcccagctgcccttgcacctccacctacatcggctccttctcccaggcaccagggccagggacacccctgttgagctcctggcaccactgcccccttatttctccaggaccctacagtgcctggggctccgcttacaatagtcctccctctgttcctgaccccctcacacacactggaaagtgagggtgggggctctgcagtcagacaaacctaagatcacatcctggacaggccacttgcttgctgtgtggcattgggcaagtaactttacctctctggacttgtgataataaaagttcctacctca

SEQ ID NO: 317606 - DNA, 1849 bp, Homo sapiens
accaatcagcgcgctggctggagcgcgggtctgcccctctggacgcacatgcgcgctgtcctggctggggagatggacggccgccgtgttttgggccggttctggagtggctggcggcggggcctgggtgtccgcccagtgcccgaggacgcaggctttggcaccgaagcccggcatcagaggcaaccccgcggctcctgccaacggtcggggcccctcggggaccagcccttcgcggggctgctgccaaaaaacctcagtcgggaggagctggttgatgcgctgcgggcagccgtggtggaccggaaaggacctctagtgacgttgaacaagccacagggtctaccagtgacaggaaaaccaggagagctgacgttgttctcagtgctgccagagctgagccagtccctagggctcagggagcaggagcttcaggttgtccgagcatctgggaaagaaagctctgggcttgtactcctctccagctgtccccagacagctagtcgcctccagaagtacttcacccatgcacggagagcccaaaggcccacagccacctactgtgctgtcactgatgggatcccagctgcttctgaggggaagatccaggctgccctgaaactggaacacattgatggggtcaatctcacagttccagtgaaggccccatcccgaaaggacatcctggaaggtgtcaagaagactctcagtcactttcgtgtggtagccacaggctctggctgtgccctggtccagctgcagccactgacaggtaggtctggcaccctagccagcctttaaaactgcacttgatttgggaggctgaggcaggtggatcacgaggtcaggagttcaagaccagtctggccaagatggtgaaaccctgtttcaactaaaaactacaaaaattagctgggcacggtggcaggcgcctgtaaaaccagctactcgggaggctgaggcaggagaatcgcttgaacctgggaggcagaagttgcaatgagccaagatcataccattgcactccagcctgggagacagagtgaaacgctggctaaaaaaaaaaaaaactgcacttggcttagggaggcaaggagctggggagacagtggtatcagcagcagcctggggagcatttgatggcccccagaggtgtatgtgaccaggcccagctagaggaggcagcttcaggctagcaccccaacaggaaagaacagtccttaggcccggtggcttcagcaattaaatcagggttgcatctcatcatgagtggatcccacagccaggcagattgatagctgtgatcgtcctgacgtgttatgtgtccctctctggatgcaggggccatagtactgacctcactgaaacatatgatctgagaaagggggtggtgtttccccaaaggaaaaggggaggagtgatactgggtggcacagaacgagtagctgcccactgtctctcctggctttcctgttgcccagtgttctccagtcaactacaggtgcacatggtactacagctctgccctgtgcttggggaccacatgtactctgcccgtgtgggcactgtcctgggccagcgatttctgctgccagctgagaacaacaagccccaaagacagaatagtcctccctctgttcctgaccccctcacacacactggaaagtgagggtgggggctctgcagtcagacaaacctaagatcacatcctggacaggccacttgcttgctgtgtggcattgggcaagtaactttacctctctggacttgtgataataaaagttcctacctcacatgttatggttttgaggatttgctaagaaagtaaatgtttattacggatcttgct

SEQ ID NO: 317607 - DNA, 1225 bp, Homo sapiens
gacgtggtttcaccgtgttagccaggatggtctcgatctcctgacttcgaggggccacaggactagtagagccaagagttgagggtccgggtggggtgatccggccgtcagaaatgcaaaagcctggaaagacatctccaaaggccaatctcaggttggacaatcgtgagctggggaagctgcaaacactgtgacctccggaataaccgctggcatcagaggcaaccccgcggctcctgccaacggtcggggcccctcggggaccagcccttcgcggggctgctgccaaaaaacctcagtcgggaggagctggttgatgcgctgcgggcagccgtggtggaccggaaaggacctctagtgacgttgaacaagccacagggtctaccagtgacaggaaaaccaggagagctgacgttgttctcagtgctgccagagctgagccagtccctagggctcagggagcaggagcttcaggttgtccgagcatctgggaagtaagtggtaggggtgacaggaagctaggagtacaggcatccatctgtggtggggaaacagctgcttggggataagctgagacattttccatgggaaggtttgagatcatagaggtggatacaagtactgtgaagaagaggaagccgatggctctgggttcaaatcctcaagtacaaatggtgtgataccaggcaaagcatgacacctccctgacgctgggcacagtgactcacacctgtaatcccaacacttctggaggccaaggcaagaggatcacttgagcccaggagttcgagaccagcctgggcaaaatagaccccatctctggaaaaacaacaacaaaactttccgcgtggtggctcatgcctataatcaataggactttgggaggccgaggtgggaggattgcttgagtccagaagttcaagaccagcctgggcaacatggcaaaaccctatctttacttaaaaaacaaaataaaacacacacacacacacacacaaaaacctagctgggcagagcagcacatgcctgtagtgctcgggtggctgagatgggagaatcacctgagctcagaagatggcagctgcaataagctgagatcccgccactgtacgcaagcctaaacaacctgaatgagaccccgtctcaaaaaaacaaaacaaaacaaataccctccctgagcttcagttcccctaatggtaaaatagagaaaataatacctaaaaaa

SEQ ID NO: 317608 - DNA, 983 bp, Homo sapiens
  misc_feature (815)..(815): n is a, c, g, or t
accaatcagcgcgctggctggagcgcgggtctgcccctctggacgcacatgcgcgctgtcctggctggggagatggacggccgccgtgttttgggccggttctggagtggctggcggcggggcctgggtgtccgcccagtgcccgaggacgcaggctttggcaccgaagcccggcatcagaggcaaccccgcggctcctgccaacggtcggggcccctcggggaccagcccttcgcggggctgctgccaaaaaacctcagtcgggaggagctggttgatgcgctgcgggcagccgtggtggaccggaaaggacctctagtgacgttgaacaagccacagggtctaccagtgacaggaaaaccaggagagctgacgttgttctcagtgctgccagagctgagccagtccctagggctcagggagcaggagcttcaggttgtccgagcatctgggaagtcctggatgaagccctcctcagacgcctccacctgaccccctcccaggctgcccagctgcccttgcacctccacctacatcggctccttctcccaggcaccagggccagggacacccctgttgagctcctggcaccactgcccccttatttctccaggaccctacagtgcctggggctccgcttacaatagtcctccctctgttcctgaccccctcacacacactggaaagtgagggtgggggctctgcagtcagacaaacctaagatcacatcctggacaggccacttgcttgctgtgtggcattgggcaagtaactttacctctctggacttgtgataataaaagttcctacctcancaaaaaaaaaaagggggggtcaaaaatctgagggccaattagggtaccgtttgtaaagggctaaaggagggtaaagaaggaggggggttaaagtggagggaaaggttggttggggacctcgggggaatggcacgataagggaaaaaggtggaagttgggaggtgatag

SEQ ID NO: 317609 - DNA, 1330 bp, Homo sapiens
accaatcagcgcgctggctggagcgcgggtctgcccctctggacgcacatgcgcgctgtcctggctggggagatggacggccgccgtgttttgggccggttctggagtggctggcggcggggcctgggtgtccgcccagtgcccgaggacgcaggctttggcaccgaagcccggtgattaagtaccccctctctcatgcgggacggaggctagggcagggggaaggcacgtgcgggatctggatcaggtagatgttacccgaaaacagccccgttggcctctctgagcctcggtgccctccgctgtagaatgggaccggtcgtacctgaattttcgaggacctctagtgacgttgaacaagccacagggtctaccagtgacaggtatgggccggggatgtgggaagggaatgcagcggaagggggtttcgtgactgagggagggaaaagtgaaggcatgaagctttggcctcttgtaatttttctttcttactttccaggaaaaccaggagagctgacgttgttctcagtgctgccagagctgagccagtccctagggctcagggagcaggagcttcaggttgtccgagcatctgggaagtaagtggtaggggtgacaggaagctaggagtacaggcatccatctgtggtggggaaacagctgcttggggataagctgagacattttccatgggaaggtttgagatcatagaggtggatacaagtactgtgaagaagaggaagccgatggctctgggttcaaatcctcaagtacaaatggtgtgataccaggcaaagcatgacacctccctgacgctgggcacagtgactcacacctgtaatcccaacacttctggaggccaaggcaagaggatcacttgagcccaggagttcgagaccagcctgggcaaaatagaccccatctctggaaaaacaacaacaaaactttccgcgtggtggctcatgcctataatcaataggactttgggaggccgaggtgggaggattgcttgagtccagaagttcaagaccagcctgggcaacatggcaaaaccctatctttacttaaaaaacaaaataaaacacacacacacacacacacaaaaacctagctgggcagagcagcacatgcctgtagtgctcgggtggctgagatgggagaatcacctgagctcagaagatggcagctgcaataagctgagatcccgccactgtacgcaagcctaaacaacctgaatgagaccccgtctcaaaaaaacaaaacaaaacaaataccctccctgagcttcagttcccctaatggtaaaatagagaaaataatacctaaaaaa

SEQ ID NO: 317610 - DNA, 1081 bp, Homo sapiens
accaatcagcgcgctggctggagcgcgggtctgcccctctggacgcacatgcgcgctgtcctggctggggagatggacggccgccgtgttttgggccggttctggagtggctggcggcggggcctgggtgtccgcccagtgcccgaggacgcaggctttggcaccgaagcccggtgattaagtaccccctctctcatgcgggacggaggctagggcagggggaaggcacgtgcgggatctggatcaggtagatgttacccgaaaacagccccgttggcctctctgagcctcggtgccctccgctgtagaatgggaccggtcgtacctgaattttcgaggcatcagaggcaaccccgcggctcctgccaacggtcggggcccctcggggaccagcccttcgcggggctgctgccaaaaaacctcagtcgggaggagctggttgatgcgctgcgggcagccgtggtggaccggaaaggacctctagtgacgttgaacaagccacagggtctaccagtgacaggaaaaccaggagagctgacgttgttctcagtgctgccagagctgagccagtccctagggctcagggagcaggagcttcaggttgtccgagcatctgggaaagaaagctctgggcttgtactcctctccagctgtccccagacagctagtcgcctccagaagtacttcacccatgcacggagagcccaaaggcccacagccacctactgtgctgtcactgatgggatcccagctgcttctgaggggaagatccaggctgccctgaaactggaacacattgatggggtcaatctcacagttcagtgaagccatccgaaggactctggaggtgccagagactctcagcacttcggtggtagcaaaagcgggtggcctggtcaagtgagcacgcagggcccagcactagggccatgcccaaggcgccgggtggcccagttgccgggcgccggcccggttggccgaaaagccaaaggggaaccaggaagacccccggcggggccaaaggtcgagggggcggggccacacaggggaccgcccaggggcaccgcgggctaagaacccc

SEQ ID NO: 317611 - DNA, 342 bp, Homo sapiens
cctctccgtgatgtgacatttgagccaagatgatagggagccagacctgggaaatttggggacaggaaacagcaagtgccgaggctctgaggtggcagaggaacagaaagaagttgaatttggtgtggggtagttaactcatgtctgagagtcatgatggggacatgtgctaagatgcgtgagaaagtgctctggaaactctttagtgctgcataaagggttaccgttgcttttgctgatgttcgtgtgatgtatgtttcaggacctctagtgacgttgaacaagccacagggtctaccagtgacaggtatgggccggggatgtgggaagggaatgcagcgg

SEQ ID NO: 317612 - DNA, 454 bp, Homo sapiens
agaaagctctgggcttgtactcctctccagctgtccccagacagctagtcgcctccagaagtacttcacccatgcacggagagcccaaaggcccacagccacctactggtgagaggtgctgggaggttcctagagtggtggggaggtcccagcaagccaccctgtgacctcctcctgcccctttctcagtgctgtcactgatgggatcccagctgcttctgaggggaagatccaggctgccctgaaactggaacacattgatggggtcaatctcgtgagtccgggtctgggaagaggaggggtgcttctagatatagtacccctacagagaggagtcaggggtatggatttgggatggctggctctcctgtcccctaaaacaggcaagtgaccactgcctatactgtggccctgcccggagtctattgggagcagggagggtctgggtatagct

SEQ ID NO: 317613 - DNA, 1055 bp, Homo sapiens
accaatcagcgcgctggctggagcgcgggtctgcccctctggacgcacatgcgcgctgtcctggctggggagatggacggccgccgtgttttgggccggttctggagtggctggcggcggggcctgggtgtccgcccagtgcccgaggacgcaggctttggcaccgaagcccggcatcagaggcaaccccgcggctcctgccaacggtcggggcccctcggggaccagcccttcgcggggctgctgccaaaaaacctcagtcgggaggagctggttgatgcgctgcgggcagccgtggtggaccggaaaggacctctagtgacgttgaacaagccacagggtctaccagtgacaggaaaaccaggagagctgacgttgttctcagtgctgccagagctgagccagtccctagggctcagggagcaggagcttcaggttgtccgagcatctgggaagtaagtggtaggggtgacaggaagctaggagtacaggcatccatctgtggtggggaaacagctgcttggggataagctgagacattttccatgggaaggtttgagatcatagaggtggatacaagtactgtgaagaagaggaagccgatggctctgggttcaaatcctcaagtacaaatggtgtgataccaggcaaagcatgacacctccctgacgctgggcacagtgactcacacctgtaatcccaacacttctggaggccaaggcaaggaggattgcttgagtccagaagttcaagaccagcctgggcaacatggcaaaaccctatctttacttaaaaaacaaaataaaacacacacacacacacacacaaaaacctagctgggcagagcagcacatgcctgtagtgctcgggtggctgagatgggagaatcacctgagctcagaagatggcagctgcaataagctgagatcccgccactgtacgcaagcctaaacaacctgaatgagaccccgtctcaaaaaaacaaaacaaaacaaataccctccctgagcttcagttcccctaatggtaaaatagagaaaataatacctaaaaaa

SEQ ID NO: 317614 - DNA, 1440 bp, Homo sapiens
  misc_feature (1272)..(1272): n is a, c, g, or t
accaatcagcgcgctggctggagcgcgggtctgcccctctggacgcacatgcgcgctgtcctggctggggagatggacggccgccgtgttttgggccggttctggagtggctggcggcggggcctgggtgtccgcccagtgcccgaggacgcaggctttggcaccgaagcccggcatcagaggcaaccccgcggctcctgccaacggtcggggcccctcggggaccagcccttcgcggggctgctgccaaaaaacctcagtcgggaggagctggttgatgcgctgcgggcagccgtggtggaccggaaaggacctctagtgacgttgaacaagccacagggtctaccagtgacaggaaaaccaggagagctgacgttgttctcagtgctgccagagctgagccagtccctagggctcagggagcaggagcttcaggttgtccgagcatctgggaaagaaagctctgggcttgtactcctctccagctgtccccagacagctagtcgcctccagaagtacttcacccatgcacggagagcccaaaggcccacagccacctactgtgctgtcactgatgggatcccagctgcttctgaggggaagatccaggctgccctgaaactggaacacattgatggggtcaatctcacagttccagtgaaggccccatcccgaaaggacatcctggaaggtgtcaagaagactctcagtcactttcgtgtggtagccacaggctctggctgtgccctggtccagctgcagccactgacagtgttctccagtcaactacaggtgcacatggtactacagctctgccctgtgcttggggaccacatgtactctgcccgtgtgggcactgtcctgggccagcgatttctgctgccagctgagaacaacaagccccaaagacaggtcctggatgaagccctcctcagacgcctccacctgaccccctcccaggctgcccagctgcccttgcacctccacctacatcggctccttctcccaggcaccagggccagggacacccctgttgagctcctggcaccactgcccccttatttctccaggaccctacagtgcctggggctccgcttacaatagtcctccctctgttcctgaccccctcacacacactggaaagtgagggtgggggctctgcagtcagacaaacctaagatcacatcctggacaggccacttgcttgctgtgtggcattgggcaagtaactttacctctctggacttgtgataataaaagttcctacctcancaaaaaaaaaaagggggggtcaaaaatctgagggccaattagggtaccgtttgtaaagggctaaaggagggtaaagaaggaggggggttaaagtggagggaaaggttggttggggacctcgggggaatggcacgataagggaaaaaggtggaagttgggaggtgatag

SEQ ID NO: 317615 - DNA, 1980 bp, Homo sapiens
accaatcagcgcgctggctggagcgcgggtctgcccctctggacgcacatgcgcgctgtcctggctggggagatggacggccgccgtgttttgggccggttctggagtggctggcggcggggcctgggtgtccgcccagtgcccgaggacgcaggctttggcaccgaagcccggcatcagaggcaaccccgcggctcctgccaacggtcggggcccctcggggaccagcccttcgcggggctgctgccaaaaaacctcagtcgggaggagctggttgatgcgctgcgggcagccgtggtggaccggaaaggacctctagtgacgttgaacaagccacagggtctaccagtgacaggaaaaccaggagagctgacgttgttctcagtgctgccagagctgagccagtccctagggctcagggagcaggagcttcaggttgtccgagcatctgggaaagaaagctctgggcttgtactcctctccagctgtccccagacagctagtcgcctccagaagtacttcacccatgcacggagagcccaaaggcccacagccacctactgtgctgtcactgatgggatcccagctgcttctgaggggaagatccaggctgccctgaaactggaacacattgatggggtcaatctcacagttccagtgaaggccccatcccgaaaggacatcctggaaggtgtcaagaagactctcagtcactttcgtgtggtagccacaggctctggctgtgccctggtccagctgcagccactgacaggtaggtctggcaccctagccagcctttaaaactgcacttgatttgggaggctgaggcaggtggatcacgaggtcaggagttcaagaccagtctggccaagatggtgaaaccctgtttcaactaaaaactacaaaaattagctgggcacggtggcaggcgcctgtaaaaccagctactcgggaggctgaggcaggagaatcgcttgaacctgggaggcagaagttgcaatgagccaagatcataccattgcactccagcctgggagacagagtgaaacgctggctaaaaaaaaaaaaaactgcacttggcttagggaggcaaggagctggggagacagtggtatcagcagcagcctggggagcatttgatggcccccagaggtgtatgtgaccaggcccagctagaggaggcagcttcaggctagcaccccaacaggaaagaacagtccttaggcccggtggcttcagcaattaaatcagggttgcatctcatcatgagtggatcccacagccaggcagattgatagctgtgatcgtcctgacgtgttatgtgtccctctctggatgcaggggccatagtactgacctcactgaaacatatgatctgagaaagggggtggtgtttccccaaaggaaaaggggaggagtgatactgggtggcacagaacgagtagctgcccactgtctctcctggctttcctgttgcccagtgttctccagtcaactacaggtgcacatggtactacagctctgccctgtgcttggggaccacatgtactctgcccgtgtgggcactgtcctgggccagcgatttctgctgccagctgagaacaacaagccccaaagacaggtcctggatgaagccctcctcagacgcctccacctgaccccctcccaggctgcccagctgcccttgcacctccacctacatcggctccttctcccaggcaccagggccagggacacccctgttgagctcctggcaccactgcccccttatttctccaggaccctacagtgcctggggctccgcttacaatagtcctccctctgttcctgaccccctcacacacactggaaagtgagggtgggggctctgcagtcagacaaacctaagatcacatcctggacaggccacttgcttgctgtgtggcattgggcaagtaactttacctctctggacttgtgataataaaagttcctacctca

SEQ ID NO: 317616 - DNA, 1217 bp, Homo sapiens
accaatcagcgcgctggctggagcgcgggtctgcccctctggacgcacatgcgcgctgtcctggctggggagatggacggccgccgtgttttgggccggttctggagtggctggcggcggggcctgggtgtccgcccagtgcccgaggacgcaggctttggcaccgaagcccggcatcagaggcaaccccgcggctcctgccaacggtcggggcccctcggggaccagcccttcgcggggctgctgccaaaaaacctcagtcgggaggagctggttgatgcgctgcgggcagccgtggtggaccggaaaggacctctagtgacgttgaacaagccacagggtctaccagtgacagtagggctcagggagcaggagcttcaggttgtccgagcatctgggaaagaaagctctgggcttgtactcctctccagctgtccccagacagctagtcgcctccagaagtacttcacccatgcacggagagcccaaaggcccacagccacctactgtgctgtcactgatgggatcccagctgcttctgaggggaagatccaggctgccctgaaactggaacacattgatggggtcaatctcacagttccagtgaaggccccatcccgaaaggacatcctggaaggtgtcaagaagactctcagtcactttcgtgtggtagccacaggctctggctgtgccctggtccagctgcagccactgacagtgttctccagtcaactacaggtgcacatggtactacagctctgccctgtgcttggggaccacatgtactctgcccgtgtgggcactgtcctgggccagcgatttctgctgccagctgagaacaacaagccccaaagacaggtcctggatgaagccctcctcagacgcctccacctgaccccctcccaggctgcccagctgcccttgcacctccacctacatcggctccttctcccaggcaccagggccagggacacccctgttgagctcctggcaccactgcccccttatttctccaggaccctacagtgcctggggctccgcttacaatagtcctccctctgttcctgaccccctcacacacactggaaagtgagggtgggggctctgcagtcagacaaacctaagatcacatcctggacaggccacttgcttgctgtgtggcattgggcaagtaactttacctctctggacttgtgataataaaagttcctacctca

SEQ ID NO: 317617 - DNA, 1186 bp, Homo sapiens
accaatcagcgcgctggctggagcgcgggtctgcccctctggacgcacatgcgcgctgtcctggctggggagatggacggccgccgtgttttgggccggttctggagtggctggcggcggggcctgggtgtccgcccagtgcccgaggacgcaggctttggcaccgaagcccggcatcagaggcaaccccgcggctcctgccaacggtcggggcccctcggggaccagcccttcgcggggctgctgccaaaaaacctcagtcgggaggagctggttgatgcgctgcgggcagccgtggtggaccggaaaggacctctagtgacgttgaacaagccacagggtctaccagtgacaggaaaaccaggagagctgacgttgttctcagtgctgccagagctgagccagtccctagggctcagggagcaggagcttcaggttgtccgagcatctgggaagtaagtggtaggggtgacaggaagctaggagtacaggcatccatctgtggtggggaaacagctgcttggggataagctgagacattttccatgggaaggtttgagatcatagaggtggatacaagtactgtgaagaagaggaagccgatggctctgggttcaaatcctcaagtacaaatggtgtgataccaggcaaagcatgacacctccctgacgctgggcacagtgactcacacctgtaatcccaacacttctggaggccaaggcaagaggatcacttgagcccaggagttcgagaccagcctgggcaaaatagaccccatctctggaaaaacaacaacaaaactttccgcgtggtggctcatgcctataatcaataggactttgggaggccgaggtgggaggattgcttgagtccagaagttcaagaccagcctgggcaacatggcaaaaccctatctttacttaaaaaacaaaataaaacacacacacacacacacacaaaaacctagctgggcagagcagcacatgcctgtagtgctcgggtggctgagatgggagaatcacctgagctcagaagatggcagctgcaataagctgagatcccgccactgtacgcaagcctaaacaacctgaatgagaccccgtctcaaaaaaacaaaacaaaacaaataccctccctgagcttcagttcccctaatggtaaaatagagaaaataatacctaaaaaa

SEQ ID NO: 317618 - DNA, 994 bp, Homo sapiens
accaatcagcgcgctggctggagcgcgggtctgcccctctggacgcacatgcgcgctgtcctggctggggagatggacggccgccgtgttttgggccggttctggagtggctggcggcggggcctgggtgtccgcccagtgcccgaggacgcaggctttggcaccgaagcccggcatcagaggcaaccccgcggctcctgccaacggtcggggcccctcggggaccagcccttcgcggggctgctgccaaaaaacctcagtcgggaggagctggttgatgcgctgcgggcagccgtggtggaccggaaaggacctctagtgacgttgaacaagccacagggtctaccagtgacaggaaaaccaggagagctgacgttgttctcagtgctgccagagctgagccagtccctagggctcagggagcaggagcttcaggttgtccgagcatctgggaagcaaagcatgacacctccctgacgctgggcacagtgactcacacctgtaatcccaacacttctggaggccaaggcaagaggatcacttgagcccaggagttcgagaccagcctgggcaaaatagaccccatctctggaaaaacaacaacaaaactttccgcgtggtggctcatgcctataatcaataggactttgggaggccgaggtgggaggattgcttgagtccagaagttcaagaccagcctgggcaacatggcaaaaccctatctttacttaaaaaacaaaataaaacacacacacacacacacacaaaaacctagctgggcagagcagcacatgcctgtagtgctcgggtggctgagatgggagaatcacctgagctcagaagatggcagctgcaataagctgagatcccgccactgtacgcaagcctaaacaacctgaatgagaccccgtctcaaaaaaacaaaacaaaacaaataccctccctgagcttcagttcccctaatggtaaaatagagaaaataatacctaaaaaa

SEQ ID NO: 317619 - DNA, 604 bp, Homo sapiens
accaatcagcgcgctggctggagcgcgggtctgcccctctggacgcacatgcgcgctgtcctggctggggagatggacggccgccgtgttttgggccggttctggagtggctggcggcggggcctgggtgtccgcccagtgcccgaggacgcaggctttggcaccgaagcccggcatcagaggcaaccccgcggctcctgccaacggtcggggcccctcggggaccagcccttcgcggggctgctgccaaaaaacctcagtcgggaggagctggttgatgcgctgcgggcagccgtggtggaccggaaaggacctctagtgacgttgaacaagccacagggtctaccagtgacaggaaaaccaggagagctgacgttgttctcagtgctgccagagctgagccagtccctagggctcagggagcaggagcttcaggttgtccgagcatctgggaaatggagttatcgcttgttctgtcacccaggctgaagtgcagtggcgcaatttcagctcactacaacctccacctcccacgttcaagcaattctcacacctcagcctcccgagtagctgggattacaggcgcccgccaccatgcctggct

SEQ ID NO: 317620 - DNA, 3105 bp, Homo sapiens
caacagttttggtacccattgagtggaaagtttgctcaactttaatttttcagtcagaatagtgtaagctaagccaatttagatatctatggtgttgactattgtttgtgctgttaattcttgttcttcttcaattaaggcatggacataatttttttcaatttttttttcaaacgatgtggaaggcttgctgctatgtgcttcatcttcagcatcatctcatcccttcttaaaatgagttatctgtttgcaaactgctgatttcttttggagaatcatccccataaacttctcataaagcatcaatgattttaccattcttccacccaagcttcacactaaatttgatgtttggttttgcttcaattttagtagaatttatgttgctctgacaggtgctcttttcaaacttacgtcttacctttttagtgcctcaaactacatcctgttcaggcatgttataacaagttagtatgagcttattttggtataaaaaatttggactccataattttttcataatatgcatttttcattaccttttggaagacaactcatatcaccttgagcttcttttcatatgcctattttccatatgtatatcttctttggtgaggtgtccttttcagatgtttgtacatttaaaaatcagttattacccactcccaccacttctattcaacatagtactggaagtactatcaagagagagcaattagacaagaaaaagaaattaaagatatctaaattggaaaggaagaagtaaaatgatctctctttgcacatcatatgatcctatgtgtagaaaactccaaagactccaccaaaaaaacctattagatctaataaatgaattcagtaaagttgcaggatataaaattaatatacaaaaatccatggccattttattcacaaataacaacctagctgagaaatcaagaaaacaatcccatttatgataacataaaacacttaagaatacatttgaccaagaagatgaaagtgcatcagtatagcctgcacactgaaaaccacaaaacattgatgaaatacattgaagaggacacaaataaataaaacgatattccatgctcatagattggaagaattaatgttgttaaagtgtccatactacccaaagcaatatatagattcaatgcaatccctatcaaaatctcatcagcattcttcacagaaatagaaaaaaatcatacaatttctgtggatccacaaaagatcccaaataaccaaagcaattctgagaaaaaaaaatcctggaggcatcatacttcccaatttaaatttatattacaaaacgagagtaatcaaaacaatacagtattggcataagagatacacaggacagtgaaatagccagaaataaatccaaacatgtatggttaatgaatttttgacaagagcaccaaaaagacaaaatgagaaaagggtagtctcttcaataaataggtgctggaatttccacatgcaaaagaatgaaattagactcttacattacaccatacacaaaaatcaatccaaaatggataaaagatctgaatgtaagacctgaagccataaatctagaagaaaacataagggaaaagctccttgacactggctttggcaatgtttccttggatatcacaccaaaacctcaggctacaaaagcaacaataaataaatgaaattatatcaatctaaaaaacttctacacagaacgaaaacaatcaacaaaatgaaaaggcaatgtacagataaggagaaaatatttgcaaaccatatatcaggcaaggttttaatattcaggatttaggaagaactcatacaactcaatagcaagacaacatataacctgattaaaaaaaagtggggaaaggacttgaatagacatttcttcaaagatgacagaaaatgaccaacaggtatatgaaatggtgctcaatatcaccagtcatcaggaaaatgcaaatcaaaactactttgagataccacctcatacatgttaggatagctattatcaaaaagacaagagctaacaagtgttggtgagggtgtggagaagagggagcacttgtacactgttagtgggaatgtattatatattggtgcagccattatggaagacagtatggaggttcctaagtaaattaaaaatagaactaccatatgacccagcaatccctcttctgggtatatccccaaagggaatgagattatctctgcactcccaagtttattgcagcacaattcacaatagtcaagatacagacacaacctaggtgttcatcaatgggcaaatggataaagaaactgtgatatagagagatcaatagatagataattagaatattatttagcctttaaaaagaaggcagtcctgtcatttgccaaaacatggatagacctagaagacattatgctaaatgaaataagccagacacagaaagaaaaatattgcgtgatctcacttatatgtggaatcaagaaaaaaaaggttaaatatatagagatagagaataaaacagtaattactaaggtcaggataaggtggaggaaatgagatgtaggtcaaaggatgcaaagtagtaaatatgcaggatgaacaagtgaaaagatcaaagatcaaatgtacaacatgaggactatagttaatacatattgtatattgtgttcaggactttttgctaaatgagtagattatacctgctcttgccaatgggggaataatcagtaactatgtgagatgatgggtatgttcattgttccactatagttttactatatatatatatatgtttcatttaacattgtgttgtataccttaatatagacaataaaatttatttaaaacataaaaaaaatcaggtttattttcttattgttgagtttaaagagttctttgtatattttggataaaagttctctatcagaatgtcctttgctaatattttatctcagtctgtggcttatcttctcattctttttacattgtcacagggtagaaatttttaattttaatgaagttcagttaatctattctttcttccattggttgtacttttggtattgcttctaaaaagtcattgctaaaccctaggtcaacca

SEQ ID NO: 317621 - DNA, 2854 bp, Homo sapiens
caacagttttggtacccattgagtggaaagtttgctcaactttaatttttcagtcagaatagtgtaagctaagccaatttagatatctatggtgttgactattgtttgtgctgttaattcttgttcttcttcaattaaggcatggacataatttttttcaatttttttttcaaacgatgtggaaggcttgctgctatgtgcttcatcttcagcatcatctcatcccttcttaaaatgagttatctgtttgcaaactgctgatttcttttggagaatcatccccataaacttctcataaagcatcaatgattttaccattcttccacccaagcttcacactaaatttgatgtttggttttgcttcaattttagtagaatttatgttgctctgacaggtgctcttttcaaacttacgtcttacctttttagtgcctcaaactacatcctgttcaggcatgttataacaagttagtatgagcttattttggtataaaaaatttggactccataattttttcataatatgcatttttcattaccttttggaagacaactcatatcaccttgagcttcttttcatatgcctattttccatatgtatatcttctttggtgaggtgtccttttcagatgtttgtacatttaaaaatcagttattacccactcccaccacttctattcaacatagtactggaagtactatcaagagagagcaattagacaagaaaaagaaattaaagatatctaaattggaaaggaagaagtaaaatgatctctctttgcacatcatatgatcctatgtgtagaaaactccaaagactccaccaaaaaaacctattagatctaataaatgaattcagtaaagttgcaggatataaaattaatatacaaaaatccatggccattttattcacaaataacaacctagctgagaaatcaagaaaacaatcccatttatgataacataaaacacttaagaatacatttgaccaagaagatgaaagtgcatcagtatagcctgcacactgaaaaccacaaaacattgatgaaatacattgaagaggacacaaataaataaaacgatattccatgctcatagattggaagaattaatgttgttaaagtgtccatactacccaaagcaatatatagattcaatgcaatccctatcaaaatctcatcagcattcttcacagaaatagaaaaaaatcatacaatttctgtggatccacaaaagatcccaaataaccaaagcaattctgagaaaaaaaaatcctggaggcatcatacttcccaatttaaatttatattacaaaacgagagtaatcaaaacaatacagtattggcataagagatacacaggacagtgaaatagccagaaataaatccaaacatgtatggttaatgaatttttgacaagagcaccaaaaagacaaaatgagaaaagggtagtctcttcaataaataggtgctggaatttccacatgcaaaagaatgaaattagactcttacattacaccatacacaaaaatcaatccaaaatggataaaagatctgaatgtaagacctgaagccataaatctagaagaaaacataagggaaaagctccttgacactggctttggcaatgtttccttggatatcacaccaaaacctcaggctacaaaagcaacaataaataaatgaaattatatcaatctaaaaaacttctacacagaacgaaaacaatcaacaaaatgaaaaggcaatgtacagataaggagaaaatatttgcaaaccatatatcaggcaaggttttaatattcaggatttaggaagaactcatacaactcaatagcaagacaacatataacctgattaaaaaaaagtggggaaaggacttgaatagacatttcttcaaagatgacagaaaatgaccaacaggtatatgaaatggtgctcaatatcaccagtcatcaggaaaatgcaaatcaaaactactttgagataccacctcatacatgttaggatagctattatcaaaaagacaagagctaacaagtgttggtgagggtgtggagaagagggagcacttgtacactgttagtgggaatgtattatatattggtgcagccattatggaagacagtatggaggttcctaagtaaattaaaaatagaactaccatatgacccagcaatccctcttctgggtatatccccaaagggaatgagattatctctgcactcccaagtttattgcagcacaattcacaatagtcaagatacagacacaacctaggtgttcatcaatgggcaaatggataaagaaactgtgatatagagagatcaatagatagataattagaatattatttagcctttaaaaagaaggcagtcctgtcatttgccaaaacatggatagacctagaagacattatgctaaatgaaataagccagacacagaaagaaaaatattgcgtgatctcacttatatgtggaatcaagaaaaaaaaggttaaatatatagagatagagaataaaacagtaattactaaggtcaggataaggtggaggaaatgagatgtaggtcaaaggatgcaaagtagtaaatatgcaggatgaacaagtgaaaagatcaaagatcaaatgtacaacatgaggactatagttaatacatattgtatattgtgttcaggactttttgctaaatgagtagattatacctgctcttgccaatgggggaataatcagtaactatgtgagatgatgggtatgttcattgttccactatagttttactatatatatatatatgtttcatttaacattgtgttgtataccttaatatagacaataaaatttatttaaaacata

SEQ ID NO: 317622 - DNA, 1548 bp, Homo sapiens
ctctcagggatcccgcccgtagagatgatgaaaacataagggaaaagctccttgacactggctttggcaatgtttccttggatatcacaccaaaacctcaggctacaaaagcaacaataaataaatgaaattatatcaatctaaaaaacttctacacagaacgaaaacaatcaacaaaatgaaaaggcaatgtacagataaggagaaaatatttgcaaaccatatatcaggcaaggttttaatattcaggatttaggaagaactcatacaactcaatagcaagacaacatataacctgattaaaaaaaagtggggaaaggacttgaatagacatttcttcaaagatgacagaaaatgaccaacaggtatatgaaatggtgctcaatatcaccagtcatcaggaaaatgcaaatcaaaactactttgagataccacctcatacatgttaggatagctattatcaaaaagacaagagctaacaagtgttggtgagggtgtggagaagagggagcacttgtacactgttagtgggaatgtattatatattggtgcagccattatggaagacagtatggaggttcctaagtaaattaaaaatagaactaccatatgacccagcaatccctcttctgggtatatccccaaagggaatgagattatctctgcactcccaagtttattgcagcacaattcacaatagtcaagatacagacacaacctaggtgttcatcaatgggcaaatggataaagaaactgtgatatagagagatcaatagatagataattagaatattatttagcctttaaaaagaaggcagtcctgtcatttgccaaaacatggatagacctagaagacattatgctaaatgaaataagccagacacagaaagaaaaatattgcgtgatctcacttatatgtggaatcaagaaaaaaaaggttaaatatatagagatagagaataaaacagtaattactaaggtcaggataaggtggaggaaatgagatgtaggtcaaaggatgcaaagtagtaaatatgcaggatgaacaagtgaaaagatcaaagatcaaatgtacaacatgaggactatagttaatacatattgtatattgtgttcaggactttttgctaaatgagtagattatacctgctcttgccaatgggggaataatcagtaactatgtgagatgatgggtatgttcattgttccactatagttttactatatatatatatatgtttcatttaacattgtgttgtataccttaatatagacaataaaatttatttaaaacataaaaaaaatcaggtttattttcttattgttgagtttaaagagttctttgtatattttggataaaagttctctatcagaatgtcctttgctaatattttatctcagtctgtggcttatcttctcattctttttacattgtcacagggtagaaatttttaattttaatgaagttcagttaatctattctttcttccattggttgtacttttggtattgcttctaaaaagtcattgctaaaccctaggtcaacca

SEQ ID NO: 317623 - DNA, 317 bp, Homo sapiens
aaacaagtctcgttctgtcacccacgctggagttcagtggcgggattttggttcattgcagcctttgcctcgcaggagaattgcttgaacccaggaggtggaggttgcagtgagccaagatcgcaccaccgcatgagagagagagattactatttcttgtccctttttctcagtttgattatatttatatacatatgtcagtaaatctgttttcagtattgatgtttaataaagaatgtacaatggccagagttctactctttcctctggagcattaaaatatattgccattcctattaaaacgtatttgaatgtga

SEQ ID NO: 317624 - DNA, 3266 bp, Homo sapiens
atggcctcctttcatttttggggggggggctccctgtttgatgtggctctggggcccagcagccccaggtggcagagcagcctccactgggtcggaaatacccagggttaccccagatgacacaccgtcttcagcaaagagaaagggttgggagaaaggtggcggtgctttcggagggaataaaatggaaggagaatcaagcagatttgaaatccacactccagtttctgacaagaaaaagaaaaagtgttctatacataaggaaagacctcagaaacattcccacgaaattttcagagactcctccctggtgaatgaacagtctcaaataactaggaggaaaaagaggaaaaaagatttccagcatctcatttcttctcctttgaaaaaatccagaatctgtgatgagactgcaaatgccacttccacactcaaaaagagaaaaaagagaagatatagtgctttggaggtggacgaggaagcaggtgttacagttgtccttgtggataaagaaaatattaacaacacaccaaagcattttagaaaggatgttgatgttgtttgtgttgatatgagcatagaacagaagttaccaagaaagcctaaaacagacaaatttcaggtacttgctaagtcacatgcacataaatcagaagccctgcacagtaaagttagggagaaaaagaataaaaagcatcagaggaaagctgcatcctgggagagccagcgggcaagggacaccctgcctcagtcagaatcccaccaggaggagtcctggctttctgtgggtccagggggtgaaattacagaactaccagcatctgctcataaaaacaagtctaagaaaaaaaagaaaaagtccagtaaccgggaatatgagacactggccatgcctgaaggatcgcaagcaggcagagaggccgggactgatatgcaggaatcccagcctactgtgggcttggatgatgaaactccacaactactaggacctactcacaaaaaaaagtctaagaaaaaaaagaagaaaaagtccaatcaccaggaatttgaggcattggccatgcctgaaggatcacaagtgggcagtgaggttggggctgatatgcaggaatcccggcctgctgtgggcctgcatggtgaaactgcaggaataccagcacctgcttataaaaacaagtctaagaaaaaaaagaaaaagtccaatcaccaggaatttgaggcagtggccatgcctgagagcctcgagagtgcataccctgaaggatcacaggtgggcagtgaggttgggactgtggaaggcagtacagctcttaaagggttcaaggaatccaacagtacaaagaagaagtctaagaaaaggaagcttacgtctgtcaaaagggcacgagtgtctggtgatgatttttcagtgcccagtaagaactctgagagcacactctttgattcagtagaaggtgatggcgccatgatggaagaaggtgtgaaatctaggccccgacaaaagaaaacccaggcctgtttggcaagcaagcacgtgcaagaggcgccaaggttagaacctgcaaatgaagaacacaatgtggaaacagctgaagattccgaaataagatacttatctgcagattcaggagatgccgatgattcagatgcggatttgggttctgccgtgaaacagcttcaggagttcattcctaacatcaaggacagggccaccagcacaatcaagcggatgtaccgggacgacttggaacggtttaaggaatttaaagcacaaggtgtcgctattaaatttggcaagttttctgtaaaggaaaataagcagttagagaaaaatgtggaagactttctagccctgacaggcattgagagtgcagacaagctcctgtacacggacagatatcctgaggaaaaatctgtgatcaccaacttaaaaaggagatactcgtttagattacacattggtaggaacattgcccggccctggaaacttatatactatcgagcaaagaagatgttcgatgtcaacaattacaaaggcaggtatagcgaaggagatactgagaagttaaagatgtaccattctctccttgggaatgactggaagacgattggtgagatggtggcccgaagtagcctctccgtggccctcaagttctcacagatcagcagtcaaagaaatcgtggtgcttggagtaagtctgaaacccggaaactaatcaaggctgtcgaagaagtgattctgaagaagatgtctccccaggagttaaaagaggtggattccaaactccaagaaaatcctgaaagttgcctatcaattgttcgggaaaaactctacaagggcatatcttgggtagaagtagaagctaaagtgcaaaccagaaattggatgcagtgtaaaagtaagtggacagaaattctaaccaagaggatgactaatggtcggcgtatatactatggcatgaatgccctgcgggccaaggtcagccttattgaaaggttgtatgaaataaatgtggaagatactaatgaaatagactgggaagatcttgctagtgccataggtgatgttcctccatcttacgttcaaactaaattttctaggctgaaagctgtctatgttccattttggcagaaaaagacttttccagagatcatcgactacctttatgagacgactctacctttgctgaaggaaaagttagaaaaaatgatggagaaaaaaggcactaaaatccagactcctgcagcacccaagcaagttttcccatttcgagacatcttttattatgaagacgatagtgaaggagaggacatagaaaaagaaagcgaaggccaggcgccatgcatggctcacgcctgtaattccagtactttgggaggccaaggccggtggatcatctgaggtcaggagttcgagaccggcctgaccaacatggtgaagacctgtcactattaaaaatgcgaaaattagccgggtgtggtagtgcacacctgtaatttcaactacttgggaggctgaggcaggagaattgcttgaacccaggaggtggaggttgcagtgagccaagatcgcaccaccgcatgagagagagagattactatttcttgtccctttttctcagtttgattatatttatatacatatgtcagtaaatctgttttcagtattgatgtttaataaagaatgtacaatggccagagttctactctttcctctggagcattaaaatatattgccattcctattaaaacgtatttgaatgtga

SEQ ID NO: 317625 - DNA, 2285 bp, Homo sapiens
atggcctcctttcatttttggggggggggctccctgtttgatgtggctctggggcccagcagccccaggtggcagagcagcctccactgggtcggaaatacccagggttaccccagatgacacaccgtcttcagcaaagagaaagggttgggagaaaggtggcggtgctttcggagggaataaaatggaaggagaatcaagcagatttgaaatccacactccagtttctgacaagaaaaagaaaaagtgttctatacataaggaaagacctcagaaacattcccacgaaattttcagagactcctccctggtgaatgaacagtctcaaataactaggaggaaaaagaggaaaaaagatttccagcatctcatttcttctcctttgaaaaaatccagaatctgtgatgagactgcaaatgccacttccacactcaaaaagagaaaaaagagaagatatagtgctttggaggtggacgaggaagcaggtgttacagttgtccttgtggataaagaaaatattaacaacacaccaaagcattttagaaaggatgttgatgttgtttgtgttgatatgagcatagaacagaagttaccaagaaagcctaaaacagacaaatttcaggtacttgctaagtcacatgcacataaatcagaagccctgcacagtaaagttagggagaaaaagaataaaaagcatcagaggaaagctgcatcctgggagagccagcgggcaagggacaccctgcctcagtcagaatcccaccaggaggagtcctggctttctgtgggtccagggggtgaaattacagaactaccagcatctgctcataaaaacaagtctaagaaaaaaaagaaaaagtccagtaaccgggaatatgagacactggccatgcctgaaggatcgcaagcaggcagagaggccgggactgatatgcaggaatcccagcctactgtgggcttggatgatgaaactccacaactactaggacctactcacaaaaaaaagtctaagaaaaaaaagaagaaaaagtccaatcaccaggaatttgaggcattggccatgcctgaaggatcacaagtgggcagtgaggttggggctgatatgcaggaatcccggcctgctgtgggcctgcatggtgaaactgcaggaataccagcacctgcttataaaaacaagtctaagaaaaaaaagaaaaagtccaatcaccaggaatttgaggcagtggccatgcctgagagcctcgagagtgcataccctgaaggatcacaggtgggcagtgaggttgggactgtggaaggcagtacagctcttaaagggttcaaggaatccaacagtacaaagaagaagtctaagaaaaggaagcttacgtctgtcaaaagggcacgagtgtctggtgatgatttttcagtgcccagtaagaactctgagagcacactctttgattcagtagaaggtgatggcgccatgatggaagaaggtgtgaaatctaggccccgacaaaagaaaacccaggcctgtttggcaagcaagcacgtgcaagaggcgccaaggttagaacctgcaaatgaagaacacaatgtggaaacagctgaagattccgaaataagatacttatctgcagattcaggagatgccgatgattcagatgcggatttgggttctgccgtgaaacagcttcaggagttcattcctaacatcaaggacagggccaccagcacaatcaagcggatgtaccgggacgacttggaacggtttaaggaatttaaagcacaaggtgtcgctattaaatttggcaagttttctgtaaaggaaaataagcagttagagaaaaatgtggaagactttctagccctgacaggcattgagagtgcagacaagctcctgtacacggacagatatcctgaggaaaaatctgtgatcaccaacttaaaaaggagatactcgtttagattacacattggtaggaacattgcccggccctggaaacttatatactatcgagcaaagaagatgttcgatgtcaacaattacaaaggcaggtattagccgaaaggaagaattacttggagaacagtataacaagaattggtacccattctcctcccttgggggaaattgaactgggacaagaaccgaattgggtggcacaatggggtggccccgaagttaagcctctcccggggggcccctcaaaggttctccaccagattcaagccggtcacagaaacatcggggctgcgctgggaattaagatcttgaaacccgggaaacttattccaaggtg

SEQ ID NO: 317626 - DNA, 1415 bp, Homo sapiens
  misc_feature (13)..(13): n is a, c, g, or t
  misc_feature (28)..(28): n is a, c, g, or t
  misc_feature (41)..(41): n is a, c, g, or t
  misc_feature (53)..(53): n is a, c, g, or t
  misc_feature (67)..(67): n is a, c, g, or t
  misc_feature (103)..(103): n is a, c, g, or t
cagtgggggtttnatcgcctatgctacntgcttacctcacnaagtggctaaangattagcacctgtnatcaccaacttaaacaggagatactcgtttacattncacattggtaggaacattgcccggccctggaaacttatatactatcgagcaaagaagatgttcgatgtcaacaattacaaaggcaggtatagcgaaggagatactgagaagttaaagatgtaccattctctccttgggaatgactggaagacgattggtgagatggtggcccgaagtagcctctccgtggccctcaagttctcacagatcagcagtcaaagaaatcgtggtgcttggagtaagtctgaaacccggaaactaatcaaggctgtcgaagaagtgattctgaagaagatgtctccccaggagttaaaagaggtggattccaaactccaagaaaatcctgaaagttgcctatcaattgttcgggaaaaactctacaagggcatatcttgggtagaagtagaagctaaagtgcaaaccagaaattggatgcagtgtaaaagtaagtggacagaaattctaaccaagaggatgactaatggtcggcgtatatactatggcatgaatgccctgcgggccaaggtcagccttattgaaaggttgtatgaaataaatgtggaagatactaatgaaatagactgggaagatcttgctagtgccataggtgatgttcctccatcttacgttcaaactaaattttctaggctgaaagctgtctatgttccattttggcagaaaaagacttttccagagatcatcgactacctttatgagacgactctacctttgctgaaggaaaagttagaaaaaatgatggagaaaaaaggcactaaaatccagactcctgcagcacccaagcaagttttcccatttcgagacatcttttattatgaagacgatagtgaaggagaggacatagaaaaagaaagcgaaggccaggcgccatgcatggctcacgcctgtaattccagtactttgggaggccaaggccggtggatcatctgaggtcaggagttcgagaccggcctgaccaacatggtgaagacctgtcactattaaaaatgcgaaaattagccgggtgtggtagtgcacacctgtaatttcaactacttgggaggctgaggcaggagaattgcttgaacccaggaggtggaggttgcagtgagccaagatcgcaccaccgcatgagagagagagattactatttcttgtccctttttctcagtttgattatatttatatacatatgtcagtaaatctgttttcagtattgatgtttaataaagaatgtacaatggccagagttctactctttcctctggagcattaaaatatattgccattcctattaaaacgtatttgaatgtga

SEQ ID NO: 317627 - DNA, 2986 bp, Homo sapiens
atggcctcctttcatttttggggggggggctccctgtttgatgtggctctggggcccagcagccccaggtggcagagcagcctccactgggtcggaaatacccagggttaccccagatgacacaccgtcttcagcaaagagaaagggttgggagaaaggtggcggtgctttcggagggaataaaatggaaggagaatcaagcagatttgaaatccacactccagtttctgacaagaaaaagaaaaagtgttctatacataaggaaagacctcagaaacattcccacgaaattttcagagactcctccctggtgaatgaacagtctcaaataactaggaggaaaaagaggaaaaaagatttccagcatctcatttcttctcctttgaaaaaatccagaatctgtgatgagactgcaaatgccacttccacactcaaaaagagaaaaaagagaagatatagtgctttggaggtggacgaggaagcaggtgttacagttgtccttgtggataaagaaaatattaacaacacaccaaagcattttagaaaggatgttgatgttgtttgtgttgatatgagcatagaacagaagttaccaagaaagcctaaaacagacaaatttcaggtacttgctaagtcacatgcacataaatcagaagccctgcacagtaaagttagggagaaaaagaataaaaagcatcagaggaaagctgcatcctgggagagccagcgggcaagggacaccctgcctcagtcagaatcccaccaggaggagtcctggctttctgtgggtccagggggtgaaattacagaactaccagcatctgctcataaaaacaagtctaagaaaaaaaagaaaaagtccagtaaccgggaatatgagacactggccatgcctgaaggatcgcaagcaggcagagaggccgggactgatatgcaggaatcccagcctactgtgggcttggatgatgaaactccacaactactaggacctactcacaaaaaaaagtctaagaaaaaaaagaagaaaaagtccaatcaccaggaatttgaggcattggccatgcctgaaggatcacaagtgggcagtgaggttggggctgatatgcaggaatcccggcctgctgtgggcctgcatggtgaaactgcaggaataccagcacctgcttataaaaacaagtctaagaaaaaaaagaaaaagtccaatcaccaggaatttgaggcagtggccatgcctgagagcctcgagagtgcataccctgaaggatcacaggtgggcagtgaggttgggactgtggaaggcagtacagctcttaaagggttcaaggaatccaacagtacaaagaagaagtctaagaaaaggaagcttacgtctgtcaaaagggcacgagtgtctggtgatgatttttcagtgcccagtaagaactctgagagcacactctttgattcagtagaaggtgatggcgccatgatggaagaaggtgtgaaatctaggccccgacaaaagaaaacccaggcctgtttggcaagcaagcacgtgcaagaggcgccaaggttagaacctgcaaatgaagaacacaatgtggaaacagctgaagattccgaaataagatacttatctgcagattcaggagatgccgatgattcagatgcggatttgggttctgccgtgaaacagcttcaggagttcattcctaacatcaaggacagggccaccagcacaatcaagcggatgtaccgggacgacttggaacggtttaaggaatttaaagcacaaggtgtcgctattaaatttggcaagttttctgtaaaggaaaataagcagttagagaaaaatgtggaagactttctagccctgacaggcattgagagtgcagacaagctcctgtacacggacagatatcctgaggaaaaatctgtgatcaccaacttaaaaaggagatactcgtttagattacacattggtaggaacattgcccggccctggaaacttatatactatcgagcaaagaagatgttcgatgtcaacaattacaaaggcaggtatagcgaaggagatactgagaagttaaagatgtaccattctctccttgggaatgactggaagacgattggtgagatggtggcccgaagtagcctctccgtggccctcaagttctcacagatcagcagtcaaagaaatcgtggtgcttggagtaagtctgaaacccggaaactaatcaaggctgtcgaagaagtgattctgaagaagatgtctccccaggagttaaaagaggtggattccaaactccaagaaaatcctgaaagttgcctatcaattgttcgggaaaaactctacaagggcatatcttgggtagaagtagaagctaaagtgcaaaccagaaattggatgcagtgtaaaagtaagtggacagaaattctaaccaagaggatgactaatggtcggcgtatatactatggcatgaatgccctgcgggccaaggtcagccttattgaaaggttgtatgaaataaatgtggaagatactaatgaaatagactgggaagatcttgctagtgccataggtgatgttcctccatcttacgttcaaactaaattttctaggctgaaagctgtctatgttccattttggcagaaaaagacttttccagagatcatcgactacctttatgagacgactctacctttgctgaaggaaaagttagaaaaaatgatggagaaaaaaggcactaaaatccagactcctgcagcacccaagcaagttttcccatttcgagacatcttttattatgaagacgatagtgaaggagaggacatagaaaaagaaagcgaaggggaattccgtaaagcctagaatcaaaagaaaacaaaacccatagtcaagccacagacaagcccagaataatatggccaggggatcaatccgattagccgactggcccagatccagcaggcaaaaaaggagaaggagccagagtacacgctcctc

SEQ ID NO: 317628 - DNA, 3116 bp, Homo sapiens
atggcctcctttcatttttggggggggggctccctgtttgatgtggctctggggcccagcagccccaggtggcagagcagcctccactgggtcggaaatacccagggttaccccagatgacacaccgtcttcagcaaagagaaagggttgggagaaaggtggcggtgctttcggagggaataaaatggaaggagaatcaagcagatttgaaatccacactccagtttctgacaagaaaaagaaaaagtgttctatacataaggaaagacctcagaaacattcccacgaaattttcagagactcctccctggtgaatgaacagtctcaaataactaggaggaaaaagaggaaaaaagatttccagcatctcatttcttctcctttgaaaaaatccagaatctgtgatgagactgcaaatgccacttccacactcaaaaagagaaaaaagagaagatatagtgctttggaggtggacgaggaagcaggtgttacagttgtccttgtggataaagaaaatattaacaacacaccaaagcattttagaaaggatgttgatgttgtttgtgttgatatgagcatagaacagaagttaccaagaaagcctaaaacagacaaatttcaggtacttgctaagtcacatgcacataaatcagaagccctgcacagtaaagttagggagaaaaagaataaaaagcatcagaggaaagctgcatcctgggagagccagcgggcaagggacaccctgcctcagtcagaatcccaccaggaggagtcctggctttctgtgggtccagggggtgaaattacagaactaccagcatctgctcataaaaacaagtctaagaaaaaaaagaaaaagtccagtaaccgggaatatgagacactggccatgcctgaaggatcgcaagcaggcagagaggccgggactgatatgcaggaatcccagcctactgtgggcttggatgatgaaactccacaactactaggacctactcacaaaaaaaagtctaagaaaaaaaagaagaaaaagtccaatcaccaggaatttgaggcattggccatgcctgaaggatcacaagtgggcagtgaggttggggctgatatgcaggaatcccggcctgctgtgggcctgcatggtgaaactgcaggaataccagcacctgcttataaaaacaagtctaagaaaaaaaagaaaaagtccaatcaccaggaatttgaggcagtggccatgcctgagagcctcgagagtgcataccctgaaggatcacaggtgggcagtgaggttgggactgtggaaggcagtacagctcttaaagggttcaaggaatccaacagtacaaagaagaagtctaagaaaaggaagcttacgtctgtcaaaagggcacgagtgtctggtgatgatttttcagtgcccagtaagaactctgagagcacactctttgattcagtagaaggtgatggcgccatgatggaagaaggtgtgaaatctaggccccgacaaaagaaaacccaggcctgtttggcaagcaagcacgtgcaagaggcgccaaggttagaacctgcaaatgaagaacacaatgtggaaacagctgaagattccgaaataagatacttatctgcagattcaggagatgccgatgattcagatgcggatttgggttctgccgtgaaacagcttcaggagttcattcctaacatcaaggacagggccaccagcacaatcaagcggatgtaccgggacgacttggaacggtttaaggaatttaaagcacaaggtgtcgctattaaatttggcaagttttctgtaaaggaaaataagcagttagagaaaaatgtggaagactttctagccctgacaggcattgagagtgcagacaagctcctgtacacggacagatatcctgaggaaaaatctgtgatcaccaacttaaaaaggagatactcgtttagattacacattggtaggaacattgcccggccctggaaacttatatactatcgagcaaagaagatgttcgatgtcaacaattacaaaggcaggtatagcgaaggagatactgagaagttaaagatgtaccattctctccttgggaatgactggaagacgattggtgagatggtggcccgaagtagcctctccgtggccctcaagttctcacagatcagcagtcaaagaaatcgtggtgcttggagtaagtctgaaacccggaaactaatcaaggctgtcgaagaagtgattctgaagaagatgtctccccaggagttaaaagaggtggattccaaactccaagaaaatcctgaaagttgcctatcaattgttcgggaaaaactctacaagggcatatcttgggtagaagtagaagctaaagtgcaaaccagaaattggatgcagtgtaaaagtaagtggacagaaattctaaccaagaggatgactaatggtcggcgtatatactatggcatgaatgccctgcgggccaaggtcagccttattgaaaggttgtatgaaataaatgtggaagatactaatgaaatagactgggaagatcttgctagtgccataggtgatgttcctccatcttacgttcaaactaaattttctaggctgaaagctgtctatgttccattttggcagaaaaagacttttccagagatcatcgactacctttatgagacgactctacctttgctgaaggaaaagttagaaaaaatgatggagaaaaaaggcactaaaatccagactcctgcagcacccaagcaagttttcccatttcgagacatcttttattatgaagacgatagtgaaggagaggacatagaaaaagaaagcgaaggccaggcgccatgcatggctcacgcctgtaattccagtactttgggaggccaaggccggtggatcatctgaggtcaggagttcgagaccggcctgaccaacatggtgaagacctgtcactattaaaaatgcgaaaattagccgggtgtggtagtgcacacctgtaatttcaactacttgggaggctgaggcaggagaattgcttgaacccaggaggtggaggttgcagtgagccaagatcgcaccaccgcacttcagcctgggccacagagcgagactccatctc

SEQ ID NO: 317629 - DNA, 1741 bp, Homo sapiens
gagaaaggtggcggcgctttcggagggttagaacctgcaaatgaagaacacaatgtggaaacagctgaagattccgaaataagatacttatctgcagattcaggagatgccgatgattcagatgcggatttgggttctgccgtgaaacagcttcaggagttcattcctaacatcaaggacagggccaccagcacaatcaagcggatgtaccgggacgacttggaacggtttaaggaatttaaagcacaaggtgtcgctattaaatttggcaagttttctgtaaaggaaaataagcagttagagaaaaatgtggaagactttctagccctgacaggcattgagagtgcagacaagctcctgtacacggacagatatcctgaggaaaaatctgtgatcaccaacttaaaaaggagatactcgtttagattacacattggtaggaacattgcccggccctggaaacttatatactatcgagcaaagaagatgttcgatgtcaacaattacaaaggcaggtatagcgaaggagatactgagaagttaaagatgtaccattctctccttgggaatgactggaagacgattggtgagatggtggcccgaagtagcctctccgtggccctcaagttctcacagatcagcagtcaaagaaatcgtggtgcttggagtaagtctgaaacccggaaactaatcaaggctgtcgaagaagtgattctgaagaagatgtctccccaggagttaaaagaggtggattccaaactccaagaaaatcctgaaagttgcctatcaattgttcgggaaaaactctacaagggcatatcttgggtagaagtagaagctaaagtgcaaaccagaaattggatgcagtgtaaaagtaagtggacagaaattctaaccaagaggatgactaatggtcggcgtatatactatggcatgaatgccctgcgggccaaggtcagccttattgaaaggttgtatgaaataaatgtggaagatactaatgaaatagactgggaagatcttgctagtgccataggtgatgttcctccatcttacgttcaaactaaattttctaggctgaaagctgtctatgttccattttggcagaaaaagacttttccagagatcatcgactacctttatgagacgactctacctttgctgaaggaaaagttagaaaaaatgatggagaaaaaaggcactaaaatccagactcctgcagcacccaagcaagttttcccatttcgagacatcttttattatgaagacgatagtgaaggagaggacatagaaaaagaaagcgaaggccaggcgccatgcatggctcacgcctgtaattccagtactttgggaggccaaggccggtggatcatctgaggtcaggagttcgagaccggcctgaccaacatggtgaagacctgtcactattaaaaatgcgaaaattagccgggtgtggtagtgcacacctgtaatttcaactacttgggaggctgaggcaggagaattgcttgaacccaggaggtggaggttgcagtgagccaagatcgcaccaccgcatgagagagagagattactatttcttgtccctttttctcagtttgattatatttatatacatatgtcagtaaatctgttttcagtattgatgtttaataaagaatgtacaatggccagagttctactctttcctctggagcattaaaatatattgccattcctattaaaacgtatttgaatgtga

SEQ ID NO: 317630 - DNA, 307 bp, Homo sapiens
  misc_feature (59)..(59): n is a, c, g, or t
  misc_feature (62)..(62): n is a, c, g, or t
tgcccaccccttgtgtccccccctccgcaaccggacagaaaccggcttactaggaactnggnacaacagttttgaggaggaagaagaatgactgtaaaggaaggagcagtactgttttcatgaggacctactatgtgccagacattattctaggtgctggggctaccatggtgagcaagacagtccctgctgcttctaggagttcatattcgaatggaagaaaactatttaaaattgtacttattatctcaaattttttcaggtattgataaatactatgaagagtataaaatgacacaataaagag

SEQ ID NO: 317631 - DNA, 255 bp, Homo sapiens
atatattctggaaaagaagaggaggaggaagaagaatgactgtaaaggaaggagcagtactgttttcatgaggacctactatgtgccagacattattctaggtgctggggctaccatggtgagcaagacagtccctgctgcttctaggagttcatattcgaatggaagaaaactatttaaaattgtacttattatctcaaattttttcaggtattgataaatactatgaagagtataaaatgacacaataaagag

SEQ ID NO: 317632 - DNA, 1861 bp, Homo sapiens
gggaatatagttacttggcaaagtctttcaggaaggaagcccttccttatgttacatgtggaaagcctgccttccaagacatgtggaagtaattgatccacctgccagagaaacacaggctcagaggatgcctgggaacagggaggatgggattagtggaagcttaatggaaaaggaaagttatgatcctccaagacccttaattgatagaccataccaggttctgcaggtcagcatcattgtgtaatgagagtgaagtaggggaccctgtggttcaaccttagaatctgtttcctgtaggctctttctgctgtctatattcattaaagttttccacttcaccctcccatagtctagagggatgcccattccatggtcctccagagaatagttttgacttaacatgtctgtttagcccacatcacgtcagttatcaacaccgccactgtgcttactgttcctacagccacaccaggcttgaagagttagtgagaccaacaaataattggaagtattggaaaaagcaaaatacatggggacaaaaaaaatacagtgaaattctttttatcaaactgatgctgtgagaaaccagatgaatgccagtttggctttatttctaagaatctgggtcttcattctctggtgtagaaggaatgcaaaaaactataacaacaacaacaaaaacatattttgaaaagacatattctgacatctctgcttgtgtgtggtaaggcaggttcctatcagacatttatccctttggtcaagatcccttttgctcatccagggtttcatactcaatatcgcttaaaaaaaaaaaagtatcagctagggatgactctggaagtatgagtatcatggtggggaggaaggaattttttttaaatgtaaatgacccccatttaccagaccctaatcaaagtcacttaagggaatccctcagccttttatttggaaacagttgaaataaactggcagcagctagatcagagtatcttgctttattttataaaggccaaaggtagtatgaagtttggaccaaaaaggtaaatagatccattccagcacctgatactgatttttcaaggctctatgaaaggtcaaaaatttcattaaacaagaccagttctccctcttccccctgtcccaagaaatcttaggcatgaaaaggataaggaaacagctcctggaatgatacatttgcatagtgccctagtagcaggttgggaaaaagttataatataagaaacaaccttcgaaaacaggccttttatctcaaagataaaatgtctttcttgtggtctttcatcactatctccgtggtggaaggttcccctagttccaacatatttccattaaaatagtcaaagccacggcattgggatgtcagatgcctctctttctttgtggtaatcggaatttaaaattatacagttgcctctgaatttctcatgcacaaagccaaaccactgataagagataaagcagtctgaagcctgctgcttcagccagcacagcacaccacacacgctcgcacacacacagaaatttacagggtaagagagattaggaagataattttggtggtagagtcaagaagaggttgaagaggtgctaatattaaaagagagatttgaataaaatgtttttagaattcataggcattatgatattctattgtaaaatgctattggttaaaattatctttgtatgggcaaactgagtctctgtctccagctgtctgtgaacagctattcagttcactaaacctcagcacctcatctgtggaatgagcaccatagtagctcctgtcataaaggttaaatgattttgtaaaggggaactcgcgaacccggtccga

SEQ ID NO: 317633 - DNA, 4881 bp, Homo sapiens
gggaatatagttacttggcaaagtctttcaggaaggaagcccttccttatgttacatgtggaaagcctgccttccaagacatgtggaagtaattgatccacctgccagagaaacacaggctcagaggatgcctgggaacagggaggatgggattagtggaagcttaatggaaaaggaaagttatgatcctccaagacccttaattgatagaccataccaggttctgcaggtcagcatcattgtgtaatgagagtgaagtaggggaccctgtggttcaaccttagaatctgtttcctgtaggctctttctgctgtctatattcattaaagttttccacttcaccctcccatagtctagagggatgcccattccatggtcctccagagaatagttttgacttaacatgtctgtttagcccacatcacgtcagttatcaacaccgccactgtgcttactgttcctacagccacaccaggcttgaagagttagtgagaccaacaaataattggaagtattggaaaaagcaaaatacatggggacaaaaaaaatacagtgaaattctttttatcaaactgatgctgtgagaaaccagatgaatgccagtttggctttatttctaagaatctgggtcttcattctctggtgtagaaggaatgcaaaaaactataacaacaacaacaaaaacatattttgaaaagacatattctgacatctctgcttgtgtgtggtaaggcaggttcctatcagacatttatccctttggtcaagatcccttttgctcatccagggtttcatactcaatatcgcttaaaaaaaaaaaagtatcagctagggatgactctggaagtatgagtatcatggtggggaggaaggaattttttttaaatgtaaatgacccccatttaccagaccctaatcaaagtcacttaagggaatccctcagccttttatttggaaacagttgaaataaactggcagcagctagatcagagtatcttgctttattttataaaggccaaaggtagtatgaagtttggaccaaaaaggtaaatagatccattccagcacctgatactgatttttcaaggctctatgaaaggtcaaaaatttcattaaacaagaccagttctccctcttccccctgtcccaagaaatcttaggcatgaaaaggataaggaaacagctcctggaatgatacatttgcatagtgccctagtagcaggttgggaaaaagttataatataagaaacaaccttcgaaaacaggccttttatctcaaagataaaatgtctttcttgtggtctttcatcactatctccgtggtggaaggttcccctagttccaacatatttccattaaaatagtcaaagccacggcattgggatgtcagatgcctctctttctttgtggtaatcggaatttaaaattatacagttgcctctgaatttctcatgcacaaagccaaaccactgataagagataaagcagtctgaagcctgctgcttcagccagcacagcacaccacacacgctcgcactttcaaaagcaatgtgatttctatggttcttaaaagctttcttcataagggagtccctgaaatttctcaaggcaggtttgaatggcaaagggaaaataattacttgtgggaggtcctccttttgagtattgttagagcatacatgtaaaagaaaataacctttttggggcaactcatgctcacacatgctgttttctttggttctccccctaccttccttttgtagatattgacagaataggaggaaatgagcatccttatttgagaaagagcaagaatgtcatgagcccttgatgcaatagtaagtgtgatgtcatcatacagtgttaatgatgctatcaaatccatcaataaacagtctcaaaccttccaacaacagtgctcactgctgctcctcaacttcagcccagcaagcagtaatatcatcacccattttgagatatgcaggtggaatagaacaaagaaacagccactgtaatcgagaagcatgtttactgtctaaatccacctgttgcagtaggaagccagagtggggttccaaatgcctcattaagtatgtggacagcctcactagtaagtgagtgaatttggcttcatcactgaacattagctaaggtcagcttaataacacaaatatgaggccgacttctttgcgagaagagaaaagaaaacatctgcttgatttaaaatccaccccacatgcctagagttgtctaatagtccctcactttccaatggcttcacatcctacttctacatttggggttttttggtgaaatcagagatagctcaggatttcataaaacgagaaactccaaactggtctattaggttccatgggaacacttgtagccaaaggattgtctgagggcaggaagacgacacttgtcaacaaggaagacagtgtttctttaggtcccatattcatctaattcatggggttctaacattttggggggccatagatctttgacaatctgagccatctatgaaactctccccaaaagaaccaccccacaaaatcttgcaaaacgtaagagattttcctggatctgaagctacccgaagacatgggaagagttgtattctattattcaattttaagaatatttattaatattcactgagctattgctagccactgtgctaaacattttacatacattctcctatttcatcctcaaaacaatcctttgagttgggttttaatatagttccaatattcggatgtgaaaactgaggcttatagtggctaagaaacttgcccaaagccactacctagaaaatggcagagctggaatgtaggtttaactcctgaccactatgctataaagtcaccacatgtcaaactaattttcaagttgttgggacatgtcccctactaggttttaaactagatcttccttggtagatgaagctatagaacttctattttccctgctttctgtagtctctcacagtgacagcatctatactaaagtatagatacctaaggggaaaatatagaaagcctgcctgaataatagaatctagaacaacaacaaaaatattaattttttctgtgtatgcttaggtcaagcttaaaaaaaaaaaaaaaagaccggaaaatacctgggttgttagcctcacatttaggaaaaaattgtaatactcaattatctgtgtgtgtggctaaacaagtcagcatttctgcacacatacatctctttcctttatacttcccttcaaaagacaaatatcttacttttgatctttgacactatttggtcagtattcttctttacctttacttgtggcaaaactcaaggaagcgatcaaatagagggaagctcatttctatcattgtctctgtttccctataagaaagaactaccagggactcactgactgcattaggcatacaatgtcagagctgagctgaccactctggtcctgtaatgtctttggcctcacaccttggcagccatcattaatgggccatacccttccccaggtgcagaattctcctccccagagcactcaggccgttactaccaatttatctgagttggaaataagactcatttgccagttcttatttttaaagtggcaccctttaactttgaacctgtgtattttacactggcatcctagattcagcaatgaggtttggtggtgtttcaactaggaagggagaaaatgagtgcatctgaagttccttacagcttggtttctttggaatgctttcatcttctaagcaaagggatcagggtttgatctgtaagagttaaaaagacaaagtcattttgaagaattaactcagccagggatcatgcaaaaagattagaaaccataatgcccttgttaaagccctgctgtcaacctgccttcacccagagcttagagggccacagcagcaaagaggttggggtccatccctctctgatgtgctttttccacaacacatatctggtcctctggcaggattgtggatagagctcctcaccatacccaaaagactcagccccagtgccagtgctttcctggttcaacaacccaccacaaaaccttagtaaaaggatgagccaaaaatgaaaaagactcgactctacagtaagtcagtcagggatttcctttttaatggtttaagacatccaaatggcaagccaggaatagataccattaaagggtctcataggactaaccttaccagagccagaaatctagctctctggaagagatgcaagattctagaaaagtaaagggaagtgtcggcacatctaaatttagtgaacacaaaattaatttttatctagtctgtgacggagggaataaagtttttcatgtatcaaccacctcccccagtcaggtttctccctttttgagattatgaagaagctgagacatacttcttaaggaggtcgtgttttagaaggaaaaggcagaggctatccatcattatgctggctagatgcgcttctgaagaagccggattctgatgttcttaaccaaaatggtgaggtcatggaagtcccatttgcttggagattttgaaaaaaaaaaaaaaaaaaaacccattcccataaagtaattgagttcagcctttggattatttttggtttggtttttctctggttttgggtgtgatgtaagaagagctttttagttttgttttgaataacatcaatccttgcacactctatgcaaaaattttgtaagcatttcaataatgctatgaattacaaggaactattttaactttattacactttctgtataaaaaatttgtatttaatattatttcgaccacagtcttgtaaaatatattaataaaaataatgattggtaagaaggaaaaaaaaaaa

SEQ ID NO: 317634 - DNA, 4489 bp, Homo sapiens
gggaatatagttacttggcaaagtctttcaggaaggaagcccttccttatgttacatgtggaaagcctgccttccaagacatgtggaagtaattgatccacctgccagagaaacacaggctcagaggatgcctgggaacagggaggatgggattagtggaagcttaatggaaaaggaaagttatgatcctccaagacccttaattgatagaccataccaggttctgcaggtcagcatcattgtgtaatgagagtgaagtaggggaccctgtggttcaaccttagaatctgtttcctgtaggctctttctgctgtctatattcattaaagttttccacttcaccctcccatagtctagagggatgcccattccatggtcctccagagaatagttttgacttaacatgtctgtttagcccacatcacgtcagttatcaacaccgccactgtgcttactgttcctacagccacaccaggcttgaagagttagtgagaccaacaaataattggaagtattggaaaaagcaaaatacatggggacaaaaaaaatacagtgaaattctttttatcaaactgatgctgtgagaaaccagatgaatgccagtttggctttatttctaagaatctgggtcttcattctctggtgtagaaggaatgcaaaaaactataacaacaacaacaaaaacatattttgaaaagacatattctgacatctctgcttgtgtgtggtaaggcaggttcctatcagacatttatccctttggtcaagatcccttttgctcatccagggtttcatactcaatatcgcttaaaaaaaaaaaagtatcagctagggatgactctggaagtatgagtatcatggtggggaggaaggaattttttttaaatgtaaatgacccccatttaccagaccctaatcaaagtcacttaagggaatccctcagccttttatttggaaacagttgaaataaactggcagcagctagatcagagtatcttgctttattttataaaggccaaaggtagtatgaagtttggaccaaaaaggtaaatagatccattccagcacctgatactgatttttcaaggctctatgaaaggtcaaaaatttcattaaacaagaccagttctccctcttccccctgtcccaagaaatcttaggcatgaaaaggataaggaaacagctcctggaatgatacatttgcatagtgccctagtagcaggttgggaaaaagttataatataagaaacaaccttcgaaaacaggccttttatctcaaagataaaatgtctttcttgtggtctttcatcactatctccgtggtggaaggttcccctagttccaacatatttccattaaaatagtcaaagccacggcattgggatgtcagatgcctctctttctttgtggtaatcggaatttaaaattatacagttgcctctgaatttctcatgcacaaagccaaaccactgataagagataaagcagtctgaagcctgctgcttcagccagcacagcacaccacacacgctcgcactttcaaaagcaatgtgatttctatggttcttaaaagctttcttcataagggagtccctgaaatttctcaaggcaggtttgaatggcaaagggaaaataattacttgtgggaggtcctccttttgagtattgttagagcatacatgtaaaagaaaataacctttttggggcaactcatgctcacacatgctgttttctttggttctccccctaccttccttttgtagatattgacagaataggaggaaatgagcatccttatttgagaaagagcaagaatgtcatgagcccttgatgcaatagtaagtgtgatgtcatcatacagtgttaatgatgctatcaaatccatcaataaacagtctcaaaccttccaacaacagtgctcactgctgctcctcaacttcagcccagcaagcagtaatatcatcacccattttgagatatgcaggtggaatagaacaaagaaacagccactgtaatcgagaagcatgtttactgtctaaatccacctgttgcagtaggaagccagagtggggttccaaatgcctcattaagtatgtggacagcctcactagtaagtgagtgaatttggcttcatcactgaacattagctaaggtcagcttaataacacaaatatgaggccgacttctttgcgagaagagaaaagaaaacatctgcttgatttaaaatccaccccacatgcctagagttgtctaatagtccctcactttccaatggcttcacatcctacttctacatttggggttttttggtgaaatcagagatagctcaggatttcataaaacgagaaactccaaactggtctattaggttccatgggaacacttgtagccaaaggattgtctgagggcaggaagacgacacttgtcaacaaggaagacagtgtttctttaggtcccatattcatctaattcatggggttctaacattttggggggccatagatctttgacaatctgagccatctatgaaactctccccaaaagaaccaccccacaaaatcttgcaaaacgtaagagattttcctggatctgaagctacccgaagacatgggaagagttgtattctattattcaattttaagaatatttattaatattcactgagctattgctagccactgtgctaaacattttacatacattctcctatttcatcctcaaaacaatcctttgagttgggttttaatatagttccaatattcggatgtgaaaactgaggcttatagtggctaagaaacttgcccaaagccactacctagaaaatggcagagctggaatgtaggtttaactcctgaccactatgctataaagtcaccacatgtcaaactaattttcaagttgttgggacatgtcccctactaggttttaaactagatcttccttggtagatgaagctatagaacttctattttccctgctttctgtagtctctcacagtgacagcatctatactaaagtatagatacctaaggggaaaatatagaaagcctgcctgaataatagaatctagaacaacaacaaaaatattaattttttctgtgtatgcttaggtcaagcttaaaaaaaaaaaaaaaagaccggaaaatacctgggttgttagcctcacatttaggaaaaaattgtaatactcaattatctgtgtgtgtggctaaacaagtcagcatttctgcacacatacatctctttcctttatacttcccttcaaaagacaaatatcttacttttgatctttgacactatttggtcagtattcttctttacctttacttgtggcaaaactcaaggaagcgatcaaatagagggaagctcatttctatcattgtctctgtttccctataagaaagaactaccagggactcactgactgcattaggcatacaatgtcagagctgagctgaccactctggtcctgtaatgtctttggcctcacaccttggcagccatcattaatgggccatacccttccccaggtgcagaattctcctccccagagcactcaggccgttactaccaatttatctgagttggaaataagactcatttgccagttcttatttttaaagtggcaccctttaactttgaacctgtgtattttacactggcatccctggttcaacaacccaccacaaaaccttagtaaaaggatgagccaaaaatgaaaaagactcgactctacagtaagtcagtcagggatttcctttttaatggtttaagacatccaaatggcaagccaggaatagataccattaaagggtctcataggactaaccttaccagagccagaaatctagctctctggaagagatgcaagattctagaaaagtaaagggaagtgtcggcacatctaaatttagtgaacacaaaattaatttttatctagtctgtgacggagggaataaagtttttcatgtatcaaccacctcccccagtcaggtttctccctttttgagattatgaagaagctgagacatacttcttaaggaggtcgtgttttagaaggaaaaggcagaggctatccatcattatgctggctagatgcgcttctgaagaagccggattctgatgttcttaaccaaaatggtgaggtcatggaagtcccatttgcttggagattttgaaaaaaaaaaaaaaaaaaaacccattcccataaagtaattgagttcagcctttggattatttttggtttggtttttctctggttttgggtgtgatgtaagaagagctttttagttttgttttgaataacatcaatccttgcacactctatgcaaaaattttgtaagcatttcaataatgctatgaattacaaggaactattttaactttattacactttctgtataaaaaatttgtatttaatattatttcgaccacagtcttgtaaaatatattaataaaaataatgattggtaagaaggaaaaaaaaaaa

SEQ ID NO: 317635 - DNA, 1909 bp, Homo sapiens
gggaatatagttacttggcaaagtctttcaggaaggaagcccttccttatgttacatgtggaaagcctgccttccaagacatgtggaagtaattgatccacctgccagagaaacacaggctcagaggatgcctgggaacagggaggatgggattagtggaagcttaatggaaaaggaaagttatgatcctccaagacccttaattgatagaccataccaggttctgcaggtcagcatcattgtgtaatgagagtgaagtaggggaccctgtggttcaaccttagaatctgtttcctgtaggctctttctgctgtctatattcattaaagttttccacttcaccctcccatagtctagagggatgcccattccatggtcctccagagaatagttttgacttaacatgtctgtttagcccacatcacgtcagttatcaacaccgccactgtgcttactgttcctacagccacaccaggcttgaagagttagtgagaccaacaaataattggaagtattggaaaaagcaaaatacatggggacaaaaaaaatacagtgaaattctttttatcaaactgatgctgtgagaaaccagatgaatgccagtttggctttatttctaagaatctgggtcttcattctctggtgtagaaggaatgcaaaaaactataacaacaacaacaaaaacatattttgaaaagacatattctgacatctctgcttgtgtgtggtaaggcaggttcctatcagacatttatccctttggtcaagatcccttttgctcatccagggtttcatactcaatatcgcttaaaaaaaaaaaagtatcagctagggatgactctggaagtatgagtatcatggtggggaggaaggaattttttttaaatgtaaatgacccccatttaccagaccctaatcaaagtcacttaagggaatccctcagccttttatttggaaacagttgaaataaactggcagcagctagatcagagtatcttgctttattttataaaggccaaaggtagtatgaagtttggaccaaaaaggtaaatagatccattccagcacctgatactgatttttcaaggctctatgaaaggtcaaaaatttcattaaacaagaccagttctccctcttccccctgtcccaagaaatcttaggcatgaaaaggataaggaaacagctcctggaatgatacatttgcatagtgccctagtagcaggttgggaaaaagttataatataagaaacaaccttcgaaaacaggccttttatctcaaagataaaatgtctttcttgtggtctttcatcactatctccgtggtggaaggttcccctagttccaacatatttccattaaaatagtcaaagccacggcattgggatgtcagatgcctctctttctttgtggtaatcggaatttaaaattatacagttgcctctgaatttctcatgcacaaagccaaaccactgataagagataaagcagtctgaagcctgctgcttcagccagcacagcacaccacacacgctcgcactttcaaaagcaatgtgatttctatggttcttaaaagctttcttcataagggagtccctgaaatttctcaaggcaggtttgaatggcaaagggaaaataattacttgtgggaggtcctccttttgagtattgttagagcatacatgtaaaagaaaataacctttttggggcaactcatgctcacacatgctgttttctttggttctccccctaccttccttttgtagatattgacagaataggaggaaatgagcatccttatttgagaaagagcaagaatgtcatgagcccttgatgcaatagtaagtgtgatgtcatcatacagtgttaatgatgctatcaaatccatcaataaacagtctcaaaccttcca

SEQ ID NO: 317636 - DNA, 261 bp, Homo sapiens
agtaagcttacatttctgtgtaggtttgggaatatagttacttggcaaagtctttcaggaaggaagcccttccttatgttacatgtggaaagcctgccttccaagacatgtggaagtaattgatccacctgccagagaaacacaggctcagaggatgcctgggaacagggaggatgggattagtggaagcttaatggaaaaggaaagttatgatcctccaagacccttaattgatagaccataccaggttctgcaggtcag

SEQ ID NO: 317637 - DNA, 2307 bp, Homo sapiens
atatagcggctcccgggggcgcagggaccgtgctccgccgtctccgccgcatcttccaccctcgccgccgccgcagctccccgcgctcgtgccaccgccgccgcgtccaccctcagcgccaccgccatgcgggagatcgtgcacctgcaggccggccagtgcggcaaccagatcggggccaagttttgggaggttatcagtgacgaacatggcatcgaccccacaggcacataccatggggacagtgacctgcaactggagaggatcaacgtgtactacaacgaggccacaggaggaaattatgtccccagagcggtgctggtggacctggaacccggcaccatggactctgtccgttctggccccttcggtcagatctttcggccggacaacttcgtgtttggccaatccggagccggcaacaactgggcaaaggggcactacacggagggcgcagagctggtggacgctgtcctggacgtagtccggaaggaggccgagagctgcgactgccttcagggcttccagctgacccactcgctggggggtggcacggggtccggaatgggcacgctgctcatcagtaagatccgcgaggagttcccagaccgcatcatgaacaccttcagcgtggtgccctcgcccaaagtgtcagacacggtggtggagccctacaacgccacgctgtctgtgcaccagctggtggagaatacggatgagacctactgcatcgacaacgaggcactctacgacatctgtttccgcaccctcaagctgaccacccccacctacggggacctcaaccacctggtgtcggccaccatgagcggggtcaccacctgcctgcgcttcccgggccagctgaacgccgacctgcgcaagctggccgtcaacatggtcccctttcctcgcctgcacttcttcatgcccggcttcgcacccctgaccagccggggcagccagcagtaccgggccctgacggtgcccgagctcacccagcagatgttcgatgccaagaacatgatggcggcgtgcgacccgcgccacggccgctacctgaccgtggccgccgtgttccggggccgcatgtccatgaaggaggtggacgagcagatgctgagcgtgcagagcaagaacagcagctacttcgtggagtggatccccaacaacgtgaagacggccgtgtgcgacatcccgccccgcggcctgaagatggccgcgaccttcatcggcaacagcacggccatccaggagctgttcaagcgcatctccgagcagttcacggccatgttccggcgcaaggccttcttgcactggtacacgggcgagggcatggacgagatggagttcaccgaggccgagagcaacatgaatgacctggtatctgagtaccagcagtaccaggacgccacggccgaggagggcgagttcgaggaggaggcggaggaggaggtggcctaggctgctcccatcgcttcccacctgtcccctcgaggcttctgacctttgatccgctaggccccccatctctgaaccctagagccccgctttccctccaaggctgactcccccctgaccctaacaatacctttggagctcgctttacctctggctacttcatctccgaccctggctcccctttgagccctaatttatctttaacccccttgagctcttccaaccttgacattcccaggaggagccccgcttcaccccttctcactctggaaaccgcacctttaactttgcagaccttccttcacccctgacttctgcttcacctttgacctctgccccccatgaatcccattttacctctagacctataagttctggtttatgtttgacccctccctctgagcttgcacttcaccgctgaccttgcctcacctttaaccccccacctgagccccagctcctacctctgaccccaacttctctttgatctctgaatcccctctgactccaacttctctttcaccctctatgagtcccattttacttctacacctgcaagtcctggtttatattggacccctccctccgagctgcagttcacctttgaccttgcctcacctttcaccccccaccccccacagcgtcagctcctacctctgaccccagcttctctctggttcccacaggccccatgcatcctccctgcctcactcccctcagcccctgccgaccttagcttatctgggagagaaacaaggcctggtgcctgtgaggaagagaggtcacccctaccctccctccccgcttccctgcctcaccctcaataaataaattaattgttgtcatgga

SEQ ID NO: 317638 - DNA, 431 bp, Homo sapiens
cgacggggtgctccacccgacggggtgctccacccgacggggtgcacttcaccgctgaccttgcctcacctttaaccccccacctgagccccagctcctacctctgaccccaacttctctttgatctctgaatcccctctgactccaacttctctttcaccctctatgagtcccattttacttctacacctgcaagtcctggtttatattggacccctccctccgagctgcagttcacctttgaccttgcctcacctttcaccccccacccccgtcgggtggagcggggaatctctgttcatcaaattctcatgttatgttgagtatcatttaacatttcaaaaaattcacagctgtcttatttttttaaaatcttacttatgtagctcagttaatcttaactatcatatttattatcttacccccagagc

SEQ ID NO: 317639 - DNA, 578 bp, Homo sapiens
cgacggggtgctccacccgacggggtgctccacccgacggggtgcacttcaccgctgaccttgcctcacctttaaccccccacctgagccccagctcctacctctgaccccaacttctctttgatctctgaatcccctctgactccaacttctctttcaccctctatgagtcccattttacttctacacctgcaagtcctggtttatattggacccctccctccgagctgcagttcacctttgaccttgcctcacctttcaccccccacccccgtcgggtggaggctccacccgacggggtggggctagatctggtctagagaggcgactccaagctctcttgctggctcccagctgtgggaatcctttaggcttgttctcaacctacacgttaaaaatgcttcttggtgtgtttggggagggggagagggaaactgagctctctcttgacctcctccaacacccttgacttgcttacccagccattttcagtagctacacgggtggtcacagaacactgggcggcactcggcacacaacacagaaccggggcagtccatgcaggtgcgggaacacat

SEQ ID NO: 317640 - DNA, 302 bp, Homo sapiens
tgatcgagctcggtccgctctccgacggggtgcctgcacttcaccgctgaccttgcctcacctttaaccccccacctgagccccagctcctacctctgaccccaacttctctttgatctctgaatcccctctgactccaacttctctttcaccctctatgagtcccattttacttctacacctgcaagtcctggtttatattggacccctccctccgagctgcagttcacctttgaccttgcctcacctttcaccccccacccccgtcgggtggagcaccccgtcggaagagcgggcgagct

SEQ ID NO: 317641 - DNA, 223 bp, Homo sapiens
ttagaggatccttaccgactagcccgacaggccccgactagccctgacagccccgactagcccgaccacagcgtcagctcctacctctgaccccagcttctctctggttcccacaggccccatgcatcctccctgcctcactcccctcagcccctgccgaccttagcttatctgggagagaaacagccccatgcatcctccggcctcactcccctcagcacct

SEQ ID NO: 317642 - DNA, 2264 bp, Homo sapiens
atatagcggctcccgggggcgcagggaccgtgctccgccgtctccgccgcatcttccaccctcgccgccgccgcagctccccgcgctcgtgccaccgccgccgcgtccaccctcagcgccaccgccatgcgggagatcgtgcacctgcaggccggccagtgcggcaaccagatcggggccaaggcacataccatggggacagtgacctgcaactggagaggatcaacgtgtactacaacgaggccacaggaggaaattatgtccccagagcggtgctggtggacctggaacccggcaccatggactctgtccgttctggccccttcggtcagatctttcggccggacaacttcgtgtttggccaatccggagccggcaacaactgggcaaaggggcactacacggagggcgcagagctggtggacgctgtcctggacgtagtccggaaggaggccgagagctgcgactgccttcagggcttccagctgacccactcgctggggggtggcacggggtccggaatgggcacgctgctcatcagtaagatccgcgaggagttcccagaccgcatcatgaacaccttcagcgtggtgccctcgcccaaagtgtcagacacggtggtggagccctacaacgccacgctgtctgtgcaccagctggtggagaatacggatgagacctactgcatcgacaacgaggcactctacgacatctgtttccgcaccctcaagctgaccacccccacctacggggacctcaaccacctggtgtcggccaccatgagcggggtcaccacctgcctgcgcttcccgggccagctgaacgccgacctgcgcaagctggccgtcaacatggtcccctttcctcgcctgcacttcttcatgcccggcttcgcacccctgaccagccggggcagccagcagtaccgggccctgacggtgcccgagctcacccagcagatgttcgatgccaagaacatgatggcggcgtgcgacccgcgccacggccgctacctgaccgtggccgccgtgttccggggccgcatgtccatgaaggaggtggacgagcagatgctgagcgtgcagagcaagaacagcagctacttcgtggagtggatccccaacaacgtgaagacggccgtgtgcgacatcccgccccgcggcctgaagatggccgcgaccttcatcggcaacagcacggccatccaggagctgttcaagcgcatctccgagcagttcacggccatgttccggcgcaaggccttcttgcactggtacacgggcgagggcatggacgagatggagttcaccgaggccgagagcaacatgaatgacctggtatctgagtaccagcagtaccaggacgccacggccgaggagggcgagttcgaggaggaggcggaggaggaggtggcctaggctgctcccatcgcttcccacctgtcccctcgaggcttctgacctttgatccgctaggccccccatctctgaaccctagagccccgctttccctccaaggctgactcccccctgaccctaacaatacctttggagctcgctttacctctggctacttcatctccgaccctggctcccctttgagccctaatttatctttaacccccttgagctcttccaaccttgacattcccaggaggagccccgcttcaccccttctcactctggaaaccgcacctttaactttgcagaccttccttcacccctgacttctgcttcacctttgacctctgccccccatgaatcccattttacctctagacctataagttctggtttatgtttgacccctccctctgagcttgcacttcaccgctgaccttgcctcacctttaaccccccacctgagccccagctcctacctctgaccccaacttctctttgatctctgaatcccctctgactccaacttctctttcaccctctatgagtcccattttacttctacacctgcaagtcctggtttatattggacccctccctccgagctgcagttcacctttgaccttgcctcacctttcaccccccaccccccacagcgtcagctcctacctctgaccccagcttctctctggttcccacaggccccatgcatcctccctgcctcactcccctcagcccctgccgaccttagcttatctgggagagaaacaaggcctggtgcctgtgaggaagagaggtcacccctaccctccctccccgcttccctgcctcaccctcaataaataaattaattgttgtcatgga

SEQ ID NO: 317643 - DNA, 1955 bp, Homo sapiens
gctgcagttgtcgtgacaggtcagatctttcggccggacaacttcgtgtttgccaatccggagccggcaacaactgggcaaaggggcactacacggagggcgcagagctggtggacgctgtcctggacgtagtccggaaggaggccgagagctgcgactgccttcagggcttccagctgacccactcgctggggggtggcacggggtccggaatgggcacgctgctcatcagtaagatccgcgaggagttcccagaccgcatcatgaacaccttcagcgtggtgccctcgcccaaagtgtcagacacggtggtggagccctacaacgccacgctgtctgtgcaccagctggtggagaatacggatgagacctactgcatcgacaacgaggcactctacgacatctgtttccgcaccctcaagctgaccacccccacctacggggacctcaaccacctggtgtcggccaccatgagcggggtcaccacctgcctgcgcttcccgggccagctgaacgccgacctgcgcaagctggccgtcaacatggtcccctttcctcgcctgcacttcttcatgcccggcttcgcacccctgaccagccggggcagccagcagtaccgggccctgacggtgcccgagctcacccagcagatgttcgatgccaagaacatgatggcggcgtgcgacccgcgccacggccgctacctgaccgtggccgccgtgttccggggccgcatgtccatgaaggaggtggacgagcagatgctgagcgtgcagagcaagaacagcagctacttcgtggagtggatccccaacaacgtgaagacggccgtgtgcgacatcccgccccgcggcctgaagatggccgcgaccttcatcggcaacagcacggccatccaggagctgttcaagcgcatctccgagcagttcacggccatgttccggcgcaaggccttcttgcactggtacacgggcgagggcatggacgagatggagttcaccgaggccgagagcaacatgaatgacctggtatctgagtaccagcagtaccaggacgccacggccgaggagggcgagttcgaggaggaggcggaggaggaggtggcctaggctgctcccatcgcttcccacctgtcccctcgaggcttctgacctttgatccgctaggccccccatctctgaaccctagagccccgctttccctccaaggctgactcccccctgaccctaacaatacctttggagctcgctttacctctggctacttcatctccgaccctggctcccctttgagccctaatttatctttaacccccttgagctcttccaaccttgacattcccaggaggagccccgcttcaccccttctcactctggaaaccgcacctttaactttgcagaccttccttcacccctgacttctgcttcacctttgacctctgccccccatgaatcccattttacctctagacctataagttctggtttatgtttgacccctccctctgagcttgcacttcaccgctgaccttgcctcacctttaaccccccacctgagccccagctcctacctctgaccccaacttctctttgatctctgaatcccctctgactccaacttctctttcaccctctatgagtcccattttacttctacacctgcaagtcctggtttatattggacccctccctccgagctgcagttcacctttgaccttgcctcacctttcaccccccaccccccacagcgtcagctcctacctctgaccccagcttctctctggttcccacaggccccatgcatcctccctgcctcactcccctcagcccctgccgaccttagcttatctgggagagaaacaaggcctggtgcctgtgaggaagagaggtcacccctaccctccctccccgcttccctgcctcaccctcaataaataaattaattgttgtcatgga

SEQ ID NO: 317644 - DNA, 2252 bp, Homo sapiens
atatagcggctcccgggggcgcagggaccgtgctccgccgtctccgccgcatcttccaccctcgccgccgccgcagctccccgcgctcgtgccaccgccgccgcgtccaccctcagcgccaccgccatgcgggagatcgtgcacctgcaggccggccagtgcggcaaccagatcggggccaagttttgggaggttatcagtgacgaacatggcatcgaccccacaggcacataccatggggacagtgacctgcaactggagaggatcaacgtgtactacaacgaggccacaggaggaaattatgtccccagagcggtgctggtggacctggaacccggcaccatggactctgtccgttctggccccttcggtcagatctttcggccggacaacttcgtgtttggccaatccggagccggcaacaactgggcaaaggggcactacacggagggcgcagagctggtggacgctgtcctggacgtagtccggaaggaggccgagagctgcgactgccttcagggcttccagctgacccactcgctggggggtggcacggggtccggaatgggcacgctgctcatcagtaagatccgcgaggagttcccagaccgcatcatgaacaccttcagcgtggtgccctcgcccaaagtgtcagacacggtggtggagccctacaacgccacgctgtctgtgcaccagctggtggagaatacggatgagacctactgcatcgacaacgaggcactctacgacatctgtttccgcaccctcaagctgaccacccccacctacggggacctcaaccacctggtgtcggccaccatgagcggggtcaccacctgcctgcgcttcccgggccagctgaacgccgacctgcgcaagctggccgtcaacatggtcccctttcctcgcctgcacttcttcatgcccggcttcgcacccctgaccagccggggcagccagcagtaccgggccctgacggtgcccgagctcacccagcagatgttcgatgccaagaacatgatggcggcgtgcgacccgcgccacggccgctacctgaccgtggccgccgtgttccggggccgcatgtccatgaaggaggtggacgagcagatgctgagcgtgcagagcaagaacagcagctacttcgtggagtggatccccaacaacgtgaagacggccgtgtgcgacatcccgccccgcggcctgaagatggccgcgaccttcatcggcaacagcacggccatccaggagctgttcaagcgcatctccgagcagttcacggccatgttccggcgcaaggccttcttgcactggtacacgggcgagggcatggacgagatggagttcaccgaggccgagagcaacatgaatgacctggtatctgagtaccagcagtaccaggacgccacggccgaggagggcgagttcgaggaggaggcggaggaggaggtggcctaggctgctcccatcgcttcccacctgtcccctcgaggcttctgacctttgatccgctaggccccccatctctgaaccctagagccccgctttccctccaaggctgactcccccctgaccctaacaatacctttggagctcgctttacctctggctacttcatctccgaccctggctcccctttgagccctaatttatctttaacccccttgagctcttccaaccttgacattcccaggaggagccccgcttcaccccttctcactctggaaaccgcacctttaactttgcagaccttccttcacccctgacttctgcttcacctttgacctctgccccccatgaatcccattttacctctagacctataagttctggtttatgtttgacccctccctctgagcttgcacttcaccgctgaccttgcctcacctttaaccccccacctgagccccagctcctacctctgaccccaacttctctttgatctctgaatcccctctgactccaacttctctttcaccctctatgagtcccattttacttctacacctgcaagtcctggtttatattggacccctccctccgagctgcagttcacctttgaccttgcctcacctttcaccccccacccccgtcgggtggagcggggaatctctgttcatcaaattctcatgttatgttgagtatcatttaacatttcaaaaaattcacagctgtcttatttttttaaaatcttacttatgtagctcagttaatcttaactatcatatttattatcttacccccagagc

SEQ ID NO: 317645 - DNA, 2399 bp, Homo sapiens
atatagcggctcccgggggcgcagggaccgtgctccgccgtctccgccgcatcttccaccctcgccgccgccgcagctccccgcgctcgtgccaccgccgccgcgtccaccctcagcgccaccgccatgcgggagatcgtgcacctgcaggccggccagtgcggcaaccagatcggggccaagttttgggaggttatcagtgacgaacatggcatcgaccccacaggcacataccatggggacagtgacctgcaactggagaggatcaacgtgtactacaacgaggccacaggaggaaattatgtccccagagcggtgctggtggacctggaacccggcaccatggactctgtccgttctggccccttcggtcagatctttcggccggacaacttcgtgtttggccaatccggagccggcaacaactgggcaaaggggcactacacggagggcgcagagctggtggacgctgtcctggacgtagtccggaaggaggccgagagctgcgactgccttcagggcttccagctgacccactcgctggggggtggcacggggtccggaatgggcacgctgctcatcagtaagatccgcgaggagttcccagaccgcatcatgaacaccttcagcgtggtgccctcgcccaaagtgtcagacacggtggtggagccctacaacgccacgctgtctgtgcaccagctggtggagaatacggatgagacctactgcatcgacaacgaggcactctacgacatctgtttccgcaccctcaagctgaccacccccacctacggggacctcaaccacctggtgtcggccaccatgagcggggtcaccacctgcctgcgcttcccgggccagctgaacgccgacctgcgcaagctggccgtcaacatggtcccctttcctcgcctgcacttcttcatgcccggcttcgcacccctgaccagccggggcagccagcagtaccgggccctgacggtgcccgagctcacccagcagatgttcgatgccaagaacatgatggcggcgtgcgacccgcgccacggccgctacctgaccgtggccgccgtgttccggggccgcatgtccatgaaggaggtggacgagcagatgctgagcgtgcagagcaagaacagcagctacttcgtggagtggatccccaacaacgtgaagacggccgtgtgcgacatcccgccccgcggcctgaagatggccgcgaccttcatcggcaacagcacggccatccaggagctgttcaagcgcatctccgagcagttcacggccatgttccggcgcaaggccttcttgcactggtacacgggcgagggcatggacgagatggagttcaccgaggccgagagcaacatgaatgacctggtatctgagtaccagcagtaccaggacgccacggccgaggagggcgagttcgaggaggaggcggaggaggaggtggcctaggctgctcccatcgcttcccacctgtcccctcgaggcttctgacctttgatccgctaggccccccatctctgaaccctagagccccgctttccctccaaggctgactcccccctgaccctaacaatacctttggagctcgctttacctctggctacttcatctccgaccctggctcccctttgagccctaatttatctttaacccccttgagctcttccaaccttgacattcccaggaggagccccgcttcaccccttctcactctggaaaccgcacctttaactttgcagaccttccttcacccctgacttctgcttcacctttgacctctgccccccatgaatcccattttacctctagacctataagttctggtttatgtttgacccctccctctgagcttgcacttcaccgctgaccttgcctcacctttaaccccccacctgagccccagctcctacctctgaccccaacttctctttgatctctgaatcccctctgactccaacttctctttcaccctctatgagtcccattttacttctacacctgcaagtcctggtttatattggacccctccctccgagctgcagttcacctttgaccttgcctcacctttcaccccccacccccgtcgggtggaggctccacccgacggggtggggctagatctggtctagagaggcgactccaagctctcttgctggctcccagctgtgggaatcctttaggcttgttctcaacctacacgttaaaaatgcttcttggtgtgtttggggagggggagagggaaactgagctctctcttgacctcctccaacacccttgacttgcttacccagccattttcagtagctacacgggtggtcacagaacactgggcggcactcggcacacaacacagaaccggggcagtccatgcaggtgcgggaacacat

SEQ ID NO: 317646 - DNA, 2052 bp, Homo sapiens
atatagcggctcccgggggcgcagggaccgtgctccgccgtctccgccgcatcttccaccctcgccgccgccgcagctccccgcgctcgtgccaccgccgccgcgtccaccctcagcgccaccgccatgcgggagatcgtgcacctgcaggccggccagtgcggcaaccagatcggggccaagttttgggaggttatcagtgacgaacatggcatcgaccccacaggcacataccatggggacagtgacctgcaactggagaggatcaacgtgtactacaacgaggccacaggaggaaattatgtccccagagcggtgctggtggacctggaacccggcaccatggactctgtccgttctggccccttcggtcagatctttcggccggacaacttcgtgtttggccaatccggagccggcaacaactgggcaaaggggcactacacggagggcgcagagctggtggacgctgtcctggacgtagtccggaaggaggccgagagctgcgactgccttcagggcttccagctgacccactcgctggggggtggcacggggtccggaatgggcacgctgctcatcagtaagatccgcgaggagttcccagaccgcatcatgaacaccttcagcgtggtgccctcgcccaaagtgtcagacacggtggtggagccctacaacgccacgctgtctgtgcaccagctggtggagaatacggatgagacctactgcatcgacaacgaggcactctacgacatctgtttccgcaccctcaagctgaccacccccacctacggggacctcaaccacctggtgtcggccaccatgagcggggtcaccacctgcctgcgcttcccgggccagctgaacgccgacctgcgcaagctggccgtcaacatggtcccctttcctcgcctgcacttcttcatgcccggcttcgcacccctgaccagccggggcagccagcagtaccgggccctgacggtgcccgagctcacccagcagatgttcgatgccaagaacatgatggcggcgtgcgacccgcgccacggccgctacctgaccgtggccgccgtgttccggggccgcatgtccatgaaggaggtggacgagcagatgctgagcgtgcagagcaagaacagcagctacttcgtggagtggatccccaacaacgtgaagacggccgtgtgcgacatcccgccccgcggcctgaagatggccgcgaccttcatcggcaacagcacggccatccaggagctgttcaagcgcatctccgagcagttcacggccatgttccggcgcaaggccttcttgcactggtacacgggcgagggcatggacgagatggagttcaccgaggccgagagcaacatgaatgacctggtatctgagtaccagcagtaccaggacgccacggccgaggagggcgagttcgaggaggaggcggaggaggaggtggcctaggctgctcccatcgcttcccacctgtcccctcgaggcttctgacctttgatccgctaggccccccatctctgaaccctagagccccgctttccctccaaggctgactcccccctgaccctaacaatacctttggagctcgctttacctctggctacttcatctccgaccctggctcccctttgagccctaatttatctttaacccccttgagctcttccaaccttgacattcccaggaggagccccgcttcaccccttctcactctggaaaccgcacctttaactttgcagaccttccttcacccctgacttctgcttcacctttgacctctgccccccatgaatcccattttacctctagacctataagttctggtttatgtttgacccctccctctgagcttgcacttcaccgctgaccttgcctcacctttaaccccccacctgagccccagctcctacctctgaccccaacttctctttgatctctgaatcccctctgactccaacttctctttcaccctctatgagtcccattttacttctacacctgcaagtcaaaagaaaattagagctgatcctctagagtcga

SEQ ID NO: 317647 - DNA, 1587 bp, Homo sapiens
gatgctgaggtgatctagaggatcccgacgcatcaacgccgcctgttcgacaagctgaccacccccacctacggggacctcaaccacctggtgtcggccaccatgagcggggtcaccacctgcctgcgcttcccgggccagctgaacgccgacctgcgcaagctggccgtcaacatggtcccctttcctcgcctgcacttcttcatgcccggcttcgcacccctgaccagccggggcagccagcagtaccgggccctgacggtgcccgagctcacccagcagatgttcgatgccaagaacatgatggcggcgtgcgacccgcgccacggccgctacctgaccgtggccgccgtgttccggggccgcatgtccatgaaggaggtggacgagcagatgctgagcgtgcagagcaagaacagcagctacttcgtggagtggatccccaacaacgtgaagacggccgtgtgcgacatcccgccccgcggcctgaagatggccgcgaccttcatcggcaacagcacggccatccaggagctgttcaagcgcatctccgagcagttcacggccatgttccggcgcaaggccttcttgcactggtacacgggcgagggcatggacgagatggagttcaccgaggccgagagcaacatgaatgacctggtatctgagtaccagcagtaccaggacgccacggccgaggagggcgagttcgaggaggaggcggaggaggaggtggcctaggctgctcccatcgcttcccacctgtcccctcgaggcttctgacctttgatccgctaggccccccatctctgaaccctagagccccgctttccctccaaggctgactcccccctgaccctaacaatacctttggagctcgctttacctctggctacttcatctccgaccctggctcccctttgagccctaatttatctttaacccccttgagctcttccaaccttgacattcccaggaggagccccgcttcaccccttctcactctggaaaccgcacctttaactttgcagaccttccttcacccctgacttctgcttcacctttgacctctgccccccatgaatcccattttacctctagacctataagttctggtttatgtttgacccctccctctgagcttgcacttcaccgctgaccttgcctcacctttaaccccccacctgagccccagctcctacctctgaccccaacttctctttgatctctgaatcccctctgactccaacttctctttcaccctctatgagtcccattttacttctacacctgcaagtcctggtttatattggacccctccctccgagctgcagttcacctttgaccttgcctcacctttcaccccccaccccccacagcgtcagctcctacctctgaccccagcttctctctggttcccacaggccccatgcatcctccctgcctcactcccctcagcccctgccgaccttagcttatctgggagagaaacaaggcctggtgcctgtgaggaagagaggtcacccctaccctccctccccgcttccctgcctcaccctcaataaataaattaattgttgtcatgga

SEQ ID NO: 317648 - DNA, 1613 bp, Homo sapiens
atatagcggctcccgggggcgcagggaccgtgctccgccgtctccgccgcatcttccaccctcgccgccgccgcagctccccgcgctcgtgccaccgccgccgcgtccaccctcagcgccaccgccatgcgggagatcgtgcacctgcaggccggccagtgcggcaaccagatcggggccaagttttgggaggttatcagtgacgaacatggcatcgaccccacaggcacataccatggggacagtgacctgcaactggagaggatcaacgtgtactacaacgaggccacaggaggaaattatgtccccagagcggtgctggtggacctggaacccggcaccatggactctgtccgttctggccccttcggtcagatctttcggccggacaacttcgtgtttggccaatccggagccggcaacaactgggcaaaggggcactacacggagggcgcagagctggtggacgctgtcctggacgtagtccggaaggaggccgagagctgcgactgccttcagggcttccagctgacccactcgctggggggtggcacggggtccggaatgggcacgctgctcatcagtaagatccgcgaggagttcccagaccgcatcatgaacaccttcagcgtggtgccctcgcccaaagtgtcagacacggtggtggagccctacaacgccacgctgtctgtgcaccagctggtggagaatacggatgagacctactgcatcgacaacgaggcactctacgacatctgtttccgcaccctcaagctgaccacccccacctacggggacctcaaccacctggtgtcggccaccatgagcggggtcaccacctgcctgcgcttcccgggccagctgaacgccgacctgcgcaagctggccgtcaacatggtcccctttcctcgcctgcacttcttcatgcccggcttcgcacccctgaccagccggggcagccagcagtaccgggccctgacggtgcccgagctcacccagcagatgttcgatgccaagaacatgatggcggcgtgcgacccgcgccacggccgctacctgaccgtggccgccgtgttccggggccgcatgtccatgaaggaggtggacgagcagatgctgagcgtgcagagcaagaacagcagctacttcgtggagtggatccccaacaacgtgaagacggccgtgtgcgacatcccgccccgcggcctgaagatggccgcgaccttcatcggcaacagcacggccatccaggagctgttcaagcgcatctccgagcagttcacggccatgttccggcgcaaggccttcttgcactggtacacgggcgagggcatggacgagatggagttcaccgaggccgagagcaacatgaatgacctggtatctgagtaccagcagtaccaggacgccacggccgaggagggcgagttcgaggaggaggcggaggaggaggtggcctagagccttcagtcactggggaaagcagggaagcagtgtgaactctttattcactcccagcctgtcctgtggcctgtcccactgtgtgcacttgctgttttccctgtccacatccatgctgtacagacaccaccattaaagcattttcatagtga

SEQ ID NO: 317649 - DNA, 1664 bp, Homo sapiens
atatagcggctcccgggggcgcagggaccgtgctccgccgtctccgccgcatcttccaccctcgccgccgccgcagctccccgcgctcgtgccaccgccgccgcgtccaccctcagcgccaccgccatgcgggagatcgtgcacctgcaggccggccagtgcggcaaccagatcggggccaagttttgggaggttatcagtgacgaacatggcatcgaccccacaggcacataccatggggacagtgacctgcaactggagaggatcaacgtgtactacaacgaggccacaggaggaaattatgtccccagagcggtgctggtggacctggaacccggcaccatggactctgtccgttctggccccttcggtcagatctttcggccggacaacttcgtgtttggccaatccggagccggcaacaactgggcaaaggggcactacacggagggcgcagagctggtggacgctgtcctggacgtagtccggaaggaggccgagagctgcgactgccttcagggcttccagctgacccactcgctggggggtggcacggggtccggaatgggcacgctgctcatcagtaagatccgcgaggagttcccagaccgcatcatgaacaccttcagcgtggtgccctcgcccaaagtgtcagacacggtggtggagccctacaacgccacgctgtctgtgcaccagctggtggagaatacggatgagacctactgcatcgacaacgaggcactctacgacatctgtttccgcaccctcaagctgaccacccccacctacggggacctcaaccacctggtgtcggccaccatgagcggggtcaccacctgcctgcgcttcccgggccagctgaacgccgacctgcgcaagctggccgtcaacatggtcccctttcctcgcctgcacttcttcatgcccggcttcgcacccctgaccagccggggcagccagcagtaccgggccctgacggtgcccgagctcacccagcagatgttcgatgccaagaacatgatggcggcgtgcgacccgcgccacggccgctacctgaccgtggccgccgtgttccggggccgcatgtccatgaaggaggtggacgagcagatgctgagcgtgcagagcaagaacagcagctacttcgtggagtggatccccaacaacgtgaagacggccgtgtgcgacatcccgccccgcggcctgaagatggccgcgaccttcatcggcaacagcacggccatccaggagctgttcaagcgcatctccgagcagttcacggccatgttccggcgcaaggccttcttgcactggtacacgggcgagggcatggacgagatggagttcaccgaggccgagagcaacatgaatgacctggtatctgagtaccagcagtaccaggacgccacggccgaggagggcgagttcgaggaggaggcggaggaggaggtggcctagagccttcagtcactggggaaagcagggaagcagtgtgaactctttattcactcccagcctgtcctgtggcctgtcccactgtgtgcacttgctgttttccctgtccacatccatgctgtacagacaccaccattaaagcattttcatagtgaaaaaaaaaaattttttaatgtcgatcggccttttatttagtagtagtaggc

SEQ ID NO: 317650 - DNA, 770 bp, Homo sapiens
cgccgtctctccgcctcctcctcgaactcgccctcctcggccgtgacaatgcgttggagctcgctttacctctggctacttcatctccgaccctggctcccctttgagccctaatttatctttaacccccttgagctcttccaaccttgacattcccaggaggagccccgcttcaccccttctcactctggaaaccgcacctttaactttgcagaccttccttcacccctgacttctgcttcacctttgacctctgccccccatgaatcccattttacctctagacctataagttctggtttatgtttgacccctccctctgagcttgcacttcaccgctgaccttgcctcacctttaaccccccacctgagccccagctcctacctctgaccccaacttctctttgatctctgaatcccctctgactccaacttctctttcaccctctatgagtcccattttacttctacacctgcaagtcctggtttatattggacccctccctccgagctgcagttcacctttgaccttgcctcacctttcaccccccaccccccacagcgtcagctcctacctctgaccccagcttctctctggttcccacaggccccatgcatcctccctgcctcactcccctcagcccctgccgaccttagcttatctgggagagaaacaaggcctggtgcctgtgaggaagagaggtcacccctaccctccctccccgcttccctgcctcaccctcaataaataaattaattgttgtcatgga

SEQ ID NO: 317651 - DNA, 680 bp, Homo sapiens
tctcattgtaaaatgggctcctgactcagtttcttgcctctcttcccagagatattctctatttatatagaggagccccgcttcaccccttctcactctggaaaccgcacctttaactttgcagaccttccttcacccctgacttctgcttcacctttgacctctgccccccatgaatcccattttacctctagacctataagttctggtttatgtttgacccctccctctgagcttgcacttcaccgctgaccttgcctcacctttaaccccccacctgagccccagctcctacctctgaccccaacttctctttgatctctgaatcccctctgactccaacttctctttcaccctctatgagtcccattttacttctacacctgcaagtcctggtttatattggacccctccctccgagctgcagttcacctttgaccttgcctcacctttcaccccccaccccccacagcgtcagctcctacctctgaccccagcttctctctggttcccacaggccccatgcatcctccctgcctcactcccctcagcccctgccgaccttagcttatctgggagagaaacaaggcctggtgcctgtgaggaagagaggtcacccctaccctccctccccgcttccctgcctcaccctcaataaataaattaattgttgtcatgga

SEQ ID NO: 317652 - DNA, 891 bp, Homo sapiens
atatagcggctcccgggggcgcagggaccgtgctccgccgtctccgccgcatcttccaccctcgccgccgccgcagctccccgcgctcgtgccaccgccgccgcgtccaccctcagcgccaccgccatgcgggagatcgtgcacctgcaggccggccagtgcggcaaccagatcggggccaagttttgggaggttatcagtgacgaacatggcatcgaccccacaggcacataccatggggacagtgacctgcaactggagaggatcaacgtgtactacaacgaggccacaggaggaaattatgtccccagagcggtgctggtggacctggaacccggcaccatggactctgtccgttctggccccttcggtcagatctttcggccggacaacttcgtgtttggccaatccggagccggcaacaactgggcaaaggggcactacacggagggcgcagagctggtggacgctgtcctggacgtagtccggaaggaggccgagagctgcgactgccttcagggcttccagctgacccactcgctggggggtggcacggggtccggaatgggcacgctgctcatcagtaagatccgcgaggagttcccagaccgcatcatgaacaccttcagcgtggtgccctcgcccaaagtgtcagacacggtggtggagccctacaacgccacgctgtctgtgcaccagctggtggagaatacggatgagacctactgcatcgacaacgaggcactctacgacatctgtttccgcaccctcaagctgaccacccccacctacggggacctcaaccacctggtgtcggccaccatgagcggggtcaccacctgcctacgttctattgcctggggggatcatctagtgtgctactgcaggctt

SEQ ID NO: 317653 - DNA, 478 bp, Homo sapiens
tgatcgagctcggtccgctctccgacggggtgcctgcacttcaccgctgaccttgcctcacctttaaccccccacctgagccccagctcctacctctgaccccaacttctctttgatctctgaatcccctctgactccaacttctctttcaccctctatgagtcccattttacttctacacctgcaagtcctggtttatattggacccctccctccgagctgcagttcacctttgaccttgcctcacctttcaccccccaccccccacagcgtcagctcctacctctgaccccagcttctctctggttcccacaggccccatgcatcctccctgcctcactcccctcagcccctgccgaccttagcttatctgggagagaaacaaggcctggtgcctgtgaggaagagaggtcacccctaccctccctccccgcttccctgcctcaccctcaataaataaattaattgttgtcatgga

SEQ ID NO: 317654 - DNA, 807 bp, Homo sapiens
atatagcggctcccgggggcgcagggaccgtgctccgccgtctccgccgcatcttccaccctcgccgccgccgcagctccccgcgctcgtgccaccgccgccgcgtccaccctcagcgccaccgccatgcgggagatcgtgcacctgcaggccggccagtgcggcaaccagatcggggccaagttttgggaggttatcagtgacgaacatggcatcgaccccacaggcacataccatggggacagtgacctgcaactggagaggatcaacgtgtactacaacgaggccacaggaggaaattatgtccccagagcggtgctggtggacctggaacccggcaccatggactctgtccgttctggccccttcggtcagatctttcggccggacaacttcgtgtttggccaatccggagccggcaacaactgggcaaaggggcactacacggagggcgcagagctggtggacgctgtcctggacgtagtccggaaggaggccgagagctgcgactgccttcagggcttccagctgacccactcgctggggggtggcacggggtccggaatgggcacgctgctcatcagtaagatccgcgaggagttcccagaccgcatcatgaacaccttcagcgtggtgccctcgcccaaagtgtcagacacggtggtggagccctacaacgccacgctgtctgtgcaccagctggtggagaatacggatgagacctactgcatcgacaacgaggcactctacgacatctgtttccgcaccctctggtaaaccacccacgtggaactttgtaaactggtg

SEQ ID NO: 317655 - DNA, 816 bp, Homo sapiens
atatagcggctcccgggggcgcagggaccgtgctccgccgtctccgccgcatcttccaccctcgccgccgccgcagctccccgcgctcgtgccaccgccgccgcgtccaccctcagcgccaccgccatgcgggagatcgtgcacctgcaggccggccagtgcggcaaccagatcggggccaagttttgggaggttatcagtgacgaacatggcatcgaccccacaggcacataccatggggacagtgacctgcaactggagaggatcaacgtgtactacaacgaggccacaggaggaaattatgtccccagagcggtgctggtggacctggaacccggcaccatggactctgtccgttctggccccttcggtcagatctttcggccggacaacttcgtgtttggccaatccggagccggcaacaactgggcaaaggggcactacacggagggcgcagagctggtggacgctgtcctggacgtagtccggaaggaggccgagagctgcgactgccttcagggcttccagctgacccactcgctggggggtggcacggggtccggaatgggcacgctgctcatcagtaagatccgcgaggagttcccagaccgcatcatgaacaccttcagcgtggtgccctcgcccaaagtgtcagacacggtggtggagccctacaacgccacgctgtctgtgcaccagctggtggagaatacggatgagacctactgcatcgacaacgaggcactctacgacatctgtttccgcaccctcagctgggcaggctgggccgtgagcggggtctcctcactcaccttt

SEQ ID NO: 317656 - DNA, 279 bp, Homo sapiens
ttagaggatccttaccgactagcccgacaggccccgactagccctgacagccccgactagcccgaccacagcgtcagctcctacctctgaccccagcttctctctggttcccacaggccccatgcatcctccctgcctcactcccctcagcccctgccgaccttagcttatctgggagagaaacaaggcctggtgcctgtgaggaagagaggtcacccctaccctccctccccgcttccctgcctcaccctcaataaataaattaattgttgtcatgga

SEQ ID NO: 317657 - DNA, 570 bp, Homo sapiens
atatagcggctcccgggggcgcagggaccgtgctccgccgtctccgccgcatcttccaccctcgccgccgccgcagctccccgcgctcgtgccaccgccgccgcgtccaccctcagcgccaccgccatgcgggagatcgtgcacctgcaggccggccagtgcggcaaccagatcggggccaagttttgggaggttatcagtgacgaacatggcatcgaccccacaggcacataccatggggacagtgacctgcaactggagaggatcaacgtgtactacaacgaggccacaggaggaaattatgtccccagagcggtgctggtggacctggaacccggcaccatggactctgtccgttctggccccttcggtcagatctttcggccggacaacttcgtgtttggccaatccggagccggcaacaactgggcaaaggggcactacacggagggcccacaccaatttttgacactgtattaatcacaaacatgaaatagaccccacactcacatagcatgtagacagttgcgttcaactactgagtatcaacgtgtactacaaccaggacac

SEQ ID NO: 317658 - DNA, 2462 bp, Homo sapiens
atatagcggctcccgggggcgcagggaccgtgctccgccgtctccgccgcatcttccaccctcgccgccgccgcagctccccgcgctcgtgccaccgccgccgcgtccaccctcagcgccaccgccatgcgggagatcgtgcacctgcaggccggccagtgcggcaaccagatcggggccaagttttgggaggttatcagtgacgaacatggcatcgaccccacaggcacataccatggggacagtgacctgcaactggagaggatcaacgtgtactacaacgaggccacaggaggaaattatgtccccagagcggtgctggtggacctggaacccggcaccatggactctgtccgttctggccccttcggtcagatctttcggccggacaacttcgtgtttggccaatccggagccggcaacaactgggcaaaggggcactacacggagggcgcagagctggtggacgctgtcctggacgtagtccggaaggaggccgagagctgcgactgccttcagggcttccagctgacccactcgctggggggtggcacggggtccggaatgggcacgctgctcatcagtaagatccgcgaggagttcccagaccgcatcatgaacaccttcagcgtggtgccctcgcccaaagtgtcagacacggtggtggagccctacaacgccacgctgtctgtgcaccagctggtggagaatacggatgagacctactgcatcgacaacgaggcactctacgacatctgtttccgcaccctcaagctgaccacccccacctacggggacctcaaccacctggtgtcggccaccatgagcggggtcaccacctgcctgcgcttcccgggccagctgaacgccgacctgcgcaagctggccgtcaacatggtcccctttcctcgcctgcacttcttcatgcccggcttcgcacccctgaccagccggggcagccagcagtaccgggccctgacggtgcccgagctcacccagcagatgttcgatgccaagaacatgatggcggcgtgcgacccgcgccacggccgctacctgaccgtggccgccgtgttccggggccgcatgtccatgaaggaggtggacgagcagatgctgagcgtgcagagcaagaacagcagctacttcgtggagtggatccccaacaacgtgaagacggccgtgtgcgacatcccgccccgcggcctgaagatggccgcgaccttcatcggcaacagcacggccatccaggagctgttcaagcgcatctccgagcagttcacggccatgttccggcgcaaggccttcttgcactggtacacgggcgagggcatggacgagatggagttcaccgaggccgagagcaacatgaatgacctggtatctgagtaccagcagtaccaggacgccacggccgaggagggcgagttcgaggaggaggcggaggaggaggtggcctaggctgctcccatcgcttcccacctgtcccctcgaggcttctgacctttgatccgctaggccccccatctctgaaccctagagccccgctttccctccaaggctgactcccccctgaccctaacaatacctttggagctcgctttacctctggctacttcatctccgaccctggctcccctttgagccctaatttatctttaacccccttgagctcttccaaccttgacattcccaggaggagccccgcttcaccccttctcactctggaaaccgcacctttaactttgcagaccttccttcacccctgacttctgcttcacctttgacctctgccccccatgaatcccattttacctctagacctataagttctggtttatgtttgacccctccctctgagcttgcacttcaccgctgaccttgcctcacctttaaccccccacctgagccccagctcctacctctgaccccaacttctctttgatctctgaatcccctctgactccaacttctctttcaccctctatgagtcccattttacttctacacctgcaagtcctggtttatattggacccctccctccgagctgcagttcacctttgaccttgcctcacctttcaccccccaccccccacagcgtcagctcctacctctgaccccagcttctctctggttcccacaggccccatgcatcctccctgcctcactcccctcagcccctgccgaccttagcttatctgggagagaaacaaggcctggtgcctgtgaggaagagaggtcacccctaccctccctccccgcttccctgcctcaccctcaataaataaattaattgttgtcatggaagacaagagagaaccctcagagggatacatctaacagcggccgaccaaaaaaaaacaaacaaaaaacaacaacagacaccccagaaacccagaacaaaacaaccacaacacaaacaaggcgaccgaaaacacgcacaagcaacccgacaaagaca

SEQ ID NO: 317659 - DNA, 2395 bp, Homo sapiens
cagtgtgctgtggcgatctagaggtcccctcggtctaccttccaagggtcctactgaatatgagacagttcaagaatactagggaaaaaaattctagtaattgaagtaacggtcatctaaggataatatgccacatatacagacacagtaatattttcaacttaaaaaaaattcagttgtcaaagctgtacagcaaacactatcctaagctgggcctcttcaggcattggctttataatcacttcaaagaaaagtcaattacaaaatgccacatttggtatgattctatttatatgaaatgtccaggataggcaaatctacagagacagaaattagatcagaggtcgccaggatcaacgtgtactacaacgaggccacaggaggaaattatgtccccagagcggtgctggtggacctggaacccggcaccatggactctgtccgttctggccccttcggtcagatctttcggccggacaacttcgtgtttggccaatccggagccggcaacaactgggcaaaggggcactacacggagggcgcagagctggtggacgctgtcctggacgtagtccggaaggaggccgagagctgcgactgccttcagggcttccagctgacccactcgctggggggtggcacggggtccggaatgggcacgctgctcatcagtaagatccgcgaggagttcccagaccgcatcatgaacaccttcagcgtggtgccctcgcccaaagtgtcagacacggtggtggagccctacaacgccacgctgtctgtgcaccagctggtggagaatacggatgagacctactgcatcgacaacgaggcactctacgacatctgtttccgcaccctcaagctgaccacccccacctacggggacctcaaccacctggtgtcggccaccatgagcggggtcaccacctgcctgcgcttcccgggccagctgaacgccgacctgcgcaagctggccgtcaacatggtcccctttcctcgcctgcacttcttcatgcccggcttcgcacccctgaccagccggggcagccagcagtaccgggccctgacggtgcccgagctcacccagcagatgttcgatgccaagaacatgatggcggcgtgcgacccgcgccacggccgctacctgaccgtggccgccgtgttccggggccgcatgtccatgaaggaggtggacgagcagatgctgagcgtgcagagcaagaacagcagctacttcgtggagtggatccccaacaacgtgaagacggccgtgtgcgacatcccgccccgcggcctgaagatggccgcgaccttcatcggcaacagcacggccatccaggagctgttcaagcgcatctccgagcagttcacggccatgttccggcgcaaggccttcttgcactggtacacgggcgagggcatggacgagatggagttcaccgaggccgagagcaacatgaatgacctggtatctgagtaccagcagtaccaggacgccacggccgaggagggcgagttcgaggaggaggcggaggaggaggtggcctaggctgctcccatcgcttcccacctgtcccctcgaggcttctgacctttgatccgctaggccccccatctctgaaccctagagccccgctttccctccaaggctgactcccccctgaccctaacaatacctttggagctcgctttacctctggctacttcatctccgaccctggctcccctttgagccctaatttatctttaacccccttgagctcttccaaccttgacattcccaggaggagccccgcttcaccccttctcactctggaaaccgcacctttaactttgcagaccttccttcacccctgacttctgcttcacctttgacctctgccccccatgaatcccattttacctctagacctataagttctggtttatgtttgacccctccctctgagcttgcacttcaccgctgaccttgcctcacctttaaccccccacctgagccccagctcctacctctgaccccaacttctctttgatctctgaatcccctctgactccaacttctctttcaccctctatgagtcccattttacttctacacctgcaagtcctggtttatattggacccctccctccgagctgcagttcacctttgaccttgcctcacctttcaccccccaccccccacagcgtcagctcctacctctgaccccagcttctctctggttcccacaggccccatgcatcctccctgcctcactcccctcagcccctgccgaccttagcttatctgggagagaaacaaggcctggtgcctgtgaggaagagaggtcacccctaccctccctccccgcttccctgcctcaccctcaataaataaattaattgttgtcatgga

SEQ ID NO: 317660 - DNA, 2152 bp, Homo sapiens
atatagcggctcccgggggcgcagggaccgtgctccgccgtctccgccgcatcttccaccctcgccgccgccgcagctccccgcgctcgtgccaccgccgccgcgtccaccctcagcgccaccgccatgcgggagatcgtgcacctgcaggccggccagtgcggcaaccagatcggggccaagttttgggaggttatcagtgacgaacatggcatcgaccccacaggcacataccatggggacagtgacctgcaactggagaggatcaacgtgtactacaacgaggccacaggaggaaattatgtccccagagcggtgctggtggacctggaacccggcaccatggactctgtccgttctggccccttcggtcagatctttcggccggacaacttcgtgtttggccaatccggagccggcaacaactgggcaaaggggcactacacggagggcgcagagctggtggacgctgtcctggacgtagtccggaaggaggccgagagctgcgactgccttcagggcttccagctgacccactcgctggggggtggcacggggtccggaatgggcacgctgctcatcagtaagatccgcgaggagttcccagaccgcatcatgaacaccttcagcgtggtgccctcgcccaaagtgtcagacacggtggtggagccctacaacgccacgctgtctgtgcaccagctggtggagaatacggatgagacctactgcatcgacaacgaggcactctacgacatctgtttccgcaccctcaagctgaccacccccacctacggggacctcaaccacctggtgtcggccaccatgagcggggtcaccacctgcctgcgcttcccgggccagctgaacgccgacctgcgcaagctggccgtcaacatggtcccctttcctcgcctgcacttcttcatgcccggcttcgcacccctgaccagccggggcagccagcagtaccgggccctgacggtgcccgagctcacccagcagatgttcgatgccaagaacatgatggcggcgtgcgacccgcgccacggccgctacctgaccgtggccgccgtgttccggggccgcatgtccatgaaggaggtggacgagcagatgctgagcgtgcagagcaagaacagcagctacttcgtggagtggatccccaacaacgtgaagacggccgtgtgcgacatcccgccccgcggcctgaagatggccgcgaccttcatcggcaacagcacggccatccaggagctgttcaagcgcatctccgagcagttcacggccatgttccggcgcaaggccttcttgcactggtacacgggcgagggcatggacgagatggagttcaccgaggccgagagcaacatgaatgacctggtatctgagtaccagcagtaccaggacgccacggccgaggagggcgagttcgaggaggaggcggaggaggaggtggcctaggctgctcccatcgcttcccacctgtcccctcgaggcttctgacctttgatccgctaggccccccatctctgaaccctagagccccgctttccctccaaggctgactcccccctgaccctaacaatacctttggagaccttccttcacccctgacttctgcttcacctttgacctctgccccccatgaatcccattttacctctagacctataagttctggtttatgtttgacccctccctctgagcttgcacttcaccgctgaccttgcctcacctttaaccccccacctgagccccagctcctacctctgaccccaacttctctttgatctctgaatcccctctgactccaacttctctttcaccctctatgagtcccattttacttctacacctgcaagtcctggtttatattggacccctccctccgagctgcagttcacctttgaccttgcctcacctttcaccccccaccccccacagcgtcagctcctacctctgaccccagcttctctctggttcccacaggccccatgcatcctccctgcctcactcccctcagcccctgccgaccttagcttatctgggagagaaacaaggcctggtgcctgtgaggaagagaggtcacccctaccctccctccccgcttccctgcctcaccctcaataaataaattaattgttgtcatgga

SEQ ID NO: 317661 - DNA, 1972 bp, Homo sapiens
cctcatggctgactctagaggatacacagccttaccgtcgggaacgaaagctgagggtgttgagccaaatagttctaagcttcagctaaacttatttagactacgaccttatgtggctgcagagctggtggacgctgtcctggacgtagtccggaaggaggccgagagctgcgactgccttcagggcttccagctgacccactcgctggggggtggcacggggtccggaatgggcacgctgctcatcagtaagatccgcgaggagttcccagaccgcatcatgaacaccttcagcgtggtgccctcgcccaaagtgtcagacacggtggtggagccctacaacgccacgctgtctgtgcaccagctggtggagaatacggatgagacctactgcatcgacaacgaggcactctacgacatctgtttccgcaccctcaagctgaccacccccacctacggggacctcaaccacctggtgtcggccaccatgagcggggtcaccacctgcctgcgcttcccgggccagctgaacgccgacctgcgcaagctggccgtcaacatggtcccctttcctcgcctgcacttcttcatgcccggcttcgcacccctgaccagccggggcagccagcagtaccgggccctgacggtgcccgagctcacccagcagatgttcgatgccaagaacatgatggcggcgtgcgacccgcgccacggccgctacctgaccgtggccgccgtgttccggggccgcatgtccatgaaggaggtggacgagcagatgctgagcgtgcagagcaagaacagcagctacttcgtggagtggatccccaacaacgtgaagacggccgtgtgcgacatcccgccccgcggcctgaagatggccgcgaccttcatcggcaacagcacggccatccaggagctgttcaagcgcatctccgagcagttcacggccatgttccggcgcaaggccttcttgcactggtacacgggcgagggcatggacgagatggagttcaccgaggccgagagcaacatgaatgacctggtatctgagtaccagcagtaccaggacgccacggccgaggagggcgagttcgaggaggaggcggaggaggaggtggcctaggctgctcccatcgcttcccacctgtcccctcgaggcttctgacctttgatccgctaggccccccatctctgaaccctagagccccgctttccctccaaggctgactcccccctgaccctaacaatacctttggagctcgctttacctctggctacttcatctccgaccctggctcccctttgagccctaatttatctttaacccccttgagctcttccaaccttgacattcccaggaggagccccgcttcaccccttctcactctggaaaccgcacctttaactttgcagaccttccttcacccctgacttctgcttcacctttgacctctgccccccatgaatcccattttacctctagacctataagttctggtttatgtttgacccctccctctgagcttgcacttcaccgctgaccttgcctcacctttaaccccccacctgagccccagctcctacctctgaccccaacttctctttgatctctgaatcccctctgactccaacttctctttcaccctctatgagtcccattttacttctacacctgcaagtcctggtttatattggacccctccctccgagctgcagttcacctttgaccttgcctcacctttcaccccccaccccccacagcgtcagctcctacctctgaccccagcttctctctggttcccacaggccccatgcatcctccctgcctcactcccctcagcccctgccgaccttagcttatctgggagagaaacaaggcctggtgcctgtgaggaagagaggtcacccctaccctccctccccgcttccctgcctcaccctcaataaataaattaattgttgtcatgga

SEQ ID NO: 317662 - DNA, 2230 bp, Homo sapiens
atatagcggctcccgggggcgcagggaccgtgctccgccgtctccgccgcatcttccaccctcgccgccgccgcagctccccgcgctcgtgccaccgccgccgcgtccaccctcagcgccaccgccatgcgggagatcgtgcacctgcaggccggccagtgcggcaaccagatcggggccaagttttgggaggttatcagtgacgaacatggcatcgaccccacaggcacataccatggggacagtgacctgcaactggagaggatcaacgtgtactacaacgaggccacaggaggaaattatgtccccagagcggtgctggtggacctggaacccggcaccatggactctgtccgttctggccccttcggtcagatctttcggccggacaacttcgtgtttggccaatccggagccggcaacaactgggcaaaggggcactacacggagggcgcagagctggtggacgctgtcctggacgtagtccggaaggaggccgagagctgcgactgccttcagggcttccagctgacccactcgctggggggtggcacggggtccggaatgggcacgctgctcatcagtaagatccgcgaggagttcccagaccgcatcatgaacaccttcagcgtggtgccctcgcccaaagtgtcagacacggtggtggagccctacaacgccacgctgtctgtgcaccagctggtggagaatacggatgagacctactgcatcgacaacgaggcactctacgacatctgtttccgcaccctcaagctgaccacccccacctacggggacctcaaccacctggtgtcggccaccatgagcggggtcaccacctgcctgcgcttcccgggccagctgaacgccgacctgcgcaagctggccgtcaacatggtcccctttcctcgcctgcacttcttcatgcccggcttcgcacccctgaccagccggggcagccagcagtaccgggccctgacggtgcccgagctcacccagcagatgttcgatgccaagaacatgatggcggcgtgcgacccgcgccacggccgctacctgaccgtggccgccgtgttccggggccgcatgtccatgaaggaggtggacgagcagatgctgagcgtgcagagcaagaacagcagctacttcgtggagtggatccccaacaacgtgaagacggccgtgtgcgacatcccgccccgcggcctgaagatggccgcgaccttcatcggcaacagcacggccatccaggagctgttcaagcgcatctccgagcagttcacggccatgttccggcgcaaggccttcttgcactggtacacgggcgagggcatggacgagatggagttcaccgaggccgagagcaacatgaatgacctggtatctgagtaccagcagtaccaggacgccacggccgaggagggcgagttcgaggaggaggcggaggaggaggtggcctaggctgctcccatcgcttcccacctgtcccctcgaggcttctgacctttgatccgctaggccccccatctctgaaccctagagccccgctttccctccaaggctgactcccccctgaccctaacaatacctttggagctcgctttacctctggctacttcatctccgaccctggctcccctttgagccctaatttatctttaacccccttgagctcttccaaccttgacattcccaggaggagccccgcttcaccccttctcactctggaaaccgcacctttaactttgcagaccttccttcacccctgacttctgcttcacctttgacctctgccccccatgaatcccattttacctctagacctataagttctggtttatgtttgacccctccctctgagcttgcacttcaccgctgaccttgcctcacctttaaccccccacctgagccccagctcctacctctgaccccaacttctctttgatctctgaatcccctctgactccaacttctctttcaccctttgaccttgcctcacctttcaccccccaccccccacagcgtcagctcctacctctgaccccagcttctctctggttcccacaggccccatgcatcctccctgcctcactcccctcagcccctgccgaccttagcttatctgggagagaaacaaggcctggtgcctgtgaggaagagaggtcacccctaccctccctccccgcttccctgcctcaccctcaataaataaattaattgttgtcatgga

SEQ ID NO: 317663 - DNA, 1515 bp, Homo sapiens
  misc_feature (50)..(50): n is a, c, g, or t
catccccgtgtcttgtcttgtgaatggatttgtccacatccagctccgtnccagcgcttcccgggccagctgaacgccgacctgcgcaagctggccgtcaacatggtcccctttcctcgcctgcacttcttcatgcccggcttcgcacccctgaccagccggggcagccagcagtaccgggccctgacggtgcccgagctcacccagcagatgttcgatgccaagaacatgatggcggcgtgcgacccgcgccacggccgctacctgaccgtggccgccgtgttccggggccgcatgtccatgaaggaggtggacgagcagatgctgagcgtgcagagcaagaacagcagctacttcgtggagtggatccccaacaacgtgaagacggccgtgtgcgacatcccgccccgcggcctgaagatggccgcgaccttcatcggcaacagcacggccatccaggagctgttcaagcgcatctccgagcagttcacggccatgttccggcgcaaggccttcttgcactggtacacgggcgagggcatggacgagatggagttcaccgaggccgagagcaacatgaatgacctggtatctgagtaccagcagtaccaggacgccacggccgaggagggcgagttcgaggaggaggcggaggaggaggtggcctaggctgctcccatcgcttcccacctgtcccctcgaggcttctgacctttgatccgctaggccccccatctctgaaccctagagccccgctttccctccaaggctgactcccccctgaccctaacaatacctttggagctcgctttacctctggctacttcatctccgaccctggctcccctttgagccctaatttatctttaacccccttgagctcttccaaccttgacattcccaggaggagccccgcttcaccccttctcactctggaaaccgcacctttaactttgcagaccttccttcacccctgacttctgcttcacctttgacctctgccccccatgaatcccattttacctctagacctataagttctggtttatgtttgacccctccctctgagcttgcacttcaccgctgaccttgcctcacctttaaccccccacctgagccccagctcctacctctgaccccaacttctctttgatctctgaatcccctctgactccaacttctctttcaccctctatgagtcccattttacttctacacctgcaagtcctggtttatattggacccctccctccgagctgcagttcacctttgaccttgcctcacctttcaccccccaccccccacagcgtcagctcctacctctgaccccagcttctctctggttcccacaggccccatgcatcctccctgcctcactcccctcagcccctgccgaccttagcttatctgggagagaaacaaggcctggtgcctgtgaggaagagaggtcacccctaccctccctccccgcttccctgcctcaccctcaataaataaattaattgttgtcatgga

SEQ ID NO: 317664 - DNA, 1058 bp, Homo sapiens
atatagcggctcccgggggcgcagggaccgtgctccgccgtctccgccgcatcttccaccctcgccgccgccgcagctccccgcgctcgtgccaccgccgccgcgtccaccctcagcgccaccgccatgcgggagatcgtgcacctgcaggccggccagtgcggcaaccagatcggggccaagttttgggaggttatcagtgacgaacatggcatcgaccccacaggcacataccatggggacagtgacctgcaactggagaggatcaacccccccatctctgaaccctagagccccgctttccctccaaggctgactcccccctgaccctaacaatacctttggagctcgctttacctctggctacttcatctccgaccctggctcccctttgagccctaatttatctttaacccccttgagctcttccaaccttgacattcccaggaggagccccgcttcaccccttctcactctggaaaccgcacctttaactttgcagaccttccttcacccctgacttctgcttcacctttgacctctgccccccatgaatcccattttacctctagacctataagttctggtttatgtttgacccctccctctgagcttgcacttcaccgctgaccttgcctcacctttaaccccccacctgagccccagctcctacctctgaccccaacttctctttgatctctgaatcccctctgactccaacttctctttcaccctctatgagtcccattttacttctacacctgcaagtcctggtttatattggacccctccctccgagctgcagttcacctttgaccttgcctcacctttcaccccccaccccccacagcgtcagctcctacctctgaccccagcttctctctggttcccacaggccccatgcatcctccctgcctcactcccctcagcccctgccgaccttagcttatctgggagagaaacaaggcctggtgcctgtgaggaagagaggtcacccctaccctccctccccgcttccctgcctcaccctcaataaataaattaattgttgtcatgga

SEQ ID NO: 317665 - DNA, 768 bp, Homo sapiens
gagacggagtctcgctctgttgcccaggctgcagtgcagtggcacaatgtcggctcactgcaagttccgcctcctgggttcacgccattctcctgcctcagcctcccgagtagctaggactacaggcgcccgccaccactcccggctaattttttttgaggagccccgcttcaccccttctcactctggaaaccgcacctttaactttgcagaccttccttcacccctgacttctgcttcacctttgacctctgccccccatgaatcccattttacctctagacctataagttctggtttatgtttgacccctccctctgagcttgcacttcaccgctgaccttgcctcacctttaaccccccacctgagccccagctcctacctctgaccccaacttctctttgatctctgaatcccctctgactccaacttctctttcaccctctatgagtcccattttacttctacacctgcaagtcctggtttatattggacccctccctccgagctgcagttcacctttgaccttgcctcacctttcaccccccaccccccacagcgtcagctcctacctctgaccccagcttctctctggttcccacaggccccatgcatcctccctgcctcactcccctcagcccctgccgaccttagcttatctgggagagaaacaaggcctggtgcctgtgaggaagagaggtcacccctaccctccctccccgcttccctgcctcaccctcaataaataaattaattgttgtcatgga

SEQ ID NO: 317666 - DNA, 640 bp, Homo sapiens
ctcacccgacggggtgggggttggggtattcggttttcctcttccatttcttcactggaaggagatgagaggcgtgagataaaagagtcaaaagttccttgagaactggaacattccagaagagaagtgtctgatggtctgagagggtgcatgctttttaggggacccgcatctgtatttccagtttattctgaagagtccagccaaatagaaccactccccgtttcctgtccttcacaggcttccctgtcgctacacctctgtggtttcttctacccagaatatacctgtcacgactccaacttctctttcaccctctatgagtcccattttacttctacacctgcaagtcctggtttatattggacccctccctccgagctgcagttcacctttgaccttgcctcacctttcaccccccaccccccacagcgtcagctcctacctctgaccccagcttctctctggttcccacaggccccatgcatcctccctgcctcactcccctcagcccctgccgaccttagcttatctgggagagaaacaaggcctggtgcctgtgaggaagagaggtcacccctaccctccctccccgcttccctgcctcaccctcaataaataaattaattgttgtcatgga

SEQ ID NO: 317667 - DNA, 797 bp, Homo sapiens
atatagcggctcccgggggcgcagggaccgtgctccgccgtctccgccgcatcttccaccctcgccgccgccgcagctccccgcgctcgtgccaccgccgccgcgtccaccctcagcgccaccgccatgcgggagatcgtgcacctgcaggccggccagtgcggcaaccagatcggggccaagttttgggaggttatcagtgacgaacatggcatcgaccccacaggcacataccatggggacagtgacctgcaactggagaggatcaacccccccatctctgaaccctagagccccgctttccctccaaggctgactcccccctgaccctaacaatacctttggagctcgctttacctctggctacttcatctccgaccctggctcccctttgagccctaatttatctttaacccccttgagctcttccaaccttgacattcccaggaggagccccgcttcaccccttctcactctggaaaccgcacctttaactttgcagaccttccttcacccctgacttctgcttcacctttgacctctgccccccatgaatcccattttacctctagacctataagttctggtttatgtttgacccctccctctgagcttgcacttcaccgctgaccttgcctcacctttaaccccccacctgagccccagctcctacctctgaccccaacttctctttgatctctgaatcccctctcctttggactttcaaactttttttttttataaaccactttttattaagatcgcccaattttgtacctttggtaacaacctcgccc

SEQ ID NO: 317668 - DNA, 797 bp, Homo sapiens
agtatatatggtctcctgaaggacattgtctcaaccctgcaaggtgttgcgaccgagctggcactgtaactagatcttcaaaaggccattccgcctttctatcaagccagctgcttcggtatgatggagaacatggtaagccatgagcacgggcccattgctgtacttcacttgctgtgaaatgagtttattcatcaaaagcactgctgtgtggaaaaagtggtggtggataaggcattctggaagtccatagatgatagttttggcagagcattaaatgcagggaaagtaaatccaaatctagactgtctgttccagtaagaacaaagtgttgccctttcatgatggaaggagtccaatcaacctgccacaaggtggctggctgatcaccccagggaatgttgctgcagctcagtattggtgtctgctgctggcagattggcagattgggcactcagcagtggctgtactcagactggccttagtgagtggaagtccatgttgctgagcacctgaataccttccatccctgccaccatgtccacttttccagattcctatagaaatgaaattgtacagtaggtaattctttggggctttggtttttttttcactcagcataattattttgagattcatccatgttgtttttctgtgtatcatagttcctttttaaaattgctgagtagtattcaattgtatggatatactaaagtatatttgttcctcaattaaaggacatttgggtttccattttggcaattatgaataaagctgctataaacatttacatacag

SEQ ID NO: 317669 - DNA, 758 bp, Homo sapiens
agtatatatggtctcctgaaggacattgtctcaaccctgcaaggtgttgcgaccgagctggcactgtaactagatcttcaaaaggccattccgcctttctatcaagccagctgcttcggtatgatggagaacatggtaagccatgagcacgggcccattgctgtacttcacttgctgtgaaatgagtttattcatcaaaagcactgctgtgtggaaaaagtggtggtggataaggcattctggaagtccatagatgatagttttggcagagcattaaatgcagggaaagtaaatccaaatctagactgtctgttccagtaagaacaaagtgttgccctttcatgatggaaggagtccaatcaacctgccacaaggtggctggctgatcaccccagggaatgttgctgcagctcagtattggtgtctgctgctggcagattggcagattgggcactcagcagtggctgtactcagactggccttagtgagtggaagtccatgttgctgagcacctgaataccttccatccctgccaccatgtccacttttccagattcctatagaaatgaaattgtacagtaggtaattctttggggctttggtttttttttcactcagcataattattttgagattcatccatgttgtttttctgtgtatcatagttcctttttaaaattggtagttcaatgtgtgttagattggatgaatgaagaggtctatgcacattttgctgcggttgaaagttctaccacagg

SEQ ID NO: 317670 - DNA, 636 bp, Homo sapiens
  misc_feature (22)..(22): n is a, c, g, or t
  misc_feature (25)..(25): n is a, c, g, or t
actcacgcgtccggcatgcggnggntcagcagcccatccccacccgggtctgcaaggtcagtgaccttcatgaaggccacttctatgagttccgtgcccgggctgccaactgggcaggtgttggcgagctgtcggcacccagcagcctgtttgagtgcaaagagtggacaatgccccagccaggccccccgtacgatgtacgggcatccgaggtgcgggccacatccctggtgctgcagtgggaacccccactgtatatgggggctgggcctgtcacaggctatcacgtcagtttccaggaggaaggctctgagcagtggaagccggtcaccccaggccccatctctggcacccacctgagggtttccgacttgcagccaggaaagagttacgtgttccaggtacaggccatgaattcagctggtctggggcaaccgtccatgcccactgatcccgtgctcctggaggacaagccaggtgcccatgagatcgaggttggtgtggatgaagagggctttatctatttggcttttgaagcccctgaagcccccgactcctcagagtttcagtggtccaaagactacaagggcccactggacccccagagggtcaagatcgaggataaagttaacaagt

SEQ ID NO: 317671 - DNA, 2900 bp, Homo sapiens
atgacagcggctccggcgtctccgcagcagatcagggaccggctgctgcaggccatcgacccccagagcaacatccggaacatggtggcggtgctggaagtcatctccagcctggagaaataccctattaccaaagaggcacttgaggaaacacgacttgggaagctcatcaacgacgtccgcaagaaaaccaagaacgaggagctcgccaagcgggccaagaagctgctgcggagctggcagaagctcatcgagccggcacaccagcatgaggcggcgctgcgggggctggcgggggccaccggctctgccaacgggggcgcacacaactgccggccggaggtgggggcggctggcccacccaggagcatccatgacctgaagagccgcaatgacctccagaggctgcccgggcagcggctggacaggctgggcagccgcaagcgccggggtgaccagcgtgacctcggccacccagggccgccacccaaggtctccaaagctagccacgaccccctggtccccaactcatcccccctccccaccaacgggatcagtgggagtccagagagcttcgccagctccctggatggcagtgggcatgcaggcccagagggcagccgcctggagcgtgacgagaatgacaagcacagtggcaagatccccgtcaacgccgtgcgaccgcacaccagctccccgggcctgggcaagccccctggaccctgcttgcagccaaaggcttcggtgctgcagcagctggacagggtggacgagactccggggcctccccatcccaagggaccccctcgctgctctttcagtcctcggaactcacggcatgagggctcctttgcccggcagcagagcttgtatgcacccaagggctccgtgcccagcccctcaccgcggccccaggcactcgatgccacacaggtgccgtcaccgcttccactggcacagccgtccacaccccccgtacggcggctcgagctgctgcccagtgcggaaagcccagtgtgctggcttgagcagcctgagagccaccagcggctggcggggccgggctgcaaggcagggctgtccccagccgagcccctcctgtcccgggcaggcttttccccagactcctccaaggcggacagtgatgctgcctcctcagggggctcggacagtaaaaagaagaagaggtaccgacctcgagactatacggttaacttggacgggcaggtggctgaggcgggcgtcaagcctgtccggttaaaagagcggaagctcacctttgaccccatgacgagacagatcaaacctctgacccagaaagagccagtgcgggcagacagccctgtgcacatggagcagcagtccaggacagagctggacaagcaggaggccaaggccagcctccagagccccttcgaacagacgaactggaaggagctgtcacgcaacgagatcatccagtcctacctgagccggcagagcagcctgctctcatcatcgggcgcgcagaccccaggggctcaccacttcatgtctgagtacctgaagcaggaggagagcacccggcaaggggccaggcagctgcatgtgctggtgcctcaaagcccgcccacggacctccctggtctgacccgggaggtcacacaggacgatctcgacagaatccaggccagccagtggccgggggtgaacgggtgtcaggacacacagggtaactggtatgactggacgcagtgcatatcgctcgatccgcacggcgacgacgggcgcttgaacattctgccttatgtctgcttggactgaccggcctgtcagccacaaagtgcattcccatcttgcagaagccgggtgggcgggcaggcaggtgggcaggtggcggggcccagctgcctcctgcgctgggaactcggggagtccggcccaggcgggagggagggggcgggagtcacgcggtctctctgcgctcttccctcaaaactctttatgtgaaatgctgctaccagtttactaacaaaattgcgaagaaggaccgcgtggaaggaaggacggcaaagtgagttcagaactctatagcaaaccagctataaaaagcgttagtccctcacccccaaagaggtgcggacactttccagcacctgaaagctggggcctcagttgcaggcaggcacagaaaacctgtgggagaggtcacctttaacacagcaacagaagcacgcatctcatctctcttgcattttctgttctttaatttggccctgagtgtcttgagacagtgggccatgccactgcctctgtttgctccctacccagccactgtcaggccagtgttgtctgtcatgtgccagaagcttctcagctgtggtgagccactggcattgggcaggcgggccagctggccagccagtgtgacccacactccatgggcagccacctgtttatatctggtttcagttataacccagtttttaaagaaatgctgcaaaaatttaagttttctcatgtttattttaaacaattcctcttccatcagaccaccagacaaaaaaacctttcctttcttcctcccttttcttttttcccttcctgtacacatctagaaaacttcacctttctagagtccccccaaaacaacacaaaagttattgtgggtgctactggttttatgctgtactgtggggcgagggggaagacctgtctgtacgctggaaacactcataaccattcctttagattcgtttgccttatggttatttgtcataaacgcgatttgcaaaaacaaggagccttagtgaatgtacagtacctagacttctgtgttctcaggacgcagaagggagcaactttgctatttggtccagtaagtggacaccttgtgatataaatgtggaaataaaaaaaaa

SEQ ID NO: 317672 - DNA, 3369 bp, Homo sapiens
atcacggggttctctgccggtgggggggcggggggactgtgcccccacaagggacggcggcaatgactgcagattgggggagggggcgcttcggaggccagagatgccgctcaacttccgacagatcgggggacccgccccgaagacagagcgatcccgcccaaatgccagtggtgccgaggtggagaagccgccgcgtagacgcagatttgcaacctccggctttcccagctacggcgggcggcttctgccagaggcgctttgccgcctcacgttttcgcgatcggggtcgcgcgtggcggtgcagacccccgccctgccaccacacccattcccacaccctctgaggggcgggggggccgcggcgacacccccggactccgatgacccttctgcgcgcagaatcacaacgtggacgtctggttccctcgccctcacaaaaaactcggcagctgctcagcctgcgactcccgtcccccagtcacgcgccgggaaggctctcccagaggaaggattttcccgccgccctccccgccccgagatccggaacatggtggcggtgctggaagtcatctccagcctggagaaataccctattaccaaagaggcacttgaggaaacacgacttgggaagctcatcaacgacgtccgcaagaaaaccaagaacgaggagctcgccaagcgggccaagaagctgctgcggagctggcagaagctcatcgagccggcacaccagcatgaggcggcgctgcgggggctggcgggggccaccggctctgccaacgggggcgcacacaactgccggccggaggtgggggcggctggcccacccaggagcatccatgacctgaagagccgcaatgacctccagaggctgcccgggcagcggctggacaggctgggcagccgcaagcgccggggtgaccagcgtgacctcggccacccagggccgccacccaaggtctccaaagctagccacgaccccctggtccccaactcatcccccctccccaccaacgggatcagtgggagtccagagagcttcgccagctccctggatggcagtgggcatgcaggcccagagggcagccgcctggagcgtgacgagaatgacaagcacagtggcaagatccccgtcaacgccgtgcgaccgcacaccagctccccgggcctgggcaagccccctggaccctgcttgcagccaaaggcttcggtgctgcagcagctggacagggtggacgagactccggggcctccccatcccaagggaccccctcgctgctctttcagtcctcggaactcacggcatgagggctcctttgcccggcagcagagcttgtatgcacccaagggctccgtgcccagcccctcaccgcggccccaggcactcgatgccacacaggtgccgtcaccgcttccactggcacagccgtccacaccccccgtacggcggctcgagctgctgcccagtgcggaaagcccagtgtgctggcttgagcagcctgagagccaccagcggctggcggggccgggctgcaaggcagggctgtccccagccgagcccctcctgtcccgggcaggcttttccccagactcctccaaggcggacagtgatgctgcctcctcagggggctcggacagtaaaaagaagaagaggtaccgacctcgagactatacggttaacttggacgggcaggtggctgaggcgggcgtcaagcctgtccggttaaaagagcggaagctcacctttgaccccatgacgagacagatcaaacctctgacccagaaagagccagtgcgggcagacagccctgtgcacatggagcagcagtccaggacagagctggacaagcaggaggccaaggccagcctccagagccccttcgaacagacgaactggaaggagctgtcacgcaacgagatcatccagtcctacctgagccggcagagcagcctgctctcatcatcgggcgcgcagaccccaggggctcaccacttcatgtctgagtacctgaagcaggaggagagcacccggcaaggggccaggcagctgcatgtgctggtgcctcaaagcccgcccacggacctccctggtctgacccgggaggtcacacaggacgatctcgacagaatccaggccagccagtggccgggggtgaacgggtgtcaggacacacagggtaactggtatgactggacgcagtgcatatcgctcgatccgcacggcgacgacgggcgcttgaacattctgccttatgtctgcttggactgaccggcctgtcagccacaaagtgcattcccatcttgcagaagccgggtgggcgggcaggcaggtgggcaggtggcggggcccagctgcctcctgcgctgggaactcggggagtccggcccaggcgggagggagggggcgggagtcacgcggtctctctgcgctcttccctcaaaactctttatgtgaaatgctgctaccagtttactaacaaaattgcgaagaaggaccgcgtggaaggaaggacggcaaagtgagttcagaactctatagcaaaccagctataaaaagcgttagtccctcacccccaaagaggtgcggacactttccagcacctgaaagctggggcctcagttgcaggcaggcacagaaaacctgtgggagaggtcacctttaacacagcaacagaagcacgcatctcatctctcttgcattttctgttctttaatttggccctgagtgtcttgagacagtgggccatgccactgcctctgtttgctccctacccagccactgtcaggccagtgttgtctgtcatgtgccagaagcttctcagctgtggtgagccactggcattgggcaggcgggccagctggccagccagtgtgacccacactccatgggcagccacctgtttatatctggtttcagttataacccagtttttaaagaaatgctgcaaaaatttaagttttctcatgtttattttaaacaattcctcttccatcagaccaccagacaaaaaaacctttcctttcttcctcccttttcttttttcccttcctgtacacatctagaaaacttcacctttctagagtccccccaaaacaacacaaaagttattgtgggtgctactggttttatgctgtactgtggggcgagggggaagacctgtctgtacgctggaaacactcataaccattcctttagattcgtttgccttatggttatttgtcataaacgcgatttgcaaaaacaaggagccttagtgaatgtacagtacctagacttctgtgttctcaggacgcagaagggagcaactttgctatttggtccagtaagtggacaccttgtgatataaatgtggaaataaaaaaaaa

SEQ ID NO: 317673 - DNA, 2857 bp, Homo sapiens
atgacagcggctccggcgtctccgcagcagatcagggaccggctgctgcaggccatcgacccccagagcaacatccggaacatggtggcggtgctggaagtcatctccagcctggagaaataccctattaccaaagaggcacttgaggaaacacgacttgggaagctcatcaacgacgtccgcaagaaaaccaagaacgaggagctcgccaagcgggccaagaagctgctgcggagctggcagaagctcatcgagccggcacaccagcatgaggcggcgctgcgggggctggcgggggccaccggctctgccaacgggggcgcacacaactgccggccggaggtgggggcggctggcccacccaggagcatccatgacctgaagagccgcaatgacctccagaggctgcccgggcagcggctggacaggctgggcagccgcaagcgccggggtgaccagcgtgacctcggccacccagggccgccacccaaggtctccaaagctagccacgaccccctggtccccaactcatcccccctccccaccaacgggatcagtgggagtccagagagcttcgccagctccctggatggcagtgggcatgcaggcccagagggcagccgcctggagcgtgacgagaatgacaagcacagtggcaagatccccgtcaacgccgtgcgaccgcacaccagctccccgggcctgggcaagccccctggaccctgcttgcagccaaaggcttcggtgctgcagcagctggacagggtggacgagactccggggcctccccatcccaagggaccccctcgctgctctttcagtcctcggaactcacggcatgagggctcctttgcccggcagcagagcttgtatgcacccaagggctccgtgcccagcccctcaccgcggccccaggcactcgatgccacacaggtgccgtcaccgcttccactggcacagccgtccacaccccccgtacggcggctcgagctgctgcccagtgcggaaagcccagtgtgctggcttgagcagcctgagagccaccagcggctggcggggccgggctgcaaggcagggctgtccccagccgagcccctcctgtcccgggcaggcttttccccagactcctccaaggcggacagtgatgctgcctcctcagggggctcggacagtaaaaagaagaagaggtaccgacctcgagactatacggttaacttggacgggcaggtggctgaggcgggcgtcaagcctgtccggttaaaagagcggaagctcacctttgaccccatgacgagacagatcaaacctctgacccagaaagagccagtgcgggcagacagccctgtgcacatggagcagcagtccaggacagagctggacaagcaggaggccaaggccagcctccagagccccttcgaacagacgaactggaaggagctgtcacgcaacgagatcatccagtcctacctgagccggcagagcagcctgctctcatcatcgggcgcgcagaccccaggggctcaccacttcatgtctgagtacctgaagcaggaggagagcacccggcaaggggccaggcagctgcatgtgctggtgcctcaaagcccgcccacggacctccctggtctgacccgggaggtcacacaggacgatctcgacagaatccaggccagccagtggccgggggtgaacgggtgtcaggacacacagggtaactggtatgactggacgcagtgcatatcgctcgatccgcacggcgacgacgggcgcttgaacattctgccttatgtctgcttggactgaccggcctgtcagccacaaagtgcattcccatcttgcagaagccgggtgggcgggcaggcaggtgggcaggtggcggggcccagctgcctcctgcgctgggaactcggggagtccggcccaggcgggagggagggggcgggagtcacgcggtctctctgcgctcttccctcaaaactctttatgtgaaatgctgctaccagtttactaacaaaattgcgaagaaggaccgcgtggaaggaaggacggcaaagtgagttcagaactctatagcaaaccagctataaaaagcgttagtccctcacccccaaagaggtgcggacactttccagcacctgaaagctggggcctcagttgcaggcaggcacagaaaacctgtgggagaggtcacctttaacacagcaacagaagcacgcatctcatctctcttgcattttctgttctttaatttggccctgagtgtcttgagacagtgggccatgccactgcctctgtttgctccctacccagccactgtcaggccagtgttgtctgtcatgtgccagaagcttctcagctgtggtgagccactggcattgggcaggcgggccagctggccagccagtgtgacccacactccatgggcagccacctgtttatatctggtttcagttataacccagtttttaaagaaatgctgcaaaaatttaagttttctcatgtttattttaaacaattcctcccttttcttttttcccttcctgtacacatctagaaaacttcacctttctagagtccccccaaaacaacacaaaagttattgtgggtgctactggttttatgctgtactgtggggcgagggggaagacctgtctgtacgctggaaacactcataaccattcctttagattcgtttgccttatggttatttgtcataaacgcgatttgcaaaaacaaggagccttagtgaatgtacagtacctagacttctgtgttctcaggacgcagaagggagcaactttgctatttggtccagtaagtggacaccttgtgatataaatgtggaaataaaaaaaaa

SEQ ID NO: 317674 - DNA, 740 bp, Homo sapiens
caagcccttaataaatgctttgatgtaatgttccttttgttcacagtacagttatgtagtgctagccagatatttaaaaatgctctaagaaaagcttgtcaggggggagggggaaatgtttttcttgtgataaatgaactttggtttaccaagggtattttgcatgatgctgctgctattttaacttttcagttgttttttctcttactgtagagtgtagtcattgaaaagttaactgagtgatattgttatgtaagaatctgaaccttgcagtgtaaatgcacttaagtcatctttaaaatgttgttaaactactctgaatatactgtgcaatgtaaatgctgaatgattggggttagataaatggtgaaatgagaattaatgaattttatacagattcatgctttcgcctgataacctatgtacagatattttaagtacataaatcagatttgacacatttattttttgaaaagtacatatatgttctcaatgaagattcatcctaggtttcctctttgttcgtttcaatagtagcacatacaatccaaaagttcctgctactgctgcttttgcccttccattttaaatggtatgatcgtttggccaaaatttccatgcaagttgataagggttttacaataatctgaacaaataggaaaccttgaatctctatgtatgcacatgaatacttgattgtgaataataaaagttgttttttatacagcctcattggtgaa

SEQ ID NO: 317675 - DNA, 2536 bp, Homo sapiens
ccaccagtgccatcttcccgaaaacccccttcttgaagtatctcccccataccccttcggctcaaaaactcgtccaattcgcaggagtaatcagatttcattataacctattggcaccagatagttacgcaaaaattattttctggagcaaacagtatttgaagaaaaggtaaaaactatgaatgtgtaattctaagaatagttaataattttactgaaggctgaacgtatgtagatattttttatgataaaatgcagtttttctttttttggaacatgccaattactggtatgtgtatatgctggaaattttcttacatatcctttttaagtcaaagttattaacattatccagcatgctttaatatgctccacatatcaaagatataaccaataatttaacgtagcttaaaagataacatttgttttgtttttagctttgcatacatttgtaattccctcccaccaccaatataccttaggtaccatttgtgtacatttcaagattttttttttcaataaaaaggtggggggaaatggaatcactttgccaactattgttctaagagttgacatcagttaccatttctaatgcattgttgtgattttgtagtgtcattcataactggtattgacattttagaaaacaccaaagtgatttaaaatatatgtggggaaaaaaacttctcactctagtaacaatgttttaatcatgttgtttgttaaatatttaaaagttattgttcaatttttgctagactatcttaaatcatgatagtgttgggaagggggtatcaaaatataaaattgttagtttgtgtatataaacaatgcacattaaaacaattgaattgcttccagcatacaacaaactaccttaaaattatgttcaaaatctattaaatatattttcatggctaatgtcgagtatatgttttcatcaattacattgttattgtattaatcgcggttaaacttggcatctcttggcaggatcctatttaatttctgttgccatcaaaatatatttatatgcatgagttttgctataaacctttattttctgctataaagttatatattatgacaaccataaatgcaattacaaattgggtaagaacaagctgaataaaagttgttcccatgactaatattagtcttcatgcttttagcatattttttaagacagtaacactcatcccatcaaattattacattacatttagtatttttctgagttacattgacaagaacttaaattatagcctgttattaatattgatttccaacgactgaacagtacaacagatcaataaaaaagtttatacactgctttaactaatttttgttatactcatgtggcttagtgtagttagtcactaaaacagagttcaagtgagcttggcaatggtgttgagtaacaagaaagaattttgcattaatgatttctttttattttcctcatttaaacaaccagcattactgccaaacaccaaccgtggtccatatttgtaacaggtttttaacatgacatagttagcaagtttgattgaagagatttttaggtcctgggcctataagattttagtatgatcttttttcatgtttctaatgcttgaggtgttactgcttaacttgggaaaaaaaaaaacaaaaaacagtgttcctgccatttgtaagttttcctataatattccttttattaactttaaaactggacttatcgggttcaaataggcagtatcccttttaagtgacctttgcaacccaagtgttacttgcttatttgatgctctcttgtattttaaatctcatttaaatctttgtctgtgaccaacaaagcttaagattttgtcttcatttaaaactctgaatctattccattgatcatgttagacgttcaaatgtttaatggtatagtctgacctagtgaaacaaaatggatgttgttactttttttaaagaatagaatgaaataactatttcacttgcccaaaattttaaatattttttcatctaaacttgtattgtttcccatagcagaatgtcaatattcacagtacatttctgtaaagagcaaaccaatataatgttttgagtgttgaaaaaaattccagatttttgaagaattagacaactcttcatctaccttatttctagttcacacagttatctcaaattccactgaaactaatgggatactgtcttgtgtagatgccagttgagtttataatgtgacctagtaaagctgtcttttttgttgtgttgtatgagtgtcggatcatgcttttaggaatacttttattaaaatggtgtgcattcatgcaaaaggccaactggcttttgtgaacaatagatcttttctcccctttattttgttctcttgacacttttgtgaaaattacctagcctgataaaaacattttgtaaaaatttgtataatactgttataaaatatttataatcccagaaaatgttgtgttaaatcttgtgcaaaaacagtatattcagaataaaagtttatcatttaaagtca

SEQ ID NO: 317676 - DNA, 2477 bp, Homo sapiens
ccaccagtgccatcttcccgaaaacccccttcttgaagtatctcccccataccccttcggctcaaaaactcgtccaattcgcaggagtaatcagatttcattataacctattggcaccagatagttacgcaaaaattattttctggagcaaacagtatttgaagaaaaggtaaaaactatgaatgtgtaattctaagaatagttaataattttactgaaggctgaacgtatgtagatattttttatgataaaatgcagtttttctttttttggaacatgccaattactggtatgtgtatatgctggaaattttcttacatatcctttttaagtcaaagttattaacattatccagcatgctttaatatgctccacatatcaaagatataaccaataatttaacgtagcttaaaagataacatttgttttgtttttagctttgcatacatttgtaattcaataaaaaggtggggggaaatggaatcactttgccaactattgttctaagagttgacatcagttaccatttctaatgcattgttgtgattttgtagtgtcattcataactggtattgacattttagaaaacaccaaagtgatttaaaatatatgtggggaaaaaaacttctcactctagtaacaatgttttaatcatgttgtttgttaaatatttaaaagttattgttcaatttttgctagactatcttaaatcatgatagtgttgggaagggggtatcaaaatataaaattgttagtttgtgtatataaacaatgcacattaaaacaattgaattgcttccagcatacaacaaactaccttaaaattatgttcaaaatctattaaatatattttcatggctaatgtcgagtatatgttttcatcaattacattgttattgtattaatcgcggttaaacttggcatctcttggcaggatcctatttaatttctgttgccatcaaaatatatttatatgcatgagttttgctataaacctttattttctgctataaagttatatattatgacaaccataaatgcaattacaaattgggtaagaacaagctgaataaaagttgttcccatgactaatattagtcttcatgcttttagcatattttttaagacagtaacactcatcccatcaaattattacattacatttagtatttttctgagttacattgacaagaacttaaattatagcctgttattaatattgatttccaacgactgaacagtacaacagatcaataaaaaagtttatacactgctttaactaatttttgttatactcatgtggcttagtgtagttagtcactaaaacagagttcaagtgagcttggcaatggtgttgagtaacaagaaagaattttgcattaatgatttctttttattttcctcatttaaacaaccagcattactgccaaacaccaaccgtggtccatatttgtaacaggtttttaacatgacatagttagcaagtttgattgaagagatttttaggtcctgggcctataagattttagtatgatcttttttcatgtttctaatgcttgaggtgttactgcttaacttgggaaaaaaaaaaacaaaaaacagtgttcctgccatttgtaagttttcctataatattccttttattaactttaaaactggacttatcgggttcaaataggcagtatcccttttaagtgacctttgcaacccaagtgttacttgcttatttgatgctctcttgtattttaaatctcatttaaatctttgtctgtgaccaacaaagcttaagattttgtcttcatttaaaactctgaatctattccattgatcatgttagacgttcaaatgtttaatggtatagtctgacctagtgaaacaaaatggatgttgttactttttttaaagaatagaatgaaataactatttcacttgcccaaaattttaaatattttttcatctaaacttgtattgtttcccatagcagaatgtcaatattcacagtacatttctgtaaagagcaaaccaatataatgttttgagtgttgaaaaaaattccagatttttgaagaattagacaactcttcatctaccttatttctagttcacacagttatctcaaattccactgaaactaatgggatactgtcttgtgtagatgccagttgagtttataatgtgacctagtaaagctgtcttttttgttgtgttgtatgagtgtcggatcatgcttttaggaatacttttattaaaatggtgtgcattcatgcaaaaggccaactggcttttgtgaacaatagatcttttctcccctttattttgttctcttgacacttttgtgaaaattacctagcctgataaaaacattttgtaaaaatttgtataatactgttataaaatatttataatcccagaaaatgttgtgttaaatcttgtgcaaaaacagtatattcagaataaaagtttatcatttaaagtca

SEQ ID NO: 317677 - DNA, 1340 bp, Homo sapiens
gctggaagattatatctggatcaccaccagagcaagccctttctgaagcttcattccaagacccatgtgtagagatgccccctggggattcagaccacgggaccagtgaccttgagaagagcttcaatctgagaccagtcctctctccgcaacagagagtgcccgtggaagcgagacctcgcaaatgtgagacacacaccgagagcttcaagaactcggaaatcctgaaacctcacagagcaaaaccatatgcatgtaatgaatgtggcaaagccttcagttactgttcttccctttctcagcatcagaagagccacactggagagaagccctatgagtgcagtgaatgtgggaaggccttcagccagagctcatctctcattcagcaccagaggattcacactggagagaagccttacaagtgcagtgaatgtggaagagccttcagccagaacgccaacctcaccaaacaccagcgaacccacaccggagagaagccctacagatgcagcgagtgtgagaaagccttcagtgactgctcagctcttgttcagcatcagagaattcataccggagagaagccctacgaatgcagcgactgtgggaaggccttccgtcacagtgcaaacctcacgaaccatcagaggactcacaccggggagaagccctacaagtgcagcgagtgtgggaaggccttcagttactgcgcagcgttcattcagcaccagaggattcacaccggggagaagccctacagatgtgccgcgtgtgggaaggccttcagccagagtgcaaaccatcagaggactcacactggggagaaaccctacaagtgcagcgagtgtgggaaggccttcagccagagtaccaatctcataatccaccaaaagacccacaccggggagaagccatataaatgtaatgaatgtgggaaattcttcagtgagagctcagccctcattcggcatcatataatccacaccggagaaaaaccttatgagtgtaatgagtgtggtaaagcgtttaaccagagctcatcccttagtcagcatcagagaatccacacaggcgtgaaaccctacgaatgcagcgagtgtgggaaggccttccggtgcagctctgccttcgttagacatcagagactccacgccggagagtaactaggaacatggtagaagtggagagagtcccggacatgccgactcaggacaggtgggtgaggatctgagaaatgctaaaggcttgaaagcatctgaagacatctaacttagagtctgcagcccagagccacatgcaaaacaccttcaataaacagccactatttcacatgctgtaatgga

SEQ ID NO: 317678 - DNA, 1286 bp, Homo sapiens
gctggaagattatatctggatcaccaccagagcaagccctttctgaagcttcattccaagacccatgtgtagagatgccccctggggattcagaccacgggaccagtgaccttgagaagagcttcaatctgagaccagtcctctctccgcaacagagagtgcccgtggaagcgagacctcgcaaatgtgagacacacaccgagagcttcaagaactcggaaatcctgaaacctcacagagcaaaaccatatgcatgtaatgaatgtggcaaagccttcagttactgttcttccctttctcagcatcagaagagccacactggagagaagccctatgagtgcagtgaatgtgggaaggccttcagccagagctcatctctcattcagcaccagaggattcacactggagagaagccttacaagtgcagtgaatgtggaagagccttcagccagaacgccaacctcaccaaacaccagcgaacccacaccggagagaagccctacagatgcagcgagtgtgagaaagccttcagtgactgctcagctcttgttcagcatcagagaattcataccggagagaagccctacgaatgcagcgactgtgggaaggccttccgtcacagtgcaaacctcacgaaccatcagaggactcacaccggggagaagccctacaagtgcagcgagtgtgggaaggccttcagttactgcgcagcgttcattcagcaccagaggattcacaccggggagaagccctacagatgtgccgcgtgtgggaaggccttcagccagagtgcaaaccatcagaggactcacactggggagaaaccctacaagtgcagcgagtgtgggaaggccttcagccagagtaccaatctcataatccaccaaaagacccacaccggggagaagccatataaatgtaatgaatgtgggaaattcttcagtgagagctcagccctcattcggcatcatataatccacaccggagatagtcagcatcagagaatccacacaggcgtgaaaccctacgaatgcagcgagtgtgggaaggccttccggtgcagctctgccttcgttagacatcagagactccacgccggagagtaactaggaacatggtagaagtggagagagtcccggacatgccgactcaggacaggtgggtgaggatctgagaaatgctaaaggcttgaaagcatctgaagacatctaacttagagtctgcagcccagagccacatgcaaaacaccttcaataaacagccactatttcacatgctgtaatgga

SEQ ID NO: 317679 - DNA, 795 bp, Homo sapiens
agcggaagtgggggaggaggaggaggagttggaaggggaggaggaagagggggagcaggaagaggggcagaaggaagaagaagagggggaggagaaagagatagaagaagagtcccacgaactggctgggtatacagaaatgtccagaggccggagagcgtttcagatcacatgtaccggatggcagttatggctatggtgatcaaagatgaccgtcttaacaaagaccggaagctatgaagcagataacccagctcctaccagaggacctcagaaaggagctctatgaactttgggaagagtacgagacccaatctagtgcagaagccaaatttgtgaagcagctagaccaatgtgaaatgattcttcaagcatctgaatatgaagaccttgaacacaaacctgggagactgcaagacttctatgattccacagcaggaaaattcaatcaccctgagatagtccagcttgtttctgaacttgaggcagaaagaagcactaacatagctgcagctgccagtgagccacactcctgagacactctctaaattgctgcactcctgtaacaaacattatttttccatttcattgtattgtgttttgccattgttggtctgttgatttccctagatgtgagtctgtttgttttcaattgtctgaacttcagcaagaaatgtgatacaacttgggcactaaaagaagccacagaacaggaagcggtcatgaaagtgccatggatgaacactggaggtggcagtgcctgtttatgaactaaataaataaatattaaacacc

SEQ ID NO: 317680 - DNA, 1741 bp, Homo sapiens
  misc_feature (1673)..(1673): n is a, c, g, or t
  misc_feature (1741)..(1741): n is a, c, g, or t
agcggaagtgggggaggaggaggaggagttggaaggggaggaggaagagggggagcaggaagaggggcagaaggaagaagaagagggggaggagaaagagatagaagagtaagaggagggggaagaaagacaaggggaaggggaggaggaggaggacggggaggagcttcgccgcggcctgctccgcccagccggggtcggtggccgcatggcttcggtctcctctgcgaccttctcgggccacggggctcggtccctactgcagttcctgcggctggtagggcagctcaagagagtcccacgaactggctgggtatacagaaatgtccagaggccggagagcgtttcagatcacatgtaccggatggcagttatggctatggtgatcaaagatgaccgtcttaacaaagaccgatgtgtacgcctagccctggttcatgatatggcagaatgcatcgttggggacatagcaccagcagataacatccccaaagaagaaaaacataggcgagaagaggaagctatgaagcagataacccagctcctaccagaggacctcagaaaggagctctatgaactttgggaagagtacgagacccaatctagtgcagaagccaaatttgtgaagcagctagaccaatgtgaaatgattcttcaagcatctgaatatgaagaccttgaacacaaacctgggagactgcaagacttctatgattccacagcaggaaaattcaatcaccctgagatagtccagcttgtttctgaacttgaggcagaaagaagcactaacatagctgcagctgccagtgagccacactcctgagacactctctaaattgctgcactcctgtaacaaacattatttttccatttcattgtattgtgttttgccattgttggtctgttgatttccctagatgtgagtctgtttgttttcaattgtctgaacttcagcaagaaatgtgatacaacttgggcactaaaagaagccacagaacaggaagcggtcatgaaagtgccatggatgaacactggaggtggcagtgcctgtttatgaactaaataaataaatattaaacacctaaaatattagaatatttattggagatttaaaatcatcttattctgacttaattaccgatatccccgaaggctaggttcattgaataatagaaaatttcattatgattgcttttaagaacagattcttcagctgatttagtgataagaatccagaaaagaaaatgtactagtgatgtattctctccccagatgaaattgctgccttattcagatttactctcttgagccagattttgaatttcactgcagactgcttcagacttctaatcataggcttgtaaacctactaataggctctgcccctcttcccaatactttttgtcatttagagatataaaccggggcatataaaaatgcaacttgtattcctttgtatatttttccctgtctgacttataaatcttgagacctttattgtaaaagcatttatcatcaggtgagaaatataaataggaactggggtcattgagcctcaggtagggaatatatcaacccgatttcttcctctcttttcccttttataggataaataatccaccctgtctgcctttacattgaatagtgcaaaaaagaatacgatttctgcaaantaaaattaaaaaaaaaaaatgcttttgcttgcggccgaatttcggcctacttggccattcgccttatn

SEQ ID NO: 317681 - DNA, 1551 bp, Homo sapiens
  misc_feature (1483)..(1483): n is a, c, g, or t
  misc_feature (1551)..(1551): n is a, c, g, or t
tgcggccgcgcgttgccgacggtggacggaggaagcagccggcgggacaggctggccagctggggcggcccggagtctgagcctagagcctggcgccgcgagagagtcccacgaactggctgggtatacagaaatgtccagaggccggagagcgtttcagatcacatgtaccggatggcagttatggctatggtgatcaaagatgaccgtcttaacaaagaccgatgtgtacgcctagccctggttcatgatatggcagaatgcatcgttggggacatagcaccagcagataacatccccaaagaagaaaaacataggcgagaagaggaagctatgaagcagataacccagctcctaccagaggacctcagaaaggagctctatgaactttgggaagagtacgagacccaatctagtgcagaagccaaatttgtgaagcagctagaccaatgtgaaatgattcttcaagcatctgaatatgaagaccttgaacacaaacctgggagactgcaagacttctatgattccacagcaggaaaattcaatcaccctgagatagtccagcttgtttctgaacttgaggcagaaagaagcactaacatagctgcagctgccagtgagccacactcctgagacactctctaaattgctgcactcctgtaacaaacattatttttccatttcattgtattgtgttttgccattgttggtctgttgatttccctagatgtgagtctgtttgttttcaattgtctgaacttcagcaagaaatgtgatacaacttgggcactaaaagaagccacagaacaggaagcggtcatgaaagtgccatggatgaacactggaggtggcagtgcctgtttatgaactaaataaataaatattaaacacctaaaatattagaatatttattggagatttaaaatcatcttattctgacttaattaccgatatccccgaaggctaggttcattgaataatagaaaatttcattatgattgcttttaagaacagattcttcagctgatttagtgataagaatccagaaaagaaaatgtactagtgatgtattctctccccagatgaaattgctgccttattcagatttactctcttgagccagattttgaatttcactgcagactgcttcagacttctaatcataggcttgtaaacctactaataggctctgcccctcttcccaatactttttgtcatttagagatataaaccggggcatataaaaatgcaacttgtattcctttgtatatttttccctgtctgacttataaatcttgagacctttattgtaaaagcatttatcatcaggtgagaaatataaataggaactggggtcattgagcctcaggtagggaatatatcaacccgatttcttcctctcttttcccttttataggataaataatccaccctgtctgcctttacattgaatagtgcaaaaaagaatacgatttctgcaaantaaaattaaaaaaaaaaaatgcttttgcttgcggccgaatttcggcctacttggccattcgccttatn

SEQ ID NO: 317682 - DNA, 1082 bp, Homo sapiens
agcggaagtgggggaggaggaggaggagttggaaggggaggaggaagagggggagcaggaagaggggcagaaggaagaagaagagggggaggagaaagagatagaagagtaagaggagggggaagaaagacaaggggaaggggaggaggaggaggacggggaggagcttcgccgcggcctgctccgcccagccggggtcggtggccgcatggcttcggtctcctctgcgaccttctcgggccacggggctcggtccctactgcagttcctgcggctggtagggcagctcaagagagtcccacgaactggctgggtatacagaaatgtccagaggccggagagcgtttcagatcacatgtaccggatggcagttatggctatggtgatcaaagatgaccgtcttaacaaagaccgatgtgtacgcctagccctggttcatgatatggcagaatgcatcgttggggacatagcaccagcagataacatccccaaagaagaaaaacataggcgagaagaggaagctatgaagcagataacccagctcctaccagaggacctcagaaaggagctctatgaactttgggaagagtacgagacccaatctagtgcagaagccaaatttgtgaagcagctagaccaatgtgaaatgattcttcaagcatctgaatatgaagaccttgaacacaaacctgggagactgcaagacttctatgattccacagcaggaaaattcaatcaccctgagatagtccagcttgtttctgaacttgaggcagaaagaagcactaacatagctgcagctgccagtgagccacactcctgagacactctctaaattgctgcactcctgtaacaaacattatttttccatttcattgtattgtgttttgccattgttggtctgttgatttccctagatgtgagtctgtttgttttcaattgtctgaacttcagcaagaaatgtgatacaacttgggcactaaaagaagccacagaacaggaagcggtcatgaaagtgccatggatgaacactggaggtggcagtgcctgtttatgaactaaataaataaatattaaacacc

SEQ ID NO: 317683 - DNA, 1476 bp, Homo sapiens
  misc_feature (1408)..(1408): n is a, c, g, or t
  misc_feature (1476)..(1476): n is a, c, g, or t
ctcacaagaccctggcagaagcaggaagcggttgtgttgtgccaatggtggagaagaaaacttcggttcgctcccaggacccaggcagaagcaggacggatggcagttatggctatggtgatcaaagatgaccgtcttaacaaagaccgatgtgtacgcctagccctggttcatgatatggcagaatgcatcgttggggacatagcaccagcagataacatccccaaagaagaaaaacataggcgagaagaggaagctatgaagcagataacccagctcctaccagaggacctcagaaaggagctctatgaactttgggaagagtacgagacccaatctagtgcagaagccaaatttgtgaagcagctagaccaatgtgaaatgattcttcaagcatctgaatatgaagaccttgaacacaaacctgggagactgcaagacttctatgattccacagcaggaaaattcaatcaccctgagatagtccagcttgtttctgaacttgaggcagaaagaagcactaacatagctgcagctgccagtgagccacactcctgagacactctctaaattgctgcactcctgtaacaaacattatttttccatttcattgtattgtgttttgccattgttggtctgttgatttccctagatgtgagtctgtttgttttcaattgtctgaacttcagcaagaaatgtgatacaacttgggcactaaaagaagccacagaacaggaagcggtcatgaaagtgccatggatgaacactggaggtggcagtgcctgtttatgaactaaataaataaatattaaacacctaaaatattagaatatttattggagatttaaaatcatcttattctgacttaattaccgatatccccgaaggctaggttcattgaataatagaaaatttcattatgattgcttttaagaacagattcttcagctgatttagtgataagaatccagaaaagaaaatgtactagtgatgtattctctccccagatgaaattgctgccttattcagatttactctcttgagccagattttgaatttcactgcagactgcttcagacttctaatcataggcttgtaaacctactaataggctctgcccctcttcccaatactttttgtcatttagagatataaaccggggcatataaaaatgcaacttgtattcctttgtatatttttccctgtctgacttataaatcttgagacctttattgtaaaagcatttatcatcaggtgagaaatataaataggaactggggtcattgagcctcaggtagggaatatatcaacccgatttcttcctctcttttcccttttataggataaataatccaccctgtctgcctttacattgaatagtgcaaaaaagaatacgatttctgcaaantaaaattaaaaaaaaaaaatgcttttgcttgcggccgaatttcggcctacttggccattcgccttatn

SEQ ID NO: 317684 - DNA, 1266 bp, Homo sapiens
agcggaagtgggggaggaggaggaggagttggaaggggaggaggaagagggggagcaggaagaggggcagaaggaagaagaagagggggaggagaaagagatagaagagtaagaggagggggaagaaagacaaggggaaggggaggaggaggaggacggggaggagcttcgccgcggcctgctccgcccagccggggtcggtggccgcatggcttcggtctcctctgcgaccttctcgggccacggggctcggtccctactgcagttcctgcggctggtagggcagctcaagagagtcccacgaactggctgggtatacagaaatgtccagaggccggagagcgtttcagatcacatgtaccggatggcagttatggctatggtgatcaaagatgaccgtcttaacaaagaccgatgtgtacgcctagccctggttcatgatatggcagaatgcatcgttggggacatagcaccagcagataacatccccaaagaagaaaaacataggcgagaagaggaagctatgaagcagataacccagctcctaccagaggacctcagaaaggagctctatgaactttgggaagagtacgagacccaatctagtgcagaagccaaatttgtgaagcagctagaccaatgtgaaatgattcttcaagcatctgaatatgaagaccttgaacacaaacctgggagactgcaagacttctatgattccacagcaggaaaattcaatcaccctgagatagtccagcttgtttctgaacttgaggcagaaagaagcactaacatagctgcagctgccagtgagccacactcctgagacactctctaaattgctgcactcctgtaacaaacattatttttccatttcattgtattgtgttttgccattgttggtctgttgatttccctagatgtgagtctgtttgttttcaattgtctgaacttcagcaagaaatgtgatacaacttgggcactaaaagaagccacagaacaggaagcggtcatgaaagtgccatggatgaacactggaggtggcagtgcctgtttatgaactaaataaataaatattaaacaccaaccaaaaaaaggggggggtaaaaggttcctcgaggggcgaggttagggtccgttttgtgagggcgataggggggtttatagagaggcgggggggtaaacagggggcgggacagtgggggattggagagccctctgggggataaggggacacagaggtaggggagaaaaaggttggggagttgg

SEQ ID NO: 317685 - DNA, 1206 bp, Homo sapiens
agcggaagtgggggaggaggaggaggagttggaaggggaggaggaagagggggagcaggaagaggggcagaaggaagaagaagagggggaggagaaagagatagaagagtaagaggagggggaagaaagacaaggggaaggggaggaggaggaggacggggaggagcttcgccgcggcctgctccgcccagccggggtcggtggccgcatggcttcggtctcctctgcgaccttctcgggccacggggctcggtccctactgcagttcctgcggctggtagggcagctcaagagagtcccacgaactggctgggtatacagaaatgtccagaggccggagagcgtttcagatcacatgtaccggatggcagttatggctatggtgatcaaagatgaccgtcttaacaaagaccgatgtgtacgcctagccctggttcatgatatggcagaatgcatcgttggggacatagcaccagcagataacatccccaaagaagaaaaacataggcgagaagaggaagctatgaagcagataacccagctcctaccagaggacctcagaaaggagctctatgaactttgggaagagtacgagacccaatctagtgcagaagccaaatttgtgaagcagctagaccaatgtgaaatgattcttcaagcatctgaatatgaagaccttgaacacaaacctgggagactgcaagacttctatgattccacagcaggaaaattcaatcaccctgagatagtccagcttgtttctgaacttgaggcagaaagaagcactaacatagctgcagctgccagtgagccacactcctgagacactctctaaattgctgcactcctgtaacaaacattatttttccatttcattgtattgtgttttgccattgttggtctgttgatttccctagatgtgagtctgtttgttttcaattgtctgaacttcagcaagaaatgtgatacaacttgggcactaaaagaagccacagaacaggaagcggtcatgaaagtgccatggatgaacactggaggtggcagtgcctgtttatgaactaaataaataaatattaaacaccttgaaaatagaatgtccttttttttggaggcgttaagaataaaagtcatatagccatattttgcccttttaggggtccgggaaatcacctatggtaggggttcctgggggggggggccgccccc

SEQ ID NO: 317686 - DNA, 1676 bp, Homo sapiens
  misc_feature (1608)..(1608): n is a, c, g, or t
  misc_feature (1676)..(1676): n is a, c, g, or t
gaacagtaagcaacaacagacacaggcaagaaaagacggtgagagaagagatgttgggttgaacagtcccccatgctagccgtcatggacatacaatagcttagagcttggttgctaccaaagcagaaatctggggaggtctgaggagcagggatgacagcacagatcagccaattgaagtgtagaggtgtttacaagagagacacctgcatccttgtttacatcatgagccagcctagcccctctgatcttcctccttgtcttttcatatataggtgcttcattctccttacttaattgcaggtttggaatgggcagagattgtcttcagctttctgggctctcacacctgagttttcccatagttcctggtagaggcactgaggagcctggtgaagtttcccctacctctgcctaattgatgattccttgcctgagtctcatccttattctcagttgcacctggggtgacagagcgtaaatgccaagtggtccccttcagccccttcccaggacctggaatctctttctgctttggaatgaagtgtgggtcagatcgtagactagagcccccagtgaaccctgggatcaagctggggaaatgaatatactctcttgtcaatatgggaatgtatttttccctgttcttttgctttgcaggaaaattcaatcaccctgagatagtccagcttgtttctgaacttgaggcagaaagaagcactaacatagctgcagctgccagtgagccacactcctgagacactctctaaattgctgcactcctgtaacaaacattatttttccatttcattgtattgtgttttgccattgttggtctgttgatttccctagatgtgagtctgtttgttttcaattgtctgaacttcagcaagaaatgtgatacaacttgggcactaaaagaagccacagaacaggaagcggtcatgaaagtgccatggatgaacactggaggtggcagtgcctgtttatgaactaaataaataaatattaaacacctaaaatattagaatatttattggagatttaaaatcatcttattctgacttaattaccgatatccccgaaggctaggttcattgaataatagaaaatttcattatgattgcttttaagaacagattcttcagctgatttagtgataagaatccagaaaagaaaatgtactagtgatgtattctctccccagatgaaattgctgccttattcagatttactctcttgagccagattttgaatttcactgcagactgcttcagacttctaatcataggcttgtaaacctactaataggctctgcccctcttcccaatactttttgtcatttagagatataaaccggggcatataaaaatgcaacttgtattcctttgtatatttttccctgtctgacttataaatcttgagacctttattgtaaaagcatttatcatcaggtgagaaatataaataggaactggggtcattgagcctcaggtagggaatatatcaacccgatttcttcctctcttttcccttttataggataaataatccaccctgtctgcctttacattgaatagtgcaaaaaagaatacgatttctgcaaantaaaattaaaaaaaaaaaatgcttttgcttgcggccgaatttcggcctacttggccattcgccttatn

SEQ ID NO: 317687 - DNA, 890 bp, Homo sapiens
agcggaagtgggggaggaggaggaggagttggaaggggaggaggaagagggggagcaggaagaggggcagaaggaagaagaagagggggaggagaaagagatagaagagtaagaggagggggaagaaagacaaggggaaggggaggaggaggaggacggggaggagcttcgccgcggcctgctccgcccagccggggtcggtggccgcatggcttcggtctcctctgcgaccttctcgggccacggggctcggtccctactgcagttcctgcggctggtagggcagctcaagagagtcccacgaactggctgggtatacagaaatgtccagaggccggagagcgtttcagatcacatgtaccggatggcagttatggctatggtgatcaaagatgaccgtcttaacaaagaccgatgtgtacgcctagccctggttcatgatatggcagaatgcatcgttggggacatagcaccagcagataacatccccaaagaagaaaaacataggcgagaagaggaagctatgaagcagataacccagctcctaccagaggacctcagaaaggagctctatgaactttgggaagagtacgagacccaatctagtgcagaagccaaatttgtgaagcagctagaccaatgtgaaatgattcttcaagcatctgaatatgaagaccttgaacacaaacctgggagactgcaagacttctatgattccacagcagatgtgagtctgtttgttttcaattgtctgaacttcagcaagaaatgtgatacaacttgggcactaaaagaagccacagaacaggaagcggtcatgaaagtgccatggatgaacactggaggtggcagtgcctgtttatgaactaaataaataaatattaaacacc

SEQ ID NO: 317688 - DNA, 898 bp, Homo sapiens
agcggaagtgggggaggaggaggaggagttggaaggggaggaggaagagggggagcaggaagaggggcagaaggaagaagaagagggggaggagaaagagatagaagaagagtcccacgaactggctgggtatacagaaatgtccagaggccggagagcgtttcagatcacatgtaccggatggcagttatggctatggtgatcaaagatgaccgtcttaacaaagaccgatgtgtacgcctagccctggttcatgatatggcagaatgcatcgttggggacatagcaccagcagataacatccccaaagaagaaaaacataggcgagaagaggaagctatgaagcagataacccagctcctaccagaggacctcagaaaggagctctatgaactttgggaagagtacgagacccaatctagtgcagaagccaaatttgtgaagcagctagaccaatgtgaaatgattcttcaagcatctgaatatgaagaccttgaacacaaacctgggagactgcaagacttctatgattccacagcaggaaaattcaatcaccctgagatagtccagcttgtttctgaacttgaggcagaaagaagcactaacatagctgcagctgccagtgagccacactcctgagacactctctaaattgctgcactcctgtaacaaacattatttttccatttcattgtattgtgttttgccattgttggtctgttgatttccctagatgtgagtctgtttgttttcaattgtctgaacttcagcaagaaatgtgatacaacttgggcactaaaagaagccacagaacaggaagcggtcatgaaagtgccatggatgaacactggaggtggcagtgcctgtttatgaactaaataaataaatattaaacacc

SEQ ID NO: 317689 - DNA, 1638 bp, Homo sapiens
  misc_feature (1570)..(1570): n is a, c, g, or t
  misc_feature (1638)..(1638): n is a, c, g, or t
agcggaagtgggggaggaggaggaggagttggaaggggaggaggaagagggggagcaggaagaggggcagaaggaagaagaagagggggaggagaaagagatagaagagtaagaggagggggaagaaagacaaggggaaggggaggaggaggaggacggggaggagcttcgccgcggcctgctccgcccagccggggtcggtggccgcatggcttcggtctcctctgcgaccttctcgggccacggggctcggtccctactgcagttcctgcggctggtagggcagctcaagagagtcccacgaactggctgggtatacagaaatgtccagaggccggagagcgtttcagatcacatgtaccggatggcagttatggctatggtgatcaaagatgaccgtcttaacaaagaccggaagctatgaagcagataacccagctcctaccagaggacctcagaaaggagctctatgaactttgggaagagtacgagacccaatctagtgcagaagccaaatttgtgaagcagctagaccaatgtgaaatgattcttcaagcatctgaatatgaagaccttgaacacaaacctgggagactgcaagacttctatgattccacagcaggaaaattcaatcaccctgagatagtccagcttgtttctgaacttgaggcagaaagaagcactaacatagctgcagctgccagtgagccacactcctgagacactctctaaattgctgcactcctgtaacaaacattatttttccatttcattgtattgtgttttgccattgttggtctgttgatttccctagatgtgagtctgtttgttttcaattgtctgaacttcagcaagaaatgtgatacaacttgggcactaaaagaagccacagaacaggaagcggtcatgaaagtgccatggatgaacactggaggtggcagtgcctgtttatgaactaaataaataaatattaaacacctaaaatattagaatatttattggagatttaaaatcatcttattctgacttaattaccgatatccccgaaggctaggttcattgaataatagaaaatttcattatgattgcttttaagaacagattcttcagctgatttagtgataagaatccagaaaagaaaatgtactagtgatgtattctctccccagatgaaattgctgccttattcagatttactctcttgagccagattttgaatttcactgcagactgcttcagacttctaatcataggcttgtaaacctactaataggctctgcccctcttcccaatactttttgtcatttagagatataaaccggggcatataaaaatgcaacttgtattcctttgtatatttttccctgtctgacttataaatcttgagacctttattgtaaaagcatttatcatcaggtgagaaatataaataggaactggggtcattgagcctcaggtagggaatatatcaacccgatttcttcctctcttttcccttttataggataaataatccaccctgtctgcctttacattgaatagtgcaaaaaagaatacgatttctgcaaantaaaattaaaaaaaaaaaatgcttttgcttgcggccgaatttcggcctacttggccattcgccttatn

SEQ ID NO: 317690 - DNA, 1454 bp, Homo sapiens
  misc_feature (1386)..(1386): n is a, c, g, or t
  misc_feature (1454)..(1454): n is a, c, g, or t
agcggaagtgggggaggaggaggaggagttggaaggggaggaggaagagggggagcaggaagaggggcagaaggaagaagaagagggggaggagaaagagatagaagaagagtcccacgaactggctgggtatacagaaatgtccagaggccggagagcgtttcagatcacatgtaccggatggcagttatggctatggtgatcaaagatgaccgtcttaacaaagaccggaagctatgaagcagataacccagctcctaccagaggacctcagaaaggagctctatgaactttgggaagagtacgagacccaatctagtgcagaagccaaatttgtgaagcagctagaccaatgtgaaatgattcttcaagcatctgaatatgaagaccttgaacacaaacctgggagactgcaagacttctatgattccacagcaggaaaattcaatcaccctgagatagtccagcttgtttctgaacttgaggcagaaagaagcactaacatagctgcagctgccagtgagccacactcctgagacactctctaaattgctgcactcctgtaacaaacattatttttccatttcattgtattgtgttttgccattgttggtctgttgatttccctagatgtgagtctgtttgttttcaattgtctgaacttcagcaagaaatgtgatacaacttgggcactaaaagaagccacagaacaggaagcggtcatgaaagtgccatggatgaacactggaggtggcagtgcctgtttatgaactaaataaataaatattaaacacctaaaatattagaatatttattggagatttaaaatcatcttattctgacttaattaccgatatccccgaaggctaggttcattgaataatagaaaatttcattatgattgcttttaagaacagattcttcagctgatttagtgataagaatccagaaaagaaaatgtactagtgatgtattctctccccagatgaaattgctgccttattcagatttactctcttgagccagattttgaatttcactgcagactgcttcagacttctaatcataggcttgtaaacctactaataggctctgcccctcttcccaatactttttgtcatttagagatataaaccggggcatataaaaatgcaacttgtattcctttgtatatttttccctgtctgacttataaatcttgagacctttattgtaaaagcatttatcatcaggtgagaaatataaataggaactggggtcattgagcctcaggtagggaatatatcaacccgatttcttcctctcttttcccttttataggataaataatccaccctgtctgcctttacattgaatagtgcaaaaaagaatacgatttctgcaaantaaaattaaaaaaaaaaaatgcttttgcttgcggccgaatttcggcctacttggccattcgccttatn

SEQ ID NO: 317691 - DNA, 1557 bp, Homo sapiens
  misc_feature (1489)..(1489): n is a, c, g, or t
  misc_feature (1557)..(1557): n is a, c, g, or t
agcggaagtgggggaggaggaggaggagttggaaggggaggaggaagagggggagcaggaagaggggcagaaggaagaagaagagggggaggagaaagagatagaagaagagtcccacgaactggctgggtatacagaaatgtccagaggccggagagcgtttcagatcacatgtaccggatggcagttatggctatggtgatcaaagatgaccgtcttaacaaagaccgatgtgtacgcctagccctggttcatgatatggcagaatgcatcgttggggacatagcaccagcagataacatccccaaagaagaaaaacataggcgagaagaggaagctatgaagcagataacccagctcctaccagaggacctcagaaaggagctctatgaactttgggaagagtacgagacccaatctagtgcagaagccaaatttgtgaagcagctagaccaatgtgaaatgattcttcaagcatctgaatatgaagaccttgaacacaaacctgggagactgcaagacttctatgattccacagcaggaaaattcaatcaccctgagatagtccagcttgtttctgaacttgaggcagaaagaagcactaacatagctgcagctgccagtgagccacactcctgagacactctctaaattgctgcactcctgtaacaaacattatttttccatttcattgtattgtgttttgccattgttggtctgttgatttccctagatgtgagtctgtttgttttcaattgtctgaacttcagcaagaaatgtgatacaacttgggcactaaaagaagccacagaacaggaagcggtcatgaaagtgccatggatgaacactggaggtggcagtgcctgtttatgaactaaataaataaatattaaacacctaaaatattagaatatttattggagatttaaaatcatcttattctgacttaattaccgatatccccgaaggctaggttcattgaataatagaaaatttcattatgattgcttttaagaacagattcttcagctgatttagtgataagaatccagaaaagaaaatgtactagtgatgtattctctccccagatgaaattgctgccttattcagatttactctcttgagccagattttgaatttcactgcagactgcttcagacttctaatcataggcttgtaaacctactaataggctctgcccctcttcccaatactttttgtcatttagagatataaaccggggcatataaaaatgcaacttgtattcctttgtatatttttccctgtctgacttataaatcttgagacctttattgtaaaagcatttatcatcaggtgagaaatataaataggaactggggtcattgagcctcaggtagggaatatatcaacccgatttcttcctctcttttcccttttataggataaataatccaccctgtctgcctttacattgaatagtgcaaaaaagaatacgatttctgcaaantaaaattaaaaaaaaaaaatgcttttgcttgcggccgaatttcggcctacttggccattcgccttatn

SEQ ID NO: 317692 - DNA, 1294 bp, Homo sapiens
agcggaagtgggggaggaggaggaggagttggaaggggaggaggaagagggggagcaggaagaggggcagaaggaagaagaagagggggaggagaaagagatagaagagtaagaggagggggaagaaagacaaggggaaggggaggaggaggaggacggggaggagcttcgccgcggcctgctccgcccagccggggtcggtggccgcatggcttcggtctcctctgcgaccttctcgggccacggggctcggtccctactgcagttcctgcggctggtagggcagctcaagagagtcccacgaactggctgggtatacagaaatgtccagaggccggagagcgtttcagatcacatgtaccggatggcagttatggctatggtgatcaaagatgaccgtcttaacaaagaccgatgtgtacgcctagccctggttcatgatatggcagaatgcatcgttggggacatagcaccagcagataacatccccaaagaagaaaaacataggcgagaagaggaagctatgaagcagataacccagctcctaccagaggacctcagaaaggagctctatgaactttgggaagagtacgagacccaatctagtgcagaagccaaatttgtgaagcagctagaccaatgtgaaatgattcttcaagcatctgaatatgaagaccttgaacacaaacctgggagactgcaagacttctatgattccacagcaggaaaattcaatcaccctgagatagtccagcttgtttctgaacttgaggcagaaagaagcactaacatagctgcagctgccagtgagccacactcctgagacactctctaaattgctgcactcctgtaacaaacattatttttccatttcattgtattgtgttttgccattgttggtctgttgatttccctagatgtgagtctgtttgttttcaattgtctgaacttcagcaagaaatgtgatacaacttgggcactaaaagaagccacagaacaggaagcggtcatgaaagtgccatggatgaacactggaggtggcagtgcctgtttatgaactaaataaataaatattaaacacctttaaccaaaaaaaaaaaaaaaaaaaaaaaaaaaaaacgcagagggcatcatattgccggggcgcggagaacaaagagggtgcaatcagaattgggccattgcgcaaacacgtggtcccctggccccagtctcttcgggcacacgggggaaaaccgcgcggggccccataaagaaagccggataaattccgagaaacccgtgtacctcgaag

SEQ ID NO: 317693 - DNA, 979 bp, Homo sapiens
agcggaagtgggggaggaggaggaggagttggaaggggaggaggaagagggggagcaggaagaggggcagaaggaagaagaagagggggaggagaaagagatagaagagtaagaggagggggaagaaagacaaggggaaggggaggaggaggaggacggggaggagcttcgccgcggcctgctccgcccagccggggtcggtggccgcatggcttcggtctcctctgcgaccttctcgggccacggggctcggtccctactgcagttcctgcggctggtagggcagctcaagagagtcccacgaactggctgggtatacagaaatgtccagaggccggagagcgtttcagatcacatgtaccggatggcagttatggctatggtgatcaaagatgaccgtcttaacaaagaccggaagctatgaagcagataacccagctcctaccagaggacctcagaaaggagctctatgaactttgggaagagtacgagacccaatctagtgcagaagccaaatttgtgaagcagctagaccaatgtgaaatgattcttcaagcatctgaatatgaagaccttgaacacaaacctgggagactgcaagacttctatgattccacagcaggaaaattcaatcaccctgagatagtccagcttgtttctgaacttgaggcagaaagaagcactaacatagctgcagctgccagtgagccacactcctgagacactctctaaattgctgcactcctgtaacaaacattatttttccatttcattgtattgtgttttgccattgttggtctgttgatttccctagatgtgagtctgtttgttttcaattgtctgaacttcagcaagaaatgtgatacaacttgggcactaaaagaagccacagaacaggaagcggtcatgaaagtgccatggatgaacactggaggtggcagtgcctgtttatgaactaaataaataaatattaaacacc

SEQ ID NO: 317694 - DNA, 740 bp, Homo sapiens
agcggaagtgggggaggaggaggaggagttggaaggggaggaggaagagggggagcaggaagaggggcagaaggaagaagaagagggggaggagaaagagatagaagagtaagaggagggggaagaaagacaaggggaaggggaggaggaggaggacggggaggagcttcgccgcggcctgctccgcccagccggggtcggtggccgcatggcttcggtctcctctgcgaccttctcgggccacggggctcggtccctactgcagttcctgcggctggtagggcagctcaagagagtcccacgaactggctgggtatacagaaatgtccagaggccggagagcgtttcagatcacatgtaccggatggcagttatggctatggtgatcaaagatgaccgtcttaacaaagaccggaagctatgaagcagataacccagctcctaccagaggacctcagaaaggagctctatgaactttgggaagagtacgagacccaatctagtgcagaagccaaatttgtgaagcagctagaccaatgtgaaatgattcttcaagcatctgaatatgaagaccttgaacacaaacctgggagactgcaagacttctatgattccacagcaggtactcaacaccattttcaacaagagtccattttagtttggcttactcagtgtagtgactaatgttaatattagggaaacccactgttggtaccttcatctgaccctttcatgtggag

SEQ ID NO: 317695 - DNA, 3520 bp, Homo sapiens
gcgcggcggccgccgaaggggcgggatccgaggcaagcgttggttctgtgcgcctcaggagtataatgtctcaggaaggcgattatgggaggtggaccatatctagtagtgatgaaagtgaggaagaaaagccaaaaccagacaagccatctacctcttctcttctctgtgccaggcaaggagcagcaaatgagcccaggtacacctgttccgaggcccagaaagctgcacacaagaggaaaatatcacctgtgaaattcagcaatacagattcagttttacctcccaaaaggcagaaaagcggttcccaggaggacctcggctggtgtctgtccagcagtgatgatgagctgcaaccagaaatgccgcagaagcaggctgagaaagtggtgatcaaaaaggagaaagacatctctgctcccaatgacggcactgcccaaagaactgaaaatcatggcgctcccgcctgccacaggctcaaagaggaggaagacgagtatgagacatcaggggagggccaggacatttgggacatgctggataaagggaaccccttccagttttacctcactagagtctctggagttaagccaaagtataactctggagccctccacatcaaggatattttatctcctttatttgggacgcttgtttcttcagctcagtttaactactgctttgacgtggactggctcgtaaaacagtatccaccagagttcaggaagaagccaatcctgcttgtgcatggtgataagcgagaggctaaggctcacctccatgcccaggccaagccttacgagaacatctctctctgccaggcaaagttggatattgcgtttggaacacaccacacgaaaatgatgctgctgctctatgaagaaggcctccgggttgtcatacacacctccaacctcatccatgctgactggcaccagaaaactcaaggaatatggttgagccccttatacccacgaattgctgatggaacccacaaatctggagagtcgccaacacattttaaagctgatctcatcagttacttgatggcttataatgccccttctctcaaggagtggatagatgtcattcacaagcacgatctctctgaaacaaatgtttatcttattggttcaaccccaggacgctttcaaggaagtcaaaaagataattggggacattttagacttaagaagcttctgaaagaccatgcctcatccatgcctaacgcagagtcctggcctgtcgtaggtcagttttcaagcgttggctccttgggagccgatgaatcaaagtggttatgttctgagtttaaagagagcatgctgacactggggaaggaaagcaagactccaggaaaaagctctgttcctctttacttgatctatccttctgtggaaaatgtgcggaccagtttagaaggatatcctgctgggggctctcttccctatagcatccagacagctgaaaaacagaattggctgcattcctattttcacaaatggtcagctgagacttctggccgcagcaatgccatgccacatattaagacatatatgaggccttctccagacttcagtaaaattgcttggttccttgtcacaagcgcaaatctgtccaaggctgcctggggagcattggagaagaatggcacccagctgatgatccgctcctacgagctcggggtccttttcctcccttcagcatttggtctagacagtttcaaagtgaaacagaagttcttcgctggcagccaggagccaatggccacctttcctgtgccatatgatttgcctccagaactgtatggaagtaaagatcggccatggatatggaacattccttatgtcaaagcaccggatacgcatgggaacatgtgggtgccctcctgagaatcttgaggcactgtgaaatttaagtgtaagacattgagccacaaacatggaatctcttctttgtactggatgtccacttcccttaaagtcttatttgcacccttacaaaatctttccaaaggtcactcttatgaatggatgttggttatacttttaatggacattaacattcctaataaagtattagtttcttaattcacttttatatgttttggaaagaaaattagtgaacttctctatgttaaaaatacgtactgcttgagtatcccctgtctgaaatgcttgggaccagaagtgtttcagcttttggatttttttgaattttggaatatttgcatagcataatgagatatcttgggaatgggacccaaatctaaacacaaaattcatttatgtttcatatacaccttatatacaataacctaaaggtgattttatatgatattttgagtaattttatgcatgaaacaaagttttgacaggcttttgaccgtgattcatcacatgagttcaggcatggaaattttcatttggagcatcatgtcagcactcaaaaagttctggatcttggagcagttcagattttcagattagggatgctcaaatctatatagatataaaattatcctcacagtaacatagaatctcttggtgctgtcagctgttgggaattgaagattgactttgtgcttccaccctccatccagaaaggcacccttcattccaccagaactttacccaggaagaacacgatcatttcctttttcaccgatgccctctctcagctttctgagtacgtctcttggggtcgctggaggtgatcctaggatctgtctctgagaccaatgtgctgtttcagccccctgcagctaagaattgtattgactgtcctcacagcggcttttcatagctttcagcttcagcttttacgaggcttctcctctctccctggcaccctgctggctgcctcactgcttacagacaggtcccaccaaacccaaacacctgcctagggtaaatgggtctctcttctatccccagaaactttcagaggaagcagctcatagaaacatacaaaagcacacaagtattttgggaaaaaatcctaaaaggtgacttaatttgatgccttaaattcacaagtgaggaagctaaggcctagaaggttaaggatgtccccagggtcacacagtgagcggggctcagagcttgagtgtctttgtgctttgtgtacattgtgttctccctagggtgctttagaccctgtttgttttcttctgcatgaggctgatttccagtttgtcatcaacctctttatcttataatttaggatagagttgaacgttagtcttgaaagattttctaaagtagtctttcaaactgttcctcagaggcctaggattttccaaaagtaccttaggaaccttgtaggctgcagtgggggtgtggcgatagagcaggaggcagggagacagggctgcagggcctcccaccttccaacagacaggctctgctgtatctgttgtacatactgggattctgtaaaggacattatctggggtgttgtatgtatttttgtgtgttctgctttttttaaataaacttgaaaagctactgaactaatt

SEQ ID NO: 317696 - DNA, 2530 bp, Homo sapiens
aacgccttcagcaagagccctctcacttcctttgtcttcaacccattctccgcagagttggagcacacagctgtattaaaaaggcaaatcgaaggccgggcgcggtgactcacgcctgtcatcctagcactttgggaggccgaggcggctgaatcacttgaggttaggagtttgagatcagcccgggcaacatggtgaaaccccgtctctacaaaaatagaaaaattagccgagcgtgatggtggatgcctgtaatcctagctcctcgggaggctaaggagtataatgtctcaggaaggcgattatgggaggtggaccatatctagtagtgatgaaagtgaggaagaaaagccaaaaccagacaagccatctacctcttctcttctctgtgccaggcaaggagcagcaaatgagcccaggtacacctgttccgaggcccagaaagctgcacacaagaggaaaatatcacctgtgaaattcagcaatacagattcagttttacctcccaaaaggcagaaaagcggttcccaggaggacctcggctggtgtctgtccagcagtgatgatgagctgcaaccagaaatgccgcagaagcaggctgagaaagtggtgatcaaaaaggagaaagacatctctgctcccaatgacggcactgcccaaagaactgaaaatcatggcgctcccgcctgccacaggctcaaagaggaggaagacgagtatgagacatcaggggagggccaggacatttgggacatgctggataaagggaaccccttccagttttacctcactagagtctctggagttaagccaaagtataactctggagccctccacatcaaggatattttatctcctttatttgggacgcttgtttcttcagctcagtttaactactgctttgacgtggactggctcgtaaaacagtatccaccagagttcaggaagaagccaatcctgcttgtgcatggtgataagcgagaggctaaggctcacctccatgcccaggccaagccttacgagaacatctctctctgccaggcaaagttggatattgcgtttggaacacaccacacgaaaatgatgctgctgctctatgaagaaggcctccgggttgtcatacacacctccaacctcatccatgctgactggcaccagaaaactcaaggaactcacctgtgagtgaatctctgatccaggaggagcctcactcagcctgggaactttgaggtgctattgcaaggggaggtcctccacgtctgtccagcccaacctggtcattttacacacggaggcaaaggcccagagagatcacagagcttacccaaaatgaatatggttgagccccttatacccacgaattgctgatggaacccacaaatctggagagtcgccaacacattttaaagctgatctcatcagttacttgatggcttataatgccccttctctcaaggagtggatagatgtcattcacaagcacgatctctctgaaacaaatgtttatcttattggttcaaccccaggacgctttcaaggaagtcaaaaagataattggggacattttagacttaagaagctttgcataattatcaaagcaggaaatgcagatcagtcttctgcagtgttttagctgcttctgaaagaccatgcctcatccatgcctaacgcagagtcctggcctgtcgtaggtcagttttcaagcgttggctccttgggagccgatgaatcaaagtggttatgttctgagtttaaagagagcatgctgacactggggaaggaaagcaagactccaggaaaaagctctgttcctctttacttgatctatccttctgtggaaaatgtgcggaccagtttagaaggatatcctgctgggggctctcttccctatagcatccagacagctgaaaaacagaattggctgcattcctattttcacaaatggtcagctgagacttctggccgcagcaatgccatgccacatattaagacatatatgaggccttctccagacttcagtaaaattgcttggttccttgtcacaagcgcaaatctgtccaaggctgcctggggagcattggagaagaatggcacccagctgatgatccgctcctacgagctcggggtccttttcctcccttcagcatttggtctagacagtttcaaagtgaaacagaagttcttcgctggcagccaggagccaatggccacctttcctgtgccatatgatttgcctccagaactgtatggaagtaaagatcggccatggatatggaacattccttatgtcaaagcaccggatacgcatgggaacatgtgggtgccctcctgagaatcttgaggcactgtgaaatttaagtgtaagacattgagccacaaacatggaatctcttctttgtactggatgtccacttcccttaaagtcttatttgcacccttacaaaatctttccaaaggtcactcttatgaatggatgttggttatacttttaatggacattaacattcctaataaagtattagtttcttaa

SEQ ID NO: 317697 - DNA, 3740 bp, Homo sapiens
aacgccttcagcaagagccctctcacttcctttgtcttcaacccattctccgcagagttggagcacacagctgtattaaaaaggcaaatcgaaggccgggcgcggtgactcacgcctgtcatcctagcactttgggaggccgaggcggctgaatcacttgaggttaggagtttgagatcagcccgggcaacatggtgaaaccccgtctctacaaaaatagaaaaattagccgagcgtgatggtggatgcctgtaatcctagctcctcgggaggctaaggagtataatgtctcaggaaggcgattatgggaggtggaccatatctagtagtgatgaaagtgaggaagaaaagccaaaaccagacaagccatctacctcttctcttctctgtgccaggcaaggagcagcaaatgagcccaggtacacctgttccgaggcccagaaagctgcacacaagaggaaaatatcacctgtgaaattcagcaatacagattcagttttacctcccaaaaggcagaaaagcggttcccaggaggacctcggctggtgtctgtccagcagtgatgatgagctgcaaccagaaatgccgcagaagcaggctgagaaagtggtgatcaaaaaggagaaagacatctctgctcccaatgacggcactgcccaaagaactgaaaatcatggcgctcccgcctgccacaggctcaaagaggaggaagacgagtatgagacatcaggggagggccaggacatttgggacatgctggataaagggaaccccttccagttttacctcactagagtctctggagttaagccaaagtataactctggagccctccacatcaaggatattttatctcctttatttgggacgcttgtttcttcagctcagtttaactactgctttgacgtggactggctcgtaaaacagtatccaccagagttcaggaagaagccaatcctgcttgtgcatggtgataagcgagaggctaaggctcacctccatgcccaggccaagccttacgagaacatctctctctgccaggcaaagttggatattgcgtttggaacacaccacacgaaaatgatgctgctgctctatgaagaaggcctccgggttgtcatacacacctccaacctcatccatgctgactggcaccagaaaactcaaggaatatggttgagccccttatacccacgaattgctgatggaacccacaaatctggagagtcgccaacacattttaaagctgatctcatcagttacttgatggcttataatgccccttctctcaaggagtggatagatgtcattcacaagcacgatctctctgaaacaaatgtttatcttattggttcaaccccaggacgctttcaaggaagtcaaaaagataattggggacattttagacttaagaagcttctgaaagaccatgcctcatccatgcctaacgcagagtcctggcctgtcgtaggtcagttttcaagcgttggctccttgggagccgatgaatcaaagtggttatgttctgagtttaaagagagcatgctgacactggggaaggaaagcaagactccaggaaaaagctctgttcctctttacttgatctatccttctgtggaaaatgtgcggaccagtttagaaggatatcctgctgggggctctcttccctatagcatccagacagctgaaaaacagaattggctgcattcctattttcacaaatggtcagctgagacttctggccgcagcaatgccatgccacatattaagacatatatgaggccttctccagacttcagtaaaattgcttggttccttgtcacaagcgcaaatctgtccaaggctgcctggggagcattggagaagaatggcacccagctgatgatccgctcctacgagctcggggtccttttcctcccttcagcatttggtctagacagtttcaaagtgaaacagaagttcttcgctggcagccaggagccaatggccacctttcctgtgccatatgatttgcctccagaactgtatggaagtaaagatcggccatggatatggaacattccttatgtcaaagcaccggatacgcatgggaacatgtgggtgccctcctgagaatcttgaggcactgtgaaatttaagtgtaagacattgagccacaaacatggaatctcttctttgtactggatgtccacttcccttaaagtcttatttgcacccttacaaaatctttccaaaggtcactcttatgaatggatgttggttatacttttaatggacattaacattcctaataaagtattagtttcttaattcacttttatatgttttggaaagaaaattagtgaacttctctatgttaaaaatacgtactgcttgagtatcccctgtctgaaatgcttgggaccagaagtgtttcagcttttggatttttttgaattttggaatatttgcatagcataatgagatatcttgggaatgggacccaaatctaaacacaaaattcatttatgtttcatatacaccttatatacaataacctaaaggtgattttatatgatattttgagtaattttatgcatgaaacaaagttttgacaggcttttgaccgtgattcatcacatgagttcaggcatggaaattttcatttggagcatcatgtcagcactcaaaaagttctggatcttggagcagttcagattttcagattagggatgctcaaatctatatagatataaaattatcctcacagtaacatagaatctcttggtgctgtcagctgttgggaattgaagattgactttgtgcttccaccctccatccagaaaggcacccttcattccaccagaactttacccaggaagaacacgatcatttcctttttcaccgatgccctctctcagctttctgagtacgtctcttggggtcgctggaggtgatcctaggatctgtctctgagaccaatgtgctgtttcagccccctgcagctaagaattgtattgactgtcctcacagcggcttttcatagctttcagcttcagcttttacgaggcttctcctctctccctggcaccctgctggctgcctcactgcttacagacaggtcccaccaaacccaaacacctgcctagggtaaatgggtctctcttctatccccagaaactttcagaggaagcagctcatagaaacatacaaaagcacacaagtattttgggaaaaaatcctaaaaggtgacttaatttgatgccttaaattcacaagtgaggaagctaaggcctagaaggttaaggatgtccccagggtcacacagtgagcggggctcagagcttgagtgtctttgtgctttgtgtacattgtgttctccctagggtgctttagaccctgtttgttttcttctgcatgaggctgatttccagtttgtcatcaacctctttatcttataatttaggatagagttgaacgttagtcttgaaagattttctaaagtagtctttcaaactgttcctcagaggcctaggattttccaaaagtaccttaggaaccttgtaggctgcagtgggggtgtggcgatagagcaggaggcagggagacagggctgcagggcctcccaccttccaacagacaggctctgctgtatctgttgtacatactgggattctgtaaaggacattatctggggtgttgtatgtatttttgtgtgttctgctttttttaaataaacttgaaaagctactgaactaatt

SEQ ID NO: 317698 - DNA, 3781 bp, Homo sapiens
gcgcggcggccgccgaaggggcgggatccgaggcaagcgttggttctgtgcgcctcaggagtataatgtctcaggaaggcgattatgggaggtggaccatatctagtagtgatgaaagtgaggaagaaaagccaaaaccagacaagccatctacctcttctcttctctgtgccaggcaaggagcagcaaatgagcccaggtacacctgttccgaggcccagaaagctgcacacaagaggaaaatatcacctgtgaaattcagcaatacagattcagttttacctcccaaaaggcagaaaagcggttcccaggaggacctcggctggtgtctgtccagcagtgatgatgagctgcaaccagaaatgccgcagaagcaggctgagaaagtggtgatcaaaaaggagaaagacatctctgctcccaatgacggcactgcccaaagaactgaaaatcatggcgctcccgcctgccacaggctcaaagaggaggaagacgagtatgagacatcaggggagggccaggacatttgggacatgctggataaagggaaccccttccagttttacctcactagagtctctggagttaagccaaagtataactctggagccctccacatcaaggatattttatctcctttatttgggacgcttgtttcttcagctcagtttaactactgctttgacgtggactggctcgtaaaacagtatccaccagagttcaggaagaagccaatcctgcttgtgcatggtgataagcgagaggctaaggctcacctccatgcccaggccaagccttacgagaacatctctctctgccaggcaaagttggatattgcgtttggaacacaccacacgaaaatgatgctgctgctctatgaagaaggcctccgggttgtcatacacacctccaacctcatccatgctgactggcaccagaaaactcaaggccattttgtacatctctgcctgtgctagagaagagctggttaacaaacagccttctgtgttgggagaaactcggacgtttgtctagcaccatttccagaactcacctgtgagtgaatctctgatccaggaggagcctcactcagcctgggaactttgaggtgctattgcaaggggaggtcctccacgtctgtccagcccaacctggtcattttacacacggaggcaaaggcccagagagatcacagagcttacccaaaatgaatatggttgagccccttatacccacgaattgctgatggaacccacaaatctggagagtcgccaacacattttaaagctgatctcatcagttacttgatggcttataatgccccttctctcaaggagtggatagatgtcattcacaagcacgatctctctgaaacaaatgtttatcttattggttcaaccccaggacgctttcaaggaagtcaaaaagataattggggacattttagacttaagaagcttctgaaagaccatgcctcatccatgcctaacgcagagtcctggcctgtcgtaggtcagttttcaagcgttggctccttgggagccgatgaatcaaagtggttatgttctgagtttaaagagagcatgctgacactggggaaggaaagcaagactccaggaaaaagctctgttcctctttacttgatctatccttctgtggaaaatgtgcggaccagtttagaaggatatcctgctgggggctctcttccctatagcatccagacagctgaaaaacagaattggctgcattcctattttcacaaatggtcagctgagacttctggccgcagcaatgccatgccacatattaagacatatatgaggccttctccagacttcagtaaaattgcttggttccttgtcacaagcgcaaatctgtccaaggctgcctggggagcattggagaagaatggcacccagctgatgatccgctcctacgagctcggggtccttttcctcccttcagcatttggtctagacagtttcaaagtgaaacagaagttcttcgctggcagccaggagccaatggccacctttcctgtgccatatgatttgcctccagaactgtatggaagtaaagatcggccatggatatggaacattccttatgtcaaagcaccggatacgcatgggaacatgtgggtgccctcctgagaatcttgaggcactgtgaaatttaagtgtaagacattgagccacaaacatggaatctcttctttgtactggatgtccacttcccttaaagtcttatttgcacccttacaaaatctttccaaaggtcactcttatgaatggatgttggttatacttttaatggacattaacattcctaataaagtattagtttcttaattcacttttatatgttttggaaagaaaattagtgaacttctctatgttaaaaatacgtactgcttgagtatcccctgtctgaaatgcttgggaccagaagtgtttcagcttttggatttttttgaattttggaatatttgcatagcataatgagatatcttgggaatgggacccaaatctaaacacaaaattcatttatgtttcatatacaccttatatacaataacctaaaggtgattttatatgatattttgagtaattttatgcatgaaacaaagttttgacaggcttttgaccgtgattcatcacatgagttcaggcatggaaattttcatttggagcatcatgtcagcactcaaaaagttctggatcttggagcagttcagattttcagattagggatgctcaaatctatatagatataaaattatcctcacagtaacatagaatctcttggtgctgtcagctgttgggaattgaagattgactttgtgcttccaccctccatccagaaaggcacccttcattccaccagaactttacccaggaagaacacgatcatttcctttttcaccgatgccctctctcagctttctgagtacgtctcttggggtcgctggaggtgatcctaggatctgtctctgagaccaatgtgctgtttcagccccctgcagctaagaattgtattgactgtcctcacagcggcttttcatagctttcagcttcagcttttacgaggcttctcctctctccctggcaccctgctggctgcctcactgcttacagacaggtcccaccaaacccaaacacctgcctagggtaaatgggtctctcttctatccccagaaactttcagaggaagcagctcatagaaacatacaaaagcacacaagtattttgggaaaaaatcctaaaaggtgacttaatttgatgccttaaattcacaagtgaggaagctaaggcctagaaggttaaggatgtccccagggtcacacagtgagcggggctcagagcttgagtgtctttgtgctttgtgtacattgtgttctccctagggtgctttagaccctgtttgttttcttctgcatgaggctgatttccagtttgtcatcaacctctttatcttataatttaggatagagttgaacgttagtcttgaaagattttctaaagtagtctttcaaactgttcctcagaggcctaggattttccaaaagtaccttaggaaccttgtaggctgcagtgggggtgtggcgatagagcaggaggcagggagacagggctgcagggcctcccaccttccaacagacaggctctgctgtatctgttgtacatactgggattctgtaaaggacattatctggggtgttgtatgtatttttgtgtgttctgctttttttaaataaacttgaaaagctactgaactaatt

SEQ ID NO: 317699 - DNA, 3938 bp, Homo sapiens
gcgcggcggccgccgaaggggcgggatccgaggcaagcgttggttctgtgcgcctcaggtacgtgttgggcggcagtgggcgcggactcggtgcggtctctcgcgggctgcggtcgggcccgggatcctgctcctggccgagtcgcggtgcgcgggctgctggggtccggcagggctggaggcggaccgcgaggaagcggcgcggccgggaagatggggcagggtcgcctcggccccggggcctcggtttcctccgatcacagcgcctcagggggcgcgcacgggcgctgcggagacctgtgtcctgccggggcgcggcgctaggggcccctgctcgggtttttattcccagacctaagcttacaggcagagttggagcacacagctgtattaaaaaggcaaatcgaaggccgggcgcggtgactcacgcctgtcatcctagcactttgggaggccgaggcggctgaatcacttgaggttaggagtttgagatcagcccgggcaacatggtgaaaccccgtctctacaaaaatagaaaaattagccgagcgtgatggtggatgcctgtaatcctagctcctcgggaggctaaggcaaggagcagcaaatgagcccaggtacacctgttccgaggcccagaaagctgcacacaagaggaaaatatcacctgtgaaattcagcaatacagattcagttttacctcccaaaaggcagaaaagcggttcccaggaggacctcggctggtgtctgtccagcagtgatgatgagctgcaaccagaaatgccgcagaagcaggctgagaaagtggtgatcaaaaaggagaaagacatctctgctcccaatgacggcactgcccaaagaactgaaaatcatggcgctcccgcctgccacaggctcaaagaggaggaagacgagtatgagacatcaggggagggccaggacatttgggacatgctggataaagggaaccccttccagttttacctcactagagtctctggagttaagccaaagtataactctggagccctccacatcaaggatattttatctcctttatttgggacgcttgtttcttcagctcagtttaactactgctttgacgtggactggctcgtaaaacagtatccaccagagttcaggaagaagccaatcctgcttgtgcatggtgataagcgagaggctaaggctcacctccatgcccaggccaagccttacgagaacatctctctctgccaggcaaagttggatattgcgtttggaacacaccacacgaaaatgatgctgctgctctatgaagaaggcctccgggttgtcatacacacctccaacctcatccatgctgactggcaccagaaaactcaaggaatatggttgagccccttatacccacgaattgctgatggaacccacaaatctggagagtcgccaacacattttaaagctgatctcatcagttacttgatggcttataatgccccttctctcaaggagtggatagatgtcattcacaagcacgatctctctgaaacaaatgtttatcttattggttcaaccccaggacgctttcaaggaagtcaaaaagataattggggacattttagacttaagaagcttctgaaagaccatgcctcatccatgcctaacgcagagtcctggcctgtcgtaggtcagttttcaagcgttggctccttgggagccgatgaatcaaagtggttatgttctgagtttaaagagagcatgctgacactggggaaggaaagcaagactccaggaaaaagctctgttcctctttacttgatctatccttctgtggaaaatgtgcggaccagtttagaaggatatcctgctgggggctctcttccctatagcatccagacagctgaaaaacagaattggctgcattcctattttcacaaatggtcagctgagacttctggccgcagcaatgccatgccacatattaagacatatatgaggccttctccagacttcagtaaaattgcttggttccttgtcacaagcgcaaatctgtccaaggctgcctggggagcattggagaagaatggcacccagctgatgatccgctcctacgagctcggggtccttttcctcccttcagcatttggtctagacagtttcaaagtgaaacagaagttcttcgctggcagccaggagccaatggccacctttcctgtgccatatgatttgcctccagaactgtatggaagtaaagatcggccatggatatggaacattccttatgtcaaagcaccggatacgcatgggaacatgtgggtgccctcctgagaatcttgaggcactgtgaaatttaagtgtaagacattgagccacaaacatggaatctcttctttgtactggatgtccacttcccttaaagtcttatttgcacccttacaaaatctttccaaaggtcactcttatgaatggatgttggttatacttttaatggacattaacattcctaataaagtattagtttcttaattcacttttatatgttttggaaagaaaattagtgaacttctctatgttaaaaatacgtactgcttgagtatcccctgtctgaaatgcttgggaccagaagtgtttcagcttttggatttttttgaattttggaatatttgcatagcataatgagatatcttgggaatgggacccaaatctaaacacaaaattcatttatgtttcatatacaccttatatacaataacctaaaggtgattttatatgatattttgagtaattttatgcatgaaacaaagttttgacaggcttttgaccgtgattcatcacatgagttcaggcatggaaattttcatttggagcatcatgtcagcactcaaaaagttctggatcttggagcagttcagattttcagattagggatgctcaaatctatatagatataaaattatcctcacagtaacatagaatctcttggtgctgtcagctgttgggaattgaagattgactttgtgcttccaccctccatccagaaaggcacccttcattccaccagaactttacccaggaagaacacgatcatttcctttttcaccgatgccctctctcagctttctgagtacgtctcttggggtcgctggaggtgatcctaggatctgtctctgagaccaatgtgctgtttcagccccctgcagctaagaattgtattgactgtcctcacagcggcttttcatagctttcagcttcagcttttacgaggcttctcctctctccctggcaccctgctggctgcctcactgcttacagacaggtcccaccaaacccaaacacctgcctagggtaaatgggtctctcttctatccccagaaactttcagaggaagcagctcatagaaacatacaaaagcacacaagtattttgggaaaaaatcctaaaaggtgacttaatttgatgccttaaattcacaagtgaggaagctaaggcctagaaggttaaggatgtccccagggtcacacagtgagcggggctcagagcttgagtgtctttgtgctttgtgtacattgtgttctccctagggtgctttagaccctgtttgttttcttctgcatgaggctgatttccagtttgtcatcaacctctttatcttataatttaggatagagttgaacgttagtcttgaaagattttctaaagtagtctttcaaactgttcctcagaggcctaggattttccaaaagtaccttaggaaccttgtaggctgcagtgggggtgtggcgatagagcaggaggcagggagacagggctgcagggcctcccaccttccaacagacaggctctgctgtatctgttgtacatactgggattctgtaaaggacattatctggggtgttgtatgtatttttgtgtgttctgctttttttaaataaacttgaaaagctactgaactaatt

SEQ ID NO: 317700 - DNA, 2688 bp, Homo sapiens
gcgcggcggccgccgaaggggcgggatccgaggcaagcgttggttctgtgcgcctcaggtacgtgttgggcggcagtgggcgcggactcggtgcggtctctcgcgggctgcggtcgggcccgggatcctgctcctggccgagtcgcggtgcgcgggctgctggggtccggcagggctggaggcggaccgcgaggaagcggcgcggccgggaagatggggcagggtcgcctcggccccggggcctcggtttcctccgatcacagcgcctcagggggcgcgcacgggcgctgcggagacctgtgtcctgccggggcgcggcgctaggggcccctgctcgggtttttattcccagacctaagcttacaggcagagttggagcacacagctgtattaaaaaggcaaatcgaaggccgggcgcggtgactcacgcctgtcatcctagcactttgggaggccgaggcggctgaatcacttgaggttaggagtttgagatcagcccgggcaacatggtgaaaccccgtctctacaaaaatagaaaaattagccgagcgtgatggtggatgcctgtaatcctagctcctcgggaggctaaggagtataatgtctcaggaaggcgattatgggaggtggaccatatctagtagtgatgaaagtgaggaagaaaagccaaaaccagacaagccatctacctcttctcttctctgtgccaggcaaggagcagcaaatgagcccaggtacacctgttccgaggcccagaaagctgcacacaagaggaaaatatcacctgtgaaattcagcaatacagattcagttttacctcccaaaaggcagaaaagcggttcccaggaggacctcggctggtgtctgtccagcagtgatgatgagctgcaaccagaaatgccgcagaagcaggctgagaaagtggtgatcaaaaaggagaaagacatctctgctcccaatgacggcactgcccaaagaactgaaaatcatggcgctcccgcctgccacaggctcaaagaggaggaagacgagtatgagacatcaggggagggccaggacatttgggacatgctggataaagggaaccccttccagttttacctcactagagtctctggagttaagccaaagtataactctggagccctccacatcaagggtaagaggatgctgggtgtcaaggagctgttgaattgcccttgagagtctctcctccgtgaaacaaggagggcagcctagaatagtttctgagaactcttctttgtgttcttaactactttcaggaaaaaaattcttgacaggcaagtgcattagtataacagcagactgtttacttaactcaggcagagcgtgtgttctcaaaaccctgtagctcaaccccttatatcacttagcacgatgtttagcattatttaactttttaagatgaagcttgatgagtaacagtttatcaacaaggtagcaaatacttgacaacagtagtagttctccatgggccctggaccagcagcctcagcatcacctgcaacttgttaaaatgcaaattctcgggccccattcccgattcattaaattggactctgagggtgagatcctgcagtctgtgttttcacgagcccttgaggggattctactgcccagtcaagtttgagaaccactgcttaaaagcctggttttagttcctggtgaagaagaagaagaaaaaacaaaatagtgcctgagtgcaaatagatgtttcagttatggatcaaaagatggccttagtttgctctccttattcctcagggagcacctgcaggaggaagagcaggagctctagaatctgctttctggcctcaccactcatttgctgtatggattgttaacacaggacctaacattctctgaattttagtttgctcatctttaaactggaaatgcagaaaaatgggagcaaatatatgaagtaaccagtgtaatatattcacatggcagatacaataaacattattacccttatttcagatttttttcctgtcccatatttaagaatagtaatgttcactgtcagcagtgttgttctttttttatatatccagtatataattgtatattgtgtgtgatgtatacatgttggagtatttcatactgtagagtgttctacaggttgttttctttttgagaatctcttatcttggtactttgtcaagttttttgtttgtttgagacagactgacaaatatttagagaattttgccaagttttgctctatataataaaataaccggcaattagcaccaaggtattgtggtaacatgataggagctcttacatatattttctcctttaatcctcaggacagtcttatgagtagatgttacaatcgtattccttggataaatgatgcatctgcactttagaaaagtgcccaaggtcgtagagctggtaatgacattctggcatcagaatccatgctgtttgctatagcactctaccatgtgccataattgtagatggcttagaagatctcatggaggaagggggacttcaaaaggcctttgaaagatgggtaaaatttagaagggaagaaatacatgctggtgggggcaaatggaagaatatttgcagtttatctctgcaactctcccaataaggtagaaccttccttaacaatttttttgttgttgttctctgaaaatcgttctaccc

SEQ ID NO: 317701 - DNA, 498 bp, Homo sapiens
gcgcggcggccgccgaaggggcgggatccgaggcaagcgttggttctgtgcgcctcaggtacgtgttgggcggcagtgggcgcggactcggtgcggtctctcgcgggctgcggtcgggcccgggatcctgctcctggccgagtcgcggtgcgcgggctgctggggtccggcagggctggaggcggaccgcgaggaagcggcgcggccgggaagatggggcagggtcgcctcggccccggggcctcggtttcctccgatcacagcgcctcagggggcgcgcacgggcgctgcggagacctgtgtcctgccggggcgcggcgctaggggcccctgctcgggtttttattcccagacctaagcttacaggtgcgtggtcccagaaagtgagtaggaaagcgcccaccacgtgccaggcgcttaagctttctgtgctcggtttcccagtataggaggacggtcacggtacgtagtatagagttgtcctgagggtgaagcgag

SEQ ID NO: 317702 - DNA, 454 bp, Homo sapiens
  misc_feature (449)..(449): n is a, c, g, or t
gcgcggcggccgccgaaggggcgggatccgaggcaagcgttggttctgtgcgcctcaggtacgtgttgggcggcagtgggcgcggactcggtgcggtctctcgcgggctgcggtcgggcccgggatcctgctcctggccgagtcgcggtgcgcgggctgctggggtccggcagggctggaggcggaccgcgaggaagcggcgcggccgggaagatggggcagggtcgcctcggccccggggcctcggtttcctccgatcacagcgcctcagggggcgcgcacgggcgctgcggagacctgtgtcctgccggggcgcggcgctaggggcccctgctcgggtttttatttcccccccccaaaggggaaaaccccctaaaaagccttttaaaccaagggggggttgggggcccggggttggcccagaaagtgagtggaaagcgcccaccacntgcca

SEQ ID NO: 317703 - DNA, 459 bp, Homo sapiens
ggcctggtcatgttaatagtgtgctaaatatttccccactcccccagttggtgtattttctttgaaacaaatttaagctggtgtctttttagagcctttagtgtgttaataaagttgtgaatctccaagagaagaactgaatacgaaagcttttatgaactttttaaactactaaccctctgtacttggtgcacatatgctagatccaggttttgatccccttttcaagaggggtttgctttttaaaagggagctttagggatttgctcaacaagttcagctattgttcttgattatgactaactttaattttcttttgtttaagccattttgtacatctctgcctgtgctagagaagagctggttaacaaacagccttctgtgttgggagaaactcggacgtttgtctagcaccatttccaggttcacgttttctctgtcatcctcctctgcctcacc

SEQ ID NO: 317704 - DNA, 533 bp, Homo sapiens
gtattttgccttttttgtattttgtttcattcaacaagcttttgctgagcctctactcataacacaccgtggaagcatgattcttccctttaaggagctcacagttcaggcaggagacatatacacacatgctgttaaaagcacaacagaaataatatgtatgcatgtatgtatgttcatggcaaaaatggaaaggctatatgctgaaaggttgcagtgcttcttgtgaaaagtgggaagtttataattctaaaatgggcatgcgttacttgaatggagtttcataaaatctcacaggtcacagagtcgtgtagccactgttgatttttagataataggctctttgttttcatgcagtttcctaatattaggattatgatcaattttatttcataattagtaacttttgtcttttctgtcactagcaaatggtcagctgagacttctggccgcagcaatgccatgccacatattaagacatatatgaggccttctccagacttcagtaaaattgcttggttccttgtcacaag

SEQ ID NO: 317705 - DNA, 2317 bp, Homo sapiens
gcgcggcggccgccgaaggggcgggatccgaggcaagcgttggttctgtgcgcctcaggcagagttggagcacacagctgtattaaaaaggcaaatcgaaggccgggcgcggtgactcacgcctgtcatcctagcactttgggaggccgaggcggctgaatcacttgaggttaggagtttgagatcagcccgggcaacatggtgaaaccccgtctctacaaaaatagaaaaattagccgagcgtgatggtggatgcctgtaatcctagctcctcgggaggctaaggagtataatgtctcaggaaggcgattatgggaggtggaccatatctagtagtgatgaaagtgaggaagaaaagccaaaaccagacaagccatctacctcttctcttctctgtgccaggcaaggagcagcaaatgagcccaggtacacctgttccgaggcccagaaagctgcacacaagaggaaaatatcacctgtgaaattcagcaatacagattcagttttacctcccaaaaggcagaaaagcggttcccaggaggacctcggctggtgtctgtccagcagtgatgatgagctgcaaccagaaatgccgcagaagcaggctgagaaagtggtgatcaaaaaggagaaagacatctctgctcccaatgacggcactgcccaaagaactgaaaatcatggcgctcccgcctgccacaggctcaaagaggaggaagacgagtatgagacatcaggggagggccaggacatttgggacatgctggataaagggaaccccttccagttttacctcactagagtctctggagttaagccaaagtataactctggagccctccacatcaaggatattttatctcctttatttgggacgcttgtttcttcagctcagtttaactactgctttgacgtggactggctcgtaaaacagtatccaccagagttcaggaagaagccaatcctgcttgtgcatggtgataagcgagaggctaaggctcacctccatgcccaggccaagccttacgagaacatctctctctgccaggcaaagttggatattgcgtttggaacacaccacacgaaaatgatgctgctgctctatgaagaaggcctccgggttgtcatacacacctccaacctcatccatgctgactggcaccagaaaactcaaggaatatggttgagccccttatacccacgaattgctgatggaacccacaaatctggagagtcgccaacacattttaaagctgatctcatcagttacttgatggcttataatgccccttctctcaaggagtggatagatgtcattcacaagcacgatctctctgaaacaaatgtttatcttattggttcaaccccaggacgctttcaaggaagtcaaaaagataattggggacattttagacttaagaagcttctgaaagaccatgcctcatccatgcctaacgcagagtcctggcctgtcgtaggtcagttttcaagcgttggctccttgggagccgatgaatcaaagtggttatgttctgagtttaaagagagcatgctgacactggggaaggaaagcaagactccaggaaaaagctctgttcctctttacttgatctatccttctgtggaaaatgtgcggaccagtttagaaggatatcctgctgggggctctcttccctatagcatccagacagctgaaaaacagaattggctgcattcctattttcacaaatggtcagctgagacttctggccgcagcaatgccatgccacatattaagacatatatgaggccttctccagacttcagtaaaattgcttggttccttgtcacaagcgcaaatctgtccaaggctgcctggggagcattggagaagaatggcacccagctgatgatccgctcctacgagctcggggtccttttcctcccttcagcatttggtctagacagtttcaaagtgaaacagaagttcttcgctggcagccaggagccaatggccacctttcctgtgccatatgatttgcctccagaactgtatggaagtaaagatcggccatggatatggaacattccttatgtcaaagcaccggatacgcatgggaacatgtgggtgccctcctgagaatcttgaggcactgtgaaatttaagtgtaagacattgagccacaaacatggaatctcttctttgtactggatgtccacttcccttaaagtcttatttgcacccttacaaaatctttccaaaggtcactcttatgaatggatgttggttatacttttaatggacattaacattcctaataaagtattagtttcttaa

SEQ ID NO: 317706 - DNA, 4055 bp, Homo sapiens
gcgcggcggccgccgaaggggcgggatccgaggcaagcgttggttctgtgcgcctcaggtacgtgttgggcggcagtgggcgcggactcggtgcggtctctcgcgggctgcggtcgggcccgggatcctgctcctggccgagtcgcggtgcgcgggctgctggggtccggcagggctggaggcggaccgcgaggaagcggcgcggccgggaagatggggcagggtcgcctcggccccggggcctcggtttcctccgatcacagcgcctcagggggcgcgcacgggcgctgcggagacctgtgtcctgccggggcgcggcgctaggggcccctgctcgggtttttattcccagacctaagcttacaggcagagttggagcacacagctgtattaaaaaggcaaatcgaaggccgggcgcggtgactcacgcctgtcatcctagcactttgggaggccgaggcggctgaatcacttgaggttaggagtttgagatcagcccgggcaacatggtgaaaccccgtctctacaaaaatagaaaaattagccgagcgtgatggtggatgcctgtaatcctagctcctcgggaggctaaggagtataatgtctcaggaaggcgattatgggaggtggaccatatctagtagtgatgaaagtgaggaagaaaagccaaaaccagacaagccatctacctcttctcttctctgtgccaggcaaggagcagcaaatgagcccaggtacacctgttccgaggcccagaaagctgcacacaagaggaaaatatcacctgtgaaattcagcaatacagattcagttttacctcccaaaaggcagaaaagcggttcccaggaggacctcggctggtgtctgtccagcagtgatgatgagctgcaaccagaaatgccgcagaagcaggctgagaaagtggtgatcaaaaaggagaaagacatctctgctcccaatgacggcactgcccaaagaactgaaaatcatggcgctcccgcctgccacaggctcaaagaggaggaagacgagtatgagacatcaggggagggccaggacatttgggacatgctggataaagggaaccccttccagttttacctcactagagtctctggagttaagccaaagtataactctggagccctccacatcaaggatattttatctcctttatttgggacgcttgtttcttcagctcagtttaactactgctttgacgtggactggctcgtaaaacagtatccaccagagttcaggaagaagccaatcctgcttgtgcatggtgataagcgagaggctaaggctcacctccatgcccaggccaagccttacgagaacatctctctctgccaggcaaagttggatattgcgtttggaacacaccacacgaaaatgatgctgctgctctatgaagaaggcctccgggttgtcatacacacctccaacctcatccatgctgactggcaccagaaaactcaaggaatatggttgagccccttatacccacgaattgctgatggaacccacaaatctggagagtcgccaacacattttaaagctgatctcatcagttacttgatggcttataatgccccttctctcaaggagtggatagatgtcattcacaagcacgatctctctgaaacaaatgtttatcttattggttcaaccccaggacgctttcaaggaagtcaaaaagataattggggacattttagacttaagaagcttctgaaagaccatgcctcatccatgcctaacgcagagtcctggcctgtcgtaggtcagttttcaagcgttggctccttgggagccgatgaatcaaagtggttatgttctgagtttaaagagagcatgctgacactggggaaggaaagcaagactccaggaaaaagctctgttcctctttacttgatctatccttctgtggaaaatgtgcggaccagtttagaaggatatcctgctgggggctctcttccctatagcatccagacagctgaaaaacagaattggctgcattcctattttcacaaatggtcagctgagacttctggccgcagcaatgccatgccacatattaagacatatatgaggccttctccagacttcagtaaaattgcttggttccttgtcacaagcgcaaatctgtccaaggctgcctggggagcattggagaagaatggcacccagctgatgatccgctcctacgagctcggggtccttttcctcccttcagcatttggtctagacagtttcaaagtgaaacagaagttcttcgctggcagccaggagccaatggccacctttcctgtgccatatgatttgcctccagaactgtatggaagtaaagatcggccatggatatggaacattccttatgtcaaagcaccggatacgcatgggaacatgtgggtgccctcctgagaatcttgaggcactgtgaaatttaagtgtaagacattgagccacaaacatggaatctcttctttgtactggatgtccacttcccttaaagtcttatttgcacccttacaaaatctttccaaaggtcactcttatgaatggatgttggttatacttttaatggacattaacattcctaataaagtattagtttcttaattcacttttatatgttttggaaagaaaattagtgaacttctctatgttaaaaatacgtactgcttgagtatcccctgtctgaaatgcttgggaccagaagtgtttcagcttttggatttttttgaattttggaatatttgcatagcataatgagatatcttgggaatgggacccaaatctaaacacaaaattcatttatgtttcatatacaccttatatacaataacctaaaggtgattttatatgatattttgagtaattttatgcatgaaacaaagttttgacaggcttttgaccgtgattcatcacatgagttcaggcatggaaattttcatttggagcatcatgtcagcactcaaaaagttctggatcttggagcagttcagattttcagattagggatgctcaaatctatatagatataaaattatcctcacagtaacatagaatctcttggtgctgtcagctgttgggaattgaagattgactttgtgcttccaccctccatccagaaaggcacccttcattccaccagaactttacccaggaagaacacgatcatttcctttttcaccgatgccctctctcagctttctgagtacgtctcttggggtcgctggaggtgatcctaggatctgtctctgagaccaatgtgctgtttcagccccctgcagctaagaattgtattgactgtcctcacagcggcttttcatagctttcagcttcagcttttacgaggcttctcctctctccctggcaccctgctggctgcctcactgcttacagacaggtcccaccaaacccaaacacctgcctagggtaaatgggtctctcttctatccccagaaactttcagaggaagcagctcatagaaacatacaaaagcacacaagtattttgggaaaaaatcctaaaaggtgacttaatttgatgccttaaattcacaagtgaggaagctaaggcctagaaggttaaggatgtccccagggtcacacagtgagcggggctcagagcttgagtgtctttgtgctttgtgtacattgtgttctccctagggtgctttagaccctgtttgttttcttctgcatgaggctgatttccagtttgtcatcaacctctttatcttataatttaggatagagttgaacgttagtcttgaaagattttctaaagtagtctttcaaactgttcctcagaggcctaggattttccaaaagtaccttaggaaccttgtaggctgcagtgggggtgtggcgatagagcaggaggcagggagacagggctgcagggcctcccaccttccaacagacaggctctgctgtatctgttgtacatactgggattctgtaaaggacattatctggggtgttgtatgtatttttgtgtgttctgctttttttaaataaacttgaaaagctactgaactaatt

SEQ ID NO: 317707 - DNA, 3574 bp, Homo sapiens
tgctacagggttatagctctatttgcactcgctgtttagctggtccgaatttcttgtcctgcgtccaagaataatgaggttaggctgacaaccgaaggggaaaagggcggaggagtataatgtctcaggaaggcgattatgggaggtggaccatatctagtagtgatgaaagtgaggaagaaaagccaaaaccagacaagccatctacctcttctcttctctgtgccaggcaaggagcagcaaatgagcccaggtacacctgttccgaggcccagaaagctgcacacaagaggaaaatatcacctgtgaaattcagcaatacagattcagttttacctcccaaaaggcagaaaagcggttcccaggaggacctcggctggtgtctgtccagcagtgatgatgagctgcaaccagaaatgccgcagaagcaggctgagaaagtggtgatcaaaaaggagaaagacatctctgctcccaatgacggcactgcccaaagaactgaaaatcatggcgctcccgcctgccacaggctcaaagaggaggaagacgagtatgagacatcaggggagggccaggacatttgggacatgctggataaagggaaccccttccagttttacctcactagagtctctggagttaagccaaagtataactctggagccctccacatcaaggatattttatctcctttatttgggacgcttgtttcttcagctcagtttaactactgctttgacgtggactggctcgtaaaacagtatccaccagagttcaggaagaagccaatcctgcttgtgcatggtgataagcgagaggctaaggctcacctccatgcccaggccaagccttacgagaacatctctctctgccaggcaaagttggatattgcgtttggaacacaccacacgaaaatgatgctgctgctctatgaagaaggcctccgggttgtcatacacacctccaacctcatccatgctgactggcaccagaaaactcaaggaatatggttgagccccttatacccacgaattgctgatggaacccacaaatctggagagtcgccaacacattttaaagctgatctcatcagttacttgatggcttataatgccccttctctcaaggagtggatagatgtcattcacaagcacgatctctctgaaacaaatgtttatcttattggttcaaccccaggacgctttcaaggaagtcaaaaagataattggggacattttagacttaagaagcttctgaaagaccatgcctcatccatgcctaacgcagagtcctggcctgtcgtaggtcagttttcaagcgttggctccttgggagccgatgaatcaaagtggttatgttctgagtttaaagagagcatgctgacactggggaaggaaagcaagactccaggaaaaagctctgttcctctttacttgatctatccttctgtggaaaatgtgcggaccagtttagaaggatatcctgctgggggctctcttccctatagcatccagacagctgaaaaacagaattggctgcattcctattttcacaaatggtcagctgagacttctggccgcagcaatgccatgccacatattaagacatatatgaggccttctccagacttcagtaaaattgcttggttccttgtcacaagcgcaaatctgtccaaggctgcctggggagcattggagaagaatggcacccagctgatgatccgctcctacgagctcggggtccttttcctcccttcagcatttggtctagacagtttcaaagtgaaacagaagttcttcgctggcagccaggagccaatggccacctttcctgtgccatatgatttgcctccagaactgtatggaagtaaagatcggccatggatatggaacattccttatgtcaaagcaccggatacgcatgggaacatgtgggtgccctcctgagaatcttgaggcactgtgaaatttaagtgtaagacattgagccacaaacatggaatctcttctttgtactggatgtccacttcccttaaagtcttatttgcacccttacaaaatctttccaaaggtcactcttatgaatggatgttggttatacttttaatggacattaacattcctaataaagtattagtttcttaattcacttttatatgttttggaaagaaaattagtgaacttctctatgttaaaaatacgtactgcttgagtatcccctgtctgaaatgcttgggaccagaagtgtttcagcttttggatttttttgaattttggaatatttgcatagcataatgagatatcttgggaatgggacccaaatctaaacacaaaattcatttatgtttcatatacaccttatatacaataacctaaaggtgattttatatgatattttgagtaattttatgcatgaaacaaagttttgacaggcttttgaccgtgattcatcacatgagttcaggcatggaaattttcatttggagcatcatgtcagcactcaaaaagttctggatcttggagcagttcagattttcagattagggatgctcaaatctatatagatataaaattatcctcacagtaacatagaatctcttggtgctgtcagctgttgggaattgaagattgactttgtgcttccaccctccatccagaaaggcacccttcattccaccagaactttacccaggaagaacacgatcatttcctttttcaccgatgccctctctcagctttctgagtacgtctcttggggtcgctggaggtgatcctaggatctgtctctgagaccaatgtgctgtttcagccccctgcagctaagaattgtattgactgtcctcacagcggcttttcatagctttcagcttcagcttttacgaggcttctcctctctccctggcaccctgctggctgcctcactgcttacagacaggtcccaccaaacccaaacacctgcctagggtaaatgggtctctcttctatccccagaaactttcagaggaagcagctcatagaaacatacaaaagcacacaagtattttgggaaaaaatcctaaaaggtgacttaatttgatgccttaaattcacaagtgaggaagctaaggcctagaaggttaaggatgtccccagggtcacacagtgagcggggctcagagcttgagtgtctttgtgctttgtgtacattgtgttctccctagggtgctttagaccctgtttgttttcttctgcatgaggctgatttccagtttgtcatcaacctctttatcttataatttaggatagagttgaacgttagtcttgaaagattttctaaagtagtctttcaaactgttcctcagaggcctaggattttccaaaagtaccttaggaaccttgtaggctgcagtgggggtgtggcgatagagcaggaggcagggagacagggctgcagggcctcccaccttccaacagacaggctctgctgtatctgttgtacatactgggattctgtaaaggacattatctggggtgttgtatgtatttttgtgtgttctgctttttttaaataaacttgaaaagctactgaactaatt

SEQ ID NO: 317708 - DNA, 2170 bp, Homo sapiens
gcgcggcggccgccgaaggggcgggatccgaggcaagcgttggttctgtgcgcctcaggagtataatgtctcaggaaggcgattatgggaggtggaccatatctagtagtgatgaaagtgaggaagaaaagccaaaaccagacaagccatctacctcttctcttctctgtgccaggcaaggagcagcaaatgagcccaggtacacctgttccgaggcccagaaagctgcacacaagaggaaaatatcacctgtgaaattcagcaatacagattcagttttacctcccaaaaggcagaaaagcggttcccaggaggacctcggctggtgtctgtccagcagtgatgatgagctgcaaccagaaatgccgcagaagcaggctgagaaagtggtgatcaaaaaggagaaagacatctctgctcccaatgacggcactgcccaaagaactgaaaatcatggcgctcccgcctgccacaggctcaaagaggaggaagacgagtatgagacatcaggggagggccaggacatttgggacatgctggataaagggaaccccttccagttttacctcactagagtctctggagttaagccaaagtataactctggagccctccacatcaaggatattttatctcctttatttgggacgcttgtttcttcagctcagtttaactactgctttgacgtggactggctcgtaaaacagtatccaccagagttcaggaagaagccaatcctgcttgtgcatggtgataagcgagaggctaaggctcacctccatgcccaggccaagccttacgagaacatctctctctgccaggcaaagttggatattgcgtttggaacacaccacacgaaaatgatgctgctgctctatgaagaaggcctccgggttgtcatacacacctccaacctcatccatgctgactggcaccagaaaactcaaggaatatggttgagccccttatacccacgaattgctgatggaacccacaaatctggagagtcgccaacacattttaaagctgatctcatcagttacttgatggcttataatgccccttctctcaaggagtggatagatgtcattcacaagcacgatctctctgaaacaaatgtttatcttattggttcaaccccaggacgctttcaaggaagtcaaaaagataattggggacattttagacttaagaagcttctgaaagaccatgcctcatccatgcctaacgcagagtcctggcctgtcgtaggtcagttttcaagcgttggctccttgggagccgatgaatcaaagtggttatgttctgagtttaaagagagcatgctgacactggggaaggaaagcaagactccaggaaaaagctctgttcctctttacttgatctatccttctgtggaaaatgtgcggaccagtttagaaggatatcctgctgggggctctcttccctatagcatccagacagctgaaaaacagaattggctgcattcctattttcacaaatggtcagctgagacttctggccgcagcaatgccatgccacatattaagacatatatgaggccttctccagacttcagtaaaattgcttggttccttgtcacaagcgcaaatctgtccaaggctgcctggggagcattggagaagaatggcacccagctgatgatccgctcctacgagctcggggtccttttcctcccttcagcatttgcccctgcgaagagaataaaggatgaagtggaggcttcgttctctggtaacgcatggataagctgaggaaacagacactgggtctagacagtttcaaagtgaaacagaagttcttcgctggcagccaggagccaatggccacctttcctgtgccatatgatttgcctccagaactgtatggaagtaaagatcggccatggatatggaacattccttatgtcaaagcaccggatacgcatgggaacatgtgggtgccctcctgagaatcttgaggcactgtgaaatttaagtgtaagacattgagccacaaacatggaatctcttctttgtactggatgtccacttcccttaaagtcttatttgcacccttacaaaatctttccaaaggtcactcttatgaatggatgttggttatacttttaatggacattaacattcctaataaagtattagtttcttaa

SEQ ID NO: 317709 - DNA, 2461 bp, Homo sapiens
gcgcggcggccgccgaaggggcgggatccgaggcaagcgttggttctgtgcgcctcaggtacgtgttgggcggcagtgggcgcggactcggtgcggtctctcgcgggctgcggtcgggcccgggatcctgctcctggccgagtcgcggtgcgcgggctgctggggtccggcagggctggaggcggaccgcgaggaagcggcgcggccgggaagatggggcagggtcgcctcggccccggggcctcggtttcctccgatcacagcgcctcagggggcgcgcacgggcgctgcggagacctgtgtcctgccggggcgcggcgctaggggcccctgctcgggtttttattcccagacctaagcttacaggagtataatgtctcaggaaggcgattatgggaggtggaccatatctagtagtgatgaaagtgaggaagaaaagccaaaaccagacaagccatctacctcttctcttctctgtgccaggcaaggagcagcaaatgagcccaggtacacctgttccgaggcccagaaagctgcacacaagaggaaaatatcacctgtgaaattcagcaatacagattcagttttacctcccaaaaggcagaaaagcggttcccaggaggacctcggctggtgtctgtccagcagtgatgatgagctgcaaccagaaatgccgcagaagcaggctgagaaagtggtgatcaaaaaggagaaagacatctctgctcccaatgacggcactgcccaaagaactgaaaatcatggcgctcccgcctgccacaggctcaaagaggaggaagacgagtatgagacatcaggggagggccaggacatttgggacatgctggataaagggaaccccttccagttttacctcactagagtctctggagttaagccaaagtataactctggagccctccacatcaagggtaagaggatgctgggtgtcaaggagctgttgaattgcccttgagagtctctcctccgtgaaacaaggagggcagcctagaatagtttctgagaactcttctttgtgttcttaactactttcaggaaaaaaattcttgacaggcaagtgcattagtataacagcagactgtttacttaactcaggcagagcgtgtgttctcaaaaccctgtagctcaaccccttatatcacttagcacgatgtttagcattatttaactttttaagatgaagcttgatgagtaacagtttatcaacaaggtagcaaatacttgacaacagtagtagttctccatgggccctggaccagcagcctcagcatcacctgcaacttgttaaaatgcaaattctcgggccccattcccgattcattaaattggactctgagggtgagatcctgcagtctgtgttttcacgagcccttgaggggattctactgcccagtcaagtttgagaaccactgcttaaaagcctggttttagttcctggtgaagaagaagaagaaaaaacaaaatagtgcctgagtgcaaatagatgtttcagttatggatcaaaagatggccttagtttgctctccttattcctcagggagcacctgcaggaggaagagcaggagctctagaatctgctttctggcctcaccactcatttgctgtatggattgttaacacaggacctaacattctctgaattttagtttgctcatctttaaactggaaatgcagaaaaatgggagcaaatatatgaagtaaccagtgtaatatattcacatggcagatacaataaacattattacccttatttcagatttttttcctgtcccatatttaagaatagtaatgttcactgtcagcagtgttgttctttttttatatatccagtatataattgtatattgtgtgtgatgtatacatgttggagtatttcatactgtagagtgttctacaggttgttttctttttgagaatctcttatcttggtactttgtcaagttttttgtttgtttgagacagactgacaaatatttagagaattttgccaagttttgctctatataataaaataaccggcaattagcaccaaggtattgtggtaacatgataggagctcttacatatattttctcctttaatcctcaggacagtcttatgagtagatgttacaatcgtattccttggataaatgatgcatctgcactttagaaaagtgcccaaggtcgtagagctggtaatgacattctggcatcagaatccatgctgtttgctatagcactctaccatgtgccataattgtagatggcttagaagatctcatggaggaagggggacttcaaaaggcctttgaaagatgggtaaaatttagaagggaagaaatacatgctggtgggggcaaatggaagaatatttgcagtttatctctgcaactctcccaataaggtagaaccttccttaacaatttttttgttgttgttctctgaaaatcgttctaccc

SEQ ID NO: 317710 - DNA, 982 bp, Homo sapiens
gcgcggcggccgccgaaggggcgggatccgaggcaagcgttggttctgtgcgcctcaggtacgtgttgggcggcagtgggcgcggactcggtgcggtctctcgcgggctgcggtcgggcccgggatcctgctcctggccgagtcgcggtgcgcgggctgctggggtccggcagggctggaggcggaccgcgaggaagcggcgcggccgggaagatggggcagggtcgcctcggccccggggcctcggtttcctccgatcacagcgcctcagggggcgcgcacgggcgctgcggagacctgtgtcctgccggggcgcggcgctaggggcccctgctcgggtttttattcccagacctaagcttacaggcagagttggagcacacagctgtattaaaaaggcaaatcgaaggccgggcgcggtgactcacgcctgtcatcctagcactttgggaggccgaggcggctgaatcacttgaggttaggagtttgagatcagcccgggcaacatggtgaaaccccgtctctacaaaaatagaaaaattagccgagcgtgatggtggatgcctgtaatcctagctcctcgggaggctaaggtaggagaattgcttgaacctgggaggcagagaggttggagtgagccgagattgcgccattgcgctccagcctgagcggcagagcgagactctgtctcaaaaaaataaatgtaaatcggactccccttcttaaagccctcagtggggtcccattgatcattgcataaaatccaatttctttaacaagtcttctcccctcacccgcttcggaccactgcctgccttgcctaagtcctttcttatgacctctttcccacctctgccggctgggttccctctacttgggaatgctcttcaccccatcatttagacagcaggttccttttggccctctgggtctcatttatatgttactttttaagtatattccaaaggtcacccctattttt

SEQ ID NO: 317711 - DNA, 1166 bp, Homo sapiens
cttttctgcgggtcttggcacctttcttggccacagatttctgggttacagagcatgtgtgtctgaggcattgcaggcagaaaagggtggccgacgtgacctctagctggactgctgggcaggggagctgtcctagataaaattggaaagcaccttgtccaatgggaggacctaagtgggagagtgagagtcctgctttgagaagctaagatggtggatggtgcagaaacagtgacccagagacaggtggacaaagaattcggggactgatgggaactgagcttgggatccagactgaaactgattccagactgacctctagcacccaggacccagacacagggccatgggaccccagcatttgagacttgtgcagctgttctgccttctaggggccatctccactctgcctcgggctggagctcttttgtgctatgaagcaacagcctcaagattcagagctgttgctttccataactggaagtggcttctgatgaggaacatggtgtgtaagctgcaagagggctgcgaggagacgctagtgttcattgagacagggactgcaaggggagttgtgggctttaaaggctgcagctcgtcttcgtcttaccctgcgcaaatctcctaccttgtttccccacccggagtgtccattgcctcctacagtcgcgtctgccggtcttatctctgcaacaacctcaccaatttggagccttttgtgaaactcaaggccagcactcctaagtctatcacatctgcgtcctgtagctgcccgacctgtgtgggcgagcacatgaaggattgcctcccaaattttgtcaccactaattcttgccccttggctgcttctacgtgttacagttccaccttaaaatttcaggcagggtttctcaataccaccttcctcctcatggggtgtgctcgtgaacataaccagcttttagcagattttcatcatattgggagcatcaaagtgactgaggtcctcaacatcttagagaagtctcagattgttggtgcagcatcctccaggcaagatcctgcttggggtgtcgtcttaggcctcctgtttgccttcagggactgaccatctagctgcacccgacaagcacccagactctttcacataacaaataaaatagcagagttccctttaaaaaatgtcc

SEQ ID NO: 317712 - DNA, 457 bp, Homo sapiens
ttttttttttgcttgaggatttcacttcaatcttttctggttgcgtctccacttgtactcagcttgttaggtccaggtccagttgttctgcatctgaggctggcgtgtgctgtcttctctgattggcctaatctccctcacccccgtgagatctgttgtcagccttcgtttctctttcctgtgtcccagcttttctgcgggtcttggcacctttcttggccacagatttctgggttacagagcatgtgtgtctgaggcattgcaggcagaaaagggtggccgacgtgacctctagctggactgctgggcaggggagctgtcctagataaaattggaaaggttgggtggcgcttatctggggtggggtggggtgtggtcgggggaggcttaaaggccagctaaagaggttgaacttgatcctttaggtagtggagagagagtgagaggaagtgtgtgt

SEQ ID NO: 317713 - DNA, 1061 bp, Homo sapiens
cttttctgcgggtcttggcacctttcttggccacagatttctgggttacagagcatgtgtgtctgaggcattgcaggcagaaaagggtggccgacgtgacctctagctggactgctgggcaggggagctgtcctagataaaattggaaagcaccttgtccaatgggaggacctaagtgggagagtgagagtcctgctttgagaagctaagatggtggatggtgcagaaacagtgacccagagacaggtggacaaagaattcggggactgatgggaactgagcttgggatccagactgaaactgattccagactgacctctagcacccaggacccagacacagggccatgggaccccagcatttgagacttgtgcagctgttctgccttctaggggccatctccactctgcctcgtatgtcctgtggggctggatgctataagacccagaaagggactgcaaggggagttgtgggctttaaaggctgcagctcgtcttcgtcttaccctgcgcaaatctcctaccttgtttccccacccggagtgtccattgcctcctacagtcgcgtctgccggtcttatctctgcaacaacctcaccaatttggagccttttgtgaaactcaaggccagcactcctaagtctatcacatctgcgtcctgtagctgcccgacctgtgtgggcgagcacatgaaggattgcctcccaaattttgtcaccactaattcttgccccttggctgcttctacgtgttacagttccaccttaaaatttcaggcagggtttctcaataccaccttcctcctcatggggtgtgctcgtgaacataaccagcttttagcagattttcatcatattgggagcatcaaagtgactgaggtcctcaacatcttagagaagtctcagattgttggtgcagcatcctccaggcaagatcctgcttggggtgtcgtcttaggcctcctgtttgccttcagggactgaccatctagctgcacccgacaagcacccagactctttcacataacaaataaaatagcagagttccctttaaaaaatgtcc

SEQ ID NO: 317714 - DNA, 712 bp, Homo sapiens
gccagtagtactttccggcgttgttgaccctatttcccgtgctgcaccgcagcccctttctcttccggttctaggcgcttcgggagccgcggcttatggtgcagacatggccaagtccaagaaccacaccacacacaaccagtcccgaaaatggcacagaaatggtatcaagaaaccccgatcacaaagatacgaatctcttaagggggtggaccccaagttcctgaggaacatgcgctttgccaagaagcacaacaaaaagggcctaaagaagatgcaggccaacaatgccaaggccatgagtgcacgtgccgaggctatcaaggccctcgtaaagcccaaggaggttaagcccaagatcccaaagggtgtcagccgcaagctcgatcgacttgcctacattgcccaccccaagcttgggaagcgtgctcgtgcccgtattgccaaggggctcaggctgtgccggccaaaggcaaggccaaggccaaggccaaggccaaggatcaaaccaaggcccaggctgcagccccagcttcagttccagctcaggctcccaaacgtacccaggcccctacaaaggcttcagagtagatatctctgccaacatgaggacagaaggactggtgcgaccccccacccccgcccctgggctaccatctgcatggggctggggtcctcctgtgctatttgtacaaataaacctgaggcagga

SEQ ID NO: 317715 - DNA, 668 bp, Homo sapiens
tatacggcaggtagcgaggctgggtggcgggcgcttcgggagccgcggcttatggtgcagacatggccaagtccaagaaccacaccacacacaaccagtcccgaaaatggcacagaaatggtatcaagaaaccccgatcacaaagatacgaatctcttaagggggtggaccccaagttcctgaggaacatgcgctttgccaagaagcacaacaaaaagggcctaaagaagatgcaggccaacaatgccaaggccatgagtgcacgtgccgaggctatcaaggccctcgtaaagcccaaggaggttaagcccaagatcccaaagggtgtcagccgcaagctcgatcgacttgcctacattgcccaccccaagcttgggaagcgtgctcgtgcccgtattgccaaggggctcaggctgtgccggccaaaggcaaggccaaggccaaggccaaggccaaggatcaaaccaaggcccaggctgcagccccagcttcagttccagctcaggctcccaaacgtacccaggcccctacaaaggcttcagagtagatatctctgccaacatgaggacagaaggactggtgcgaccccccacccccgcccctgggctaccatctgcatggggctggggtcctcctgtgctatttgtacaaataaacctgaggcagga

SEQ ID NO: 317716 - DNA, 811 bp, Homo sapiens
tatacggcaggtagcgaggctgggtggcgggcgcttcgggagccgcggcttatggtgcagacatggccaagtccaagaaccacaccacacacaaccagtcccgaaaatggcacagaaatggtatcaagaaaccccgatcacaaagatacgaatctcttaagggggtggaccccaagttcctgaggaacatgcgctttgccaagaagcacaacaaaaagggcctaaagaagatgcaggccaacaatgccaaggccatgagtgcacgtgccgaggctatcaaggccctcgtaaagcccaaggaggttaagcccaagatcccaaagggtgtcagccgcaagctcgatcgacttgcctacattgcccaccccaagcttgggaagcgtgctcgtgcccgtattgccaaggggctcaggctgtgccggccaaaggcaaggccaaggccaaggccaaggatcaaaccaaggcccaggctgcagccccagcttcagttccagctcaggctcccaaacgtacccaggcccctacaaaggcttcagagtagatatctctgccaacatgaggacagaaggactggtgcgaccccccacccccgcccctgggctaccatctgcatggggctggggtcctcctgtgctatttgtacaaataaacctgaggcaggaaaaacaaaacacaaaaaaaaaaaaaaaacttgcgggggccttattttcggggggggggaaaaagggtttgaaaaggggctggggccaatggtggttctccggacccacttttttggtacaagggggaaaattgccgggccccaaagggg

SEQ ID NO: 317717 - DNA, 662 bp, Homo sapiens
tatacggcaggtagcgaggctgggtggcgggcgcttcgggagccgcggcttatggtgcagacatggccaagtccaagaaccacaccacacacaaccagtcccgaaaatggcacagaaatggtatcaagaaaccccgatcacaaagatacgaatctcttaagggggtggaccccaagttcctgaggaacatgcgctttgccaagaagcacaacaaaaagggcctaaagaagatgcaggccaacaatgccaaggccatgagtgcacgtgccgaggctatcaaggccctcgtaaagcccaaggaggttaagcccaagatcccaaagggtgtcagccgcaagctcgatcgacttgcctacattgcccaccccaagcttgggaagcgtgctcgtgcccgtattgccaaggggctcaggctgtgccggccaaaggcaaggccaaggccaaggccaaggatcaaaccaaggcccaggctgcagccccagcttcagttccagctcaggctcccaaacgtacccaggcccctacaaaggcttcagagtagatatctctgccaacatgaggacagaaggactggtgcgaccccccacccccgcccctgggctaccatctgcatggggctggggtcctcctgtgctatttgtacaaataaacctgaggcagga

SEQ ID NO: 317718 - DNA, 816 bp, Homo sapiens
  misc_feature (37)..(37): n is a, c, g, or t
  misc_feature (719)..(719): n is a, c, g, or t
  misc_feature (721)..(721): n is a, c, g, or t
gaccacgcgtcgcggacgcgtgggtcgaccacgcgtncggacccacgcgtccgggcgcttcgggagccgcggcttatggtgcagacatggccaagtccaagaaccacaccacacacaaccagtcccgaaaatggcacagaaatggtatcaagaaaccccgatcacaaagatacgaatctcttaagggggtggaccccaagttcctgaggaacatgcgctttgccaagaagcacaacaaaaagggcctaaagaagatgcaggccaacaatgccaaggccatgagtgcacgtgccgaggctatcaaggccctcgtaaagcccaaggaggttaagcccaagatcccaaagggtgtcagccgcaagctcgatcgacttgcctacattgcccaccccaagcttgggaagcgtgctcgtgcccgtattgccaaggggctcaggctgtgccggccaaaggcaaggccaaggccaaggccaaggatcaaaccaaggcccaggctgcagccccagcttcagttccagctcaggctcccaaacgtacccaggcccctacaaaggcttcagagtagatatctctgccaacatgaggacagaaggactggtgcgaccccccacccccgcccctgggctaccatctgcatggggctggggtcctcctgtgctatttgtacaaataaacctgaggcaggaaaaacaaaacacaaaaaaaaaaaaaaaaccaananaaaatatttgcgggcgcacaaaaaggtagaaagacagcaaaagacaaaaggataagacacatattacaaagaggaaaatgcaagcacaaaaaaca

SEQ ID NO: 317719 - DNA, 756 bp, Homo sapiens
ccgatgccatccgcgacttacgggtggcggcggggcgcgggctgcggagaggactggtggtgcagacatggccaagtccaagaaccacaccacacacaaccagtcccgaaaatggcacagaaatggtatcaagaaaccccgatcacaaagatacgaatctcttaagggggtggaccccaagttcctgaggaacatgcgctttgccaagaagcacaacaaaaagggcctaaagaagatgcaggccaacaatgccaaggccatgagtgcacgtgccgaggctatcaaggccctcgtaaagcccaaggaggttaagcccaagatcccaaagggtgtcagccgcaagctcgatcgacttgcctacattgcccaccccaagcttgggaagcgtgctcgtgcccgtattgccaaggggctcaggctgtgccggccaaaggcaaggccaaggccaaggccaaggatcaaaccaaggcccaggctgcagccccagcttcagttccagctcaggctcccaaacgtacccaggcccctacaaaggcttcagagtagatatctctgccaacatgaggacagaaggactggtgcgaccccccacccccgcccctgggctaccatctgcatggggctggggtcctcctgtgctatttgtacaaataaacctgaggcaggaaaaaaaaaatcataatacaaaacctaacttccaaccaaccctccaacccaaaccacacaacaacacaaaccatcaccccaaccacaaca

SEQ ID NO: 317720 - DNA, 133 bp, Homo sapiens
tcaagcttctaacgatgtacggggacatgaggacagaaggactggtgcgaccccccacccccgcccctgggctaccatctgcatggggctggggtcctcctgtgctatttgtacaaataaacctgaggcagga

SEQ ID NO: 317721 - DNA, 385 bp, Homo sapiens
ggagacaggaatgcttttccacagtgttatactaatttatactaccaccagttgtgtcaaagtgttccttttccaccacatccatgcagatatctatttgtttttttttttactttttaatagtagctattttttcaggagtaaagtggtatctcattgtggttttaatttgcatttccctgatgattagtgatgttgagcaatttctcatatgtttgttggctgtttgtatgacttcttttgcaaattgtccattcatgtcctttgcccaatttttgatgaggacagaaggactggtgcgaccccccacccccgcccctgggctaccatctgcatggggctggggtcctcctgtgctatttgtacaaataaacctgaggcagga

SEQ ID NO: 317722 - DNA, 400 bp, Homo sapiens
  misc_feature (35)..(36): n is a, c, g, or t
gcggcgcctactactactactaaattcgcggccgnncgacgcccgtcgacgatcccaaagggtgtcagccgcaagctcgatcgacttgcctacattgcccaccccaagcttgggaagcgtgctcgtgcccgtattgccaaggggctcaggctgtgccggccaaaggccaaggccaaggccaaggccaaggatcaaaccaaggcccaggctgcagccccagcttcagttccagctcaggctcccaaacgtacccaggcccctacaaaggcttcagagtagatatctctgccaacatgaggacagaaggactggtgcgaccccccacccccgcccctgggctaccatctgcatggggctggggtcctcctgtgctatttgtacaaataaacctgaggcagga

SEQ ID NO: 317723 - DNA, 303 bp, Homo sapiens
gggggtgtagctcagtggagagcatttgactggaactgaagctggggctcaggctgtgccggccaaaggccaaggccaaggccaaggccaaggatcaaaccaaggcccaggctgcagccccagcttcagttccagctcaggctcccaaacgtacccaggcccctacaaaggcttcagagtagatatctctgccaacatgaggacagaaggactggtgcgaccccccacccccgcccctgggctaccatctgcatggggctggggtcctcctgtgctatttgtacaaataaacctgaggcagga

SEQ ID NO: 317724 - DNA, 649 bp, Homo sapiens
gaattcggcacgcgcttcgggagccgcggcttatggtgcagacatggccaagtccaagaaccacaccacacacaaccagtcccgaaaatggcacagaaatggtatcaagaaaccccgatcacaaagatacgaatctcttaagggggtggaccccaagttcctgaggaacatgcgctttgccaagaagcacaacaaaaagggcctaaagaagatgcaggccaacaatgccaaggccatgagtgcacgtgccgaggctatcaaggccctcgtaaagcccaaggaggttaagcccaagatcccaaagggtgtcagccgcaagctcgatcgacttgcctacattgcccaccccaagcttgggaagcgtgctcgtgcccgtattgccaaggggctcaggctgtgccggccaaaggcaaggccaaggccaaggccaaggccaaggatcaaaccaaggcccaggctgcagccccagcttcagttccagctcaggctcccaaacgtacccaggcccctacaaaggcttcagagtagatatctctgccaacatgaggacagaaggactggtgcgaccccccacccccgcccctgggctaccatctgcatggggctggggtcctcctgtgctatttgtacaaataaacctgaggcagga

SEQ ID NO: 317725 - DNA, 747 bp, Homo sapiens
gccagtagtactttccggcgttgttgaccctatttcccgtgctgcaccgcagcccctttctcttccggttctaggcgcttcgggagccgcggcttatggtgcagacatggccaagtccaagaaccacaccacacacaaccagtcccgaaaatggcacagaaatggtatcaagaaaccccgatcacaaagatacgaatctcttaagggggtggaccccaagttcctgaggaacatgcgctttgccaagaagcacaacaaaaagggcctaaagaagatgcaggccaacaatgccaaggccatgagtgcacgtgccgaggctatcaaggccctcgtaaagcccaaggaggttaagcccaagatcccaaagggtgtcagccgcaagctcgatcgacttgcctacattgcccaccccaagcttgggaagcgtgctcgtgcccgtattgccaaggggctcaggctgtgccggccaaaggcaaggccaaggccaaggccaaggccaaggatcaaaccaaggcccaggctgcagccccagcttcagttccagctcaggctcccaaacgtacccaggcccctacaaaggcttcagagtagatatctctgccaacatgaggacagaaggactggtgcgaccccccacccccgcccctgggctaccatctgcatggggctggggtcctcctgtgctatttgtacaaataaacctgaggcaggagcaggatttgttagcctctgtctatgatcctgggg

SEQ ID NO: 317726 - DNA, 1574 bp, Homo sapiens
gcttttctcttccggttctaggcgcttcgggagccgcggcttatggtgcagacatggccaagtccaagaaccacaccacacacaaccagtcccgaaaatggcacagaaatggtatcaagaaaccccgatcacaaagatacgaatctcttaagggggtgagtgcactgaatcacatggaagtgtcttttcttggttccaggtgcacagtcaaggcctctcatgtagtttttctctagctttggcttctgcctgagcacagcctaactggcccacccaaagcctgcaattcctttttctaccctaccagacccataataaagctttccttggtctccacagcctgaagtgtaaccctctggtcagggtgtaacctgcctcctgagggcagtttggctatctcccttgcttggcagtggcacttagggtaaggagtggccttgtctgagtgcgtgcagggcacattcccacactgaccagccttatgacctccatctgacccagtgctggagttggggtcagcttctcttcctgtgtcagggggttctaaggattagctgagaaggctggagggtctaggggagagctgagcatgtccccagtctgttccttccctttacttttgctctctgttccgtggagtgaatcacaaactctgagcctcagtttccccatatcccaccttggctataagtcttttggaccagacttggtatttaattgacaccttcttctaaagaggggagggggtgtccctgaggggatgtcaggaaaaaacttggtcgaacccctgctgtaggaagttgaagccccacaaccttggcagacagggcagcaaagcagcttgtaattttgttcttgaaggaggtctgcacagcattacccaggtggcgtattggctccctggggtggtggtacactttctctggaaatagtttcaagaggttgggtatttccacatttgaggttgacttgatgctgtctttagaatgctgggtacccctatggagaggggcagcagggagagacttggggacccacatgctgccacctgtacctttcctgcttttcaggtggaccccaagttcctgaggaacatgcgctttgccaagaagcacaacaaaaagggcctaaagaagatgcaggccaacaatgccaaggccatgagtgcacgtgccgaggctatcaaggccctcgtaaagcccaaggaggttaagcccaagatcccaaagggtgtcagccgcaagctcgatcgacttgcctacattgcccaccccaagcttgggaagcgtgctcgtgcccgtattgccaaggggctcaggctgtgccggccaaaggcaaggccaaggccaaggccaaggccaaggatcaaaccaaggcccaggctgcagccccagcttcagttccagctcaggctcccaaacgtacccaggcccctacaaaggcttcagagtagatatctctgccaacatgaggacagaaggactggtgcgaccccccacccccgcccctgggctaccatctgcatggggctggggtcctcctgtgctatttgtacaaataaacctgaggcagga

SEQ ID NO: 317727 - DNA, 1882 bp, Homo sapiens
gaattcggcacgcgcttcgggagccgcggcttatggtgcagacatggccaagtccaagaaccacaccacacacaaccagtgtaagttttttgggccctgcctacatcccagaccctggcaaggactggttcaggcaaactgggacagagatgaaggggcacgtttccattgtgggcctgaggctgattgatttcacccagtaataactttagggtttataggtttagagatctacttgagatacagagtgttttgcatttagtagtaagggtttcccatatctcaagtgtagctgctgtaggaagtgttggttctcccagacttgccagctgtgatgttgggtggtcttattagaggaaagttctttgttggcttaattccctttttttctcccacagcccgaaaatggcacagaaatggtatcaagaaaccccgatcacaaagatacgaatctcttaagggggtgagtgcactgaatcacatggaagtgtcttttcttggttccaggtgcacagtcaaggcctctcatgtagtttttctctagctttggcttctgcctgagcacagcctaactggcccacccaaagcctgcaattcctttttctaccctaccagacccataataaagctttccttggtctccacagcctgaagtgtaaccctctggtcagggtgtaacctgcctcctgagggcagtttggctatctcccttgcttggcagtggcacttagggtaaggagtggccttgtctgagtgcgtgcagggcacattcccacactgaccagccttatgacctccatctgacccagtgctggagttggggtcagcttctcttcctgtgtcagggggttctaaggattagctgagaaggctggagggtctaggggagagctgagcatgtccccagtctgttccttccctttacttttgctctctgttccgtggagtgaatcacaaactctgagcctcagtttccccatatcccaccttggctataagtcttttggaccagacttggtatttaattgacaccttcttctaaagaggggagggggtgtccctgaggggatgtcaggaaaaaacttggtcgaacccctgctgtaggaagttgaagccccacaaccttggcagacagggcagcaaagcagcttgtaattttgttcttgaaggaggtctgcacagcattacccaggtggcgtattggctccctggggtggtggtacactttctctggaaatagtttcaagaggttgggtatttccacatttgaggttgacttgatgctgtctttagaatgctgggtacccctatggagaggggcagcagggagagacttggggacccacatgctgccacctgtacctttcctgcttttcaggtggaccccaagttcctgaggaacatgcgctttgccaagaagcacaacaaaaagggcctaaagaagatgcaggccaacaatgccaaggccatgagtgcacgtgccgaggctatcaaggccctcgtaaagcccaaggaggttaagcccaagatcccaaagggtgtcagccgcaagctcgatcgacttgcctacattgcccaccccaagcttgggaagcgtgctcgtgcccgtattgccaaggggctcaggctgtgccggccaaaggcaaggccaaggccaaggccaaggccaaggatcaaaccaaggcccaggctgcagccccagcttcagttccagctcaggctcccaaacgtacccaggcccctacaaaggcttcagagtagatatctctgccaacatgaggacagaaggactggtgcgaccccccacccccgcccctgggctaccatctgcatggggctggggtcctcctgtgctatttgtacaaataaacctgaggcagga

SEQ ID NO: 317728 - DNA, 820 bp, Homo sapiens
gcaaatggcaggacgaggctggtgtaaattcggacaggggcgcttcgggagccgcggcttatggtgcagacatggccaagtccaagaaccacaccacacacaaccagtcccgaaaatggcacagaaatggtatcaagaaaccccgatcacaaagatacgaatctcttaagggggtggaccccaagttcctgaggaacatgcgctttgccaagaagcacaacaaaaagggcctaaagaagatgcaggccaacaatgccaaggccatgagtgcacgtgccgaggctatcaaggccctcgtaaagcccaaggaggttaagcccaagatcccaaagggtgtcagccgcaagctcgatcgacttgcctacattgcccaccccaagcttgggaagcgtgctcgtgcccgtattgccaaggggctcaggctgtgccggccaaaggcaaggccaaggccaaggccaaggatcaaaccaaggcccaggctgcagccccagcttcagttccagctcaggctcccaaacgtacccaggcccctacaaaggcttcagagtagatatctctgccaacatgaggacagaaggactggtgcgaccccccacccccgcccctgggctaccatctgcatggggctggggtcctcctgtgctatttgtacaaataaacctgaggcaggaaaaacaaaacacaaaaaaaaaaaaaaaacttgcgggggccttattttcggggggggggaaaaagggtttgaaaaggggctggggccaatggtggttctccggacccacttttttggtacaagggggaaaattgccgggccccaaagggg

SEQ ID NO: 317729 - DNA, 818 bp, Homo sapiens
gtagcctgaacattcgtgtcctctcttccggttctaggcgcttcgggagccgcggcttatggtgcagacatggccaagtccaagaaccacaccacacacaaccagtcccgaaaatggcacagaaatggtatcaagaaaccccgatcacaaagatacgaatctcttaagggggtggaccccaagttcctgaggaacatgcgctttgccaagaagcacaacaaaaagggcctaaagaagatgcaggccaacaatgccaaggccatgagtgcacgtgccgaggctatcaaggccctcgtaaagcccaaggaggttaagcccaagatcccaaagggtgtcagccgcaagctcgatcgacttgcctacattgcccaccccaagcttgggaagcgtgctcgtgcccgtattgccaaggggctcaggctgtgccggccaaaggcaaggccaaggccaaggccaaggatcaaaccaaggcccaggctgcagccccagcttcagttccagctcaggctcccaaacgtacccaggcccctacaaaggcttcagagtagatatctctgccaacatgaggacagaaggactggtgcgaccccccacccccgcccctgggctaccatctgcatggggctggggtcctcctgtgctatttgtacaaataaacctgaggcaggaaaaacaaaacacaaaaaaaaaaaaaaaacttgcgggggccttattttcggggggggggaaaaagggtttgaaaaggggctggggccaatggtggttctccggacccacttttttggtacaagggggaaaattgccgggccccaaagggg

SEQ ID NO: 317730 - DNA, 934 bp, Homo sapiens
ggcctatgtcgcgggcctgtaccggggtcggctgttctccttgcgggttctaggcgcttcgggagccgcggcttatggtgcagacatggccaagtccaagaaccacaccacacacaaccagtcccgaaaatggcacagaaatggtatcaagaaaccccgatcacaaagatacgaatctcttaagggggtggaccccaagttcctgaggaacatgcgctttgccaagaagcacaacaaaaagggcctaaagaagatgcaggccaacaatgccaaggccatgagtgcacgtgccgaggctatcaaggccctcgtaaagcccaaggaggttaagcccaagatcccaaagggtgtcagccgcaagctcgatcgacttgcctacattgcccaccccaagcttgggaagcgtgctcgtgcccgtattgccaaggggctcaggctgtgccggccaaaggcaaggccaaggccaaggccaaggatcaaaccaaggcccaggctgcagccccagcttcagttccagctcaggctcccaaacgtacccaggcccctacaaaggcttcagagtagatatctctgccaacatgaggacagaaggactggtgcgaccccccacccccgcccctgggctaccatctgcatggggctggggtcctcctgtgctatttgtacaaataaacctgaggcaggaaaacaaaaaacaaaacaaaaaaaaaaaaaaaaaaaaaggggggggcgcaaaaaaaatacaccaggggagcacaagacaaccggtaacccagaatccgtgatcaccagaggggcccccaaaaggaggctgcgcatatcacgacaccgccagcccgcgggttgcaaccgccgcggcccggggacaacgcgcacacccgggcacctgggcacaggcacccaaacacagggggggcgacacacgggcaaacgc

SEQ ID NO: 317731 - DNA, 816 bp, Homo sapiens
  misc_feature (780)..(780): n is a, c, g, or t
  misc_feature (790)..(790): n is a, c, g, or t
  misc_feature (792)..(793): n is a, c, g, or t
  misc_feature (798)..(798): n is a, c, g, or t
  misc_feature (805)..(805): n is a, c, g, or t
  misc_feature (812)..(812): n is a, c, g, or t
gccagtagtactttccggcgttgttgaccctatttcccgtgctgcaccgcagcccctttctcttccggttctaggcgcttcgggagccgcggcttatggtgcagacatggccaagtccaagaaccacaccacacacaaccagtcccgaaaatggcacagaaatggtatcaagaaaccccgatcacaaagatacgaatctcttaagggggtggaccccaagttcctgaggaacatgcgctttgccaagaagcacaacaaaaagggcctaaagaagatgcaggccaacaatgccaaggccatgagtgcacgtgccgaggctatcaaggccctcgtaaagcccaaggaggttaagcccaagatcccaaagggtgtcagccgcaagctcgatcgacttgcctacattgcccaccccaagcttgggaagcgtgctcgtgcccgtattgccaaggggctcaggctgtgccggccaaaggcaaggccaaggccaaggccaaggatcaaaccaaggcccaggctgcagccccagcttcagttccagctcaggctcccaaacgtacccaggcccctacaaaggcttcagagtagatatctctgccaacatgaggacagaaggactggtgcgaccccccacccccgcccctgggctaccatctgcatggggctggggtcctcctgtgctatttgtacaaataaacctgaggcaggaaaaaaaaaaaaaaaaaaaaaaaaaaaaaaaaaaaaaaaaaaaaaaaaaaaaaaaaaaagaaaaaaagaaagaanaagaacaaananngaagnaaaaganagaaaanaaga

SEQ ID NO: 317732 - DNA, 795 bp, Homo sapiens
gccagtagtactttccggcgttgttgaccctatttcccgtgctgcaccgcagcccctttctcttccggttctaggcgcttcgggagccgcggcttatggtgcagacatggccaagtccaagaaccacaccacacacaaccagtcccgaaaatggcacagaaatggtatcaagaaaccccgatcacaaagatacgaatctcttaagggggtggaccccaagttcctgaggaacatgcgctttgccaagaagcacaacaaaaagggcctaaagaagatgcaggccaacaatgccaaggccatgagtgcacgtgccgaggctatcaaggccctcgtaaagcccaaggaggttaagcccaagatcccaaagggtgtcagccgcaagctcgatcgacttgcctacattgcccaccccaagcttgggaagcgtgctcgtgcccgtattgccaaggggctcaggctgtgccggccaaaggcaaggccaaggccaaggccaaggatcaaaccaaggcccaggctgcagccccagcttcagttccagctcaggctcccaaacgtacccaggcccctacaaaggcttcagagtagatatctctgccaacatgaggacagaaggactggtgcgaccccccacccccgcccctgggctaccatctgcatggggctggggtcctcctgtgctatttgtacaaataaacctgaggcaggaaaaaaaaaatcataatacaaaacctaacttccaaccaaccctccaacccaaaccacacaacaacacaaaccatcaccccaaccacaaca

SEQ ID NO: 317733 - DNA, 1603 bp, Homo sapiens
  misc_feature (1567)..(1567): n is a, c, g, or t
  misc_feature (1577)..(1577): n is a, c, g, or t
  misc_feature (1579)..(1580): n is a, c, g, or t
  misc_feature (1585)..(1585): n is a, c, g, or t
  misc_feature (1592)..(1592): n is a, c, g, or t
  misc_feature (1599)..(1599): n is a, c, g, or t
gccagtagtactttccggcgttgttgaccctatttcccgtgctgcaccgcagcccctttctcttccggttctaggcgcttcgggagccgcggcttatggtgcagacatggccaagtccaagaaccacaccacacacaaccagtcccgaaaatggcacagaaatggtatcaagaaaccccgatcacaaagatacgaatctcttaagggggtggaccccaagttcctgaggaacatgcgctttgccaagaagcacaacaaaaagggcctaaagaagatgcaggccaacaatgccaaggccatgagtgcacgtgccgaggctatcaaggccctcgtaaagcccaaggaggttaagcccaagatcccaaagggtgtcagccgcaagctcgatcgacttgcctacattgcccaccccaagcttgggaagcgtgctcgtgcccgtattgccaaggggctcaggctgtgccggccaaaggcaaggccaaggccaaggccaaggatcaaaccaaggcccaggctgcagccccagcttcagttccagctcaggctcccaaacgtacccaggcccctacaaaggcttcagagtagatatctctgccaacatgaggacagaaggactggtgcgaccccccacccccgcccctgggctaccatctgcatggggctggggtcctcctgtgctatttgtacaaataaacctgaggcaggaaaacaaaaaacaaaacaaaaaaaaaaaaaaaaaaattggtgcggcgccggccttcggagccctcgagaaaagcgtttcatataagaccattccggttgggcggcgcgggggccccaggatgggaacaggtgaacactgtgggcaaaacagcgctggtcccatagggaagatccggggggcaaggaccaagagggctggggatttccctccaccaatgtaaaaaaaggcgccgcgggggggaaacaccgagaaaggggctcccgagaacacacaattcccccaaatagggaacatacagagagaggacccaaaagaggggaactcctccatcacaaggaggggagtccccaagagagaactccgcgaaatatctaaaaattaaacggcccccggacgggggggagaaaaaaagagcgaagaacgaaacgaacaaacgaaagggacgacggagagaaacgagcaacaaaagaagaaagcaaggcaagacgacaacgaacaagaacagaaccgaccgagagaggaaacaaacaggagcagcgaaaacgaaacgacaagcaaaccaacgaaaagaaacagaccacaagagaagaaagagagaggagagaaagagagaaagcgagacgcagagagagcaaggacaggagcaggagagagggacaaaggcgcaaagagagaagcaaacaagaaagagagacgtaaaggcagagaagcagacaggaaagaagaaaagaacgagaaagacgaaagcaggagataacacaacagagaaaacgaccgagcaagaagaaagaagggagaggaaggggaggaagagagaaaaaaaaaaaaaaaaaaaaaaaaaaaaagaaaaaaagaaagaanaagaacaaananngaagnaaaaganagaaaanaaga

SEQ ID NO: 317734 - DNA, 1082 bp, Homo sapiens
gccagtagtactttccggcgttgttgaccctatttcccgtgctgcaccgcagcccctttctcttccggttctaggcgcttcgggagccgcggcttatggtgcagacatggccaagtccaagaaccacaccacacacaaccagtcccgaaaatggcacagaaatggtatcaagaaaccccgatcacaaagatacgaatctcttaagggggtggaccccaagttcctgaggaacatgcgctttgccaagaagcacaacaaaaagggcctaaagaagatgcaggccaacaatgccaaggccatgagtgcacgtgccgaggctatcaaggccctcgtaaagcccaaggaggttaagcccaagatcccaaagggtgtcagccgcaagctcgatcgacttgcctacattgcccaccccaagcttgggaagcgtgctcgtgcccgtattgccaaggggctcaggctgtgccggccaaaggcaaggccaaggccaaggccaaggatcaaaccaaggcccaggctgcagccccagcttcagttccagctcaggctcccaaacgtacccaggcccctacaaaggcttcagagtagatatctctgccaacatgaggacagaaggactggtgcgaccccccacccccgcccctgggctaccatctgcatggggctggggtcctcctgtgctatttgtacaaataaacctgaggcaggaaaaaaaaaaaaaaaaaaaaaaaaaaaaaagaaaaaaaaaaaaagggggtttttttgggggggggaaaaggtaagagtctaaatgtcgttctcgacccacctttttttgtaccagggggaaaaatcggccgacccccaagaggaggcgacataaacaatcagcaacggcgcgtgttctcttttagtattctcgcgatcaacaatgataagcgaagacagacagagtacgtaagacagtatgagactaaaatcagagcagaactagcacacgcgtcaacgagtacaataagatagtcaagcagatattgtcacagaatgaagaatatcaagaagacaacacagacacagagtcaatgaaagagcactgtataggtaac

SEQ ID NO: 317735 - DNA, 779 bp, Homo sapiens
gccagtagtactttccggcgttgttgaccctatttcccgtgctgcaccgcagcccctttctcttccggttctaggcgcttcgggagccgcggcttatggtgcagacatggccaagtccaagaaccacaccacacacaaccagtcccgaaaatggcacagaaatggtatcaagaaaccccgatcacaaagatacgaatctcttaagggggtggaccccaagttcctgaggaacatgcgctttgccaagaagcacaacaaaaagggcctaaagaagatgcaggccaacaatgccaaggccatgagtgcacgtgccgaggctatcaaggccctcgtaaagcccaaggaggttaagcccaagatcccaaagggtgtcagccgcaagctcgatcgacttgcctacattgcccaccccaagcttgggaagcgtgctcgtgcccgtattgccaaggggctcaggctgtgccggccaaaggcaaggccaaggccaaggccaaggatcaaaccaaggcccaggctgcagccccagcttcagttccagctcaggctcccaaacgtacccaggcccctacaaaggcttcagagtagatatctctgccaacatgaggacagaaggactggtgcgaccccccacccccgcccctgggctaccatctgcatggggctggggtcctcctgtgctatttgtacaaataaacctgaggcaggaaaaaaaaaataattattctctgttctttacctttttattcatttctcctatcttccgtttttttaattaattt

SEQ ID NO: 317736 - DNA, 1107 bp, Homo sapiens
gccagtagtactttccggcgttgttgaccctatttcccgtgctgcaccgcagcccctttctcttccggttctaggcgcttcgggagccgcggcttatggtgcagacatggccaagtccaagaaccacaccacacacaaccagtcccgaaaatggcacagaaatggtatcaagaaaccccgatcacaaagatacgaatctcttaagggggtggaccccaagttcctgaggaacatgcgctttgccaagaagcacaacaaaaagggcctaaagaagatgcaggccaacaatgccaaggccatgagtgcacgtgccgaggctatcaaggccctcgtaaagcccaaggaggttaagcccaagatcccaaagggtgtcagccgcaagctcgatcgacttgcctacattgcccaccccaagcttgggaagcgtgctcgtgcccgtattgccaaggggctcaggctgtgccggccaaaggcaaggccaaggccaaggccaaggatcaaaccaaggcccaggctgcagccccagcttcagttccagctcaggctcccaaacgtacccaggcccctacaaaggcttcagagtagatatctctgccaacatgaggacagaaggactggtgcgaccccccacccccgcccctgggctaccatctgcatggggctggggggtacctccctggtggctaattgtgtgcacaaagttaaacccttgaagggcaagggcacaacacaagcgcatatgagcgaacacagtgccagaccgcacgactagatcgtcccaaaaacacaacgaagacagctgagagaacaaaagacacaccgggatgggagagggacgacccgggacagcgacgagaaaagaagaagacgctcggcgcagaccacccacacgcagtgggggcgccgacgagagcgcccaccgcggagagcaaggcaaagacggaggggtcccgaagacaaggccgccaccgagcgaagagaacagcccacggggatgcacaaaacaggagtgcggccggggggccagtccagcaccgcagcaagacaaaagacgccaggcgcgaggacgaacccacgatgcgtgttgtcggaacacgaaaccaccac

SEQ ID NO: 317737 - DNA, 641 bp, Homo sapiens
  misc_feature (30)..(30): n is a, c, g, or t
gattcggcacgaaggcgggcgaggacattnatggtgcagacatggccaagtccaagaaccacaccacacacaaccagtcccgaaaatggcacagaaatggtatcaagaaaccccgatcacaaagatacgaatctcttaagggggtggaccccaagttcctgaggaacatgcgctttgccaagaagcacaacaaaaagggcctaaagaagatgcaggccaacaatgccaaggccatgagtgcacgtgccgaggctatcaaggccctcgtaaagcccaaggaggttaagcccaagatcccaaagggtgtcagccgcaagctcgatcgacttgcctacattgcccaccccaagcttgggaagcgtgctcgtgcccgtattgccaaggggctcaggctgtgccggccaaaggcaaggccaaggccaaggccaaggatcaaaccaaggcccaggctgcagccccagcttcagttccagctcaggctcccaaacgtacccaggcccctacaaaggcttcagagtagatatctctgccaacatgaggacagaaggactggtgcgaccccccacccccgcccctgggctaccatctgcatggggctggggtcctcctgtgctatttgtacaaataaacctgaggcagga

SEQ ID NO: 317738 - DNA, 706 bp, Homo sapiens
gccagtagtactttccggcgttgttgaccctatttcccgtgctgcaccgcagcccctttctcttccggttctaggcgcttcgggagccgcggcttatggtgcagacatggccaagtccaagaaccacaccacacacaaccagtcccgaaaatggcacagaaatggtatcaagaaaccccgatcacaaagatacgaatctcttaagggggtggaccccaagttcctgaggaacatgcgctttgccaagaagcacaacaaaaagggcctaaagaagatgcaggccaacaatgccaaggccatgagtgcacgtgccgaggctatcaaggccctcgtaaagcccaaggaggttaagcccaagatcccaaagggtgtcagccgcaagctcgatcgacttgcctacattgcccaccccaagcttgggaagcgtgctcgtgcccgtattgccaaggggctcaggctgtgccggccaaaggcaaggccaaggccaaggccaaggatcaaaccaaggcccaggctgcagccccagcttcagttccagctcaggctcccaaacgtacccaggcccctacaaaggcttcagagtagatatctctgccaacatgaggacagaaggactggtgcgaccccccacccccgcccctgggctaccatctgcatggggctggggtcctcctgtgctatttgtacaaataaacctgaggcagga

SEQ ID NO: 317739 - DNA, 589 bp, Homo sapiens
gaattcggcacgcgcttcgggagccgcggcttatggtgcagacatggccaagtccaagaaccacaccacacacaaccagtcccgaaaatggcacagaaatggtatcaagaaaccccgatcacaaagatacgaatctcttaagggggtggaccccaagttcctgaggaacatgcgctttgccaagaagcacaacaccgaggctatcaaggccctcgtaaagcccaaggaggttaagcccaagatcccaaagggtgtcagccgcaagctcgatcgacttgcctacattgcccaccccaagcttgggaagcgtgctcgtgcccgtattgccaaggggctcaggctgtgccggccaaaggcaaggccaaggccaaggccaaggatcaaaccaaggcccaggctgcagccccagcttcagttccagctcaggctcccaaacgtacccaggcccctacaaaggcttcagagtagatatctctgccaacatgaggacagaaggactggtgcgaccccccacccccgcccctgggctaccatctgcatggggctggggtcctcctgtgctatttgtacaaataaacctgaggcagga

SEQ ID NO: 317740 - DNA, 709 bp, Homo sapiens
  misc_feature (673)..(673): n is a, c, g, or t
  misc_feature (683)..(683): n is a, c, g, or t
  misc_feature (685)..(686): n is a, c, g, or t
  misc_feature (691)..(691): n is a, c, g, or t
  misc_feature (698)..(698): n is a, c, g, or t
  misc_feature (705)..(705): n is a, c, g, or t
gaattcggcacgcgcttcgggagccgcggcttatggtgcagacatggccaagtccaagaaccacaccacacacaaccagtcccgaaaatggcacagaaatggtggaccccaagttcctgaggaacatgcgctttgccaagaagcacaacaaaaagggcctaaagaagatgcaggccaacaatgccaaggccatgagtgcacgtgccgaggctatcaaggccctcgtaaagcccaaggaggttaagcccaagatcccaaagggtgtcagccgcaagctcgatcgacttgcctacattgcccaccccaagcttgggaagcgtgctcgtgcccgtattgccaaggggctcaggctgtgccggccaaaggcaaggccaaggccaaggccaaggatcaaaccaaggcccaggctgcagccccagcttcagttccagctcaggctcccaaacgtacccaggcccctacaaaggcttcagagtagatatctctgccaacatgaggacagaaggactggtgcgaccccccacccccgcccctgggctaccatctgcatggggctggggtcctcctgtgctatttgtacaaataaacctgaggcaggaaaaaaaaaaaaaaaaaaaaaaaaaaaaaaaaaaaaaaaaaaaaaaaaaaaaaaaaaaagaaaaaaagaaagaanaagaacaaananngaagnaaaaganagaaaanaaga

SEQ ID NO: 317741 - DNA, 1167 bp, Homo sapiens
gccagtagtactttccggcgttgttgaccctatttcccgtgctgcaccgcagcccctttctcttccggttctaggcgcttcgggagccgcggcttatggtgcagacatggccaagtccaagaaccacaccacacacaaccagtcccgaaaatggcacagaaatggtatcaagaaaccccgatcacaaagatacgaatctcttaaggggcctgaagtgtaaccctctggtcagggtgtaacctgcctcctgagggcagtttggctatctcccttgcttggcagtggcacttagggtggaccccaagttcctgaggaacatgcgctttgccaagaagcacaacaaaaagggcctaaagaagatgcaggccaacaatgccaaggccatgagtgcacgtgccgaggctatcaaggccctcgtaaagcccaaggaggttaagcccaagatcccaaagggtgtcagccgcaagctcgatcgacttgcctacattgcccaccccaagcttgggaagcgtgctcgtgcccgtattgccaaggggctcaggctgtgccggccaaaggcaaggccaaggccaaggccaaggatcaaaccaaggcccaggctgcagccccagcttcagttccagctcaggctcccaaacgtacccaggcccctacaaaggcttcagagtagatatctctgccaacatgaggacagaaggactggtgcgaccccccacccccgcccctgggctaccatctgcatggggctggggtcctcctgtgctatttgtacaaataaacctgaggcaggaaaaaaaaaaaaaaaaaaaaaaaaaaaaaagaaaaaaaaaaaaagggggtttttttgggggggggaaaaggtaagagtctaaatgtcgttctcgacccacctttttttgtaccagggggaaaaatcggccgacccccaagaggaggcgacataaacaatcagcaacggcgcgtgttctcttttagtattctcgcgatcaacaatgataagcgaagacagacagagtacgtaagacagtatgagactaaaatcagagcagaactagcacacgcgtcaacgagtacaataagatagtcaagcagatattgtcacagaatgaagaatatcaagaagacaacacagacacagagtcaatgaaagagcactgtataggtaac

SEQ ID NO: 317742 - DNA, 339 bp, Homo sapiens
gcttttctcttccggttctaggcgcttcgggagccgcggcttatggtgcagacatggccaagtccaagaaccacaccacacacaaccagtcccgaaaatggcacagaaatggtatcaagaaaccccgatcacaaagatacgaatctcttaagggggtgagtgcactgaatcacatggaagtgtcttttcttggttccaggtgcacagtcaaggcctctcatgtagtttttctctagctttggcttctgcctgagcacagcctaactggcccacccaaagcctgcaattcctttttctaccctaccagacccataataaagctttccttggtctccacag

SEQ ID NO: 317743 - DNA, 841 bp, Homo sapiens
  misc_feature (771)..(771): n is a, c, g, or t
  misc_feature (791)..(791): n is a, c, g, or t
  misc_feature (797)..(797): n is a, c, g, or t
gccagtagtactttccggcgttgttgaccctatttcccgtgctgcaccgcagcccctttctcttccggttctaggcgcttcgggagccgcggcttatggtgcagacatggccaagtccaagaaccacaccacacacaaccagtcccgaaaatggcacagaaatggtatcaagaaaccccgatcacaaagatacgaatctcttaagggggtggaccccaagttcctgaggaacatgcgctttgccaagaagcacaacaaaaagggcctaaagaagatgcaggccaacaatgccaaggccatgagtgcacgtgccgaggctatcaaggccctcgtaaagcccaaggaggttaagcccaagatcccaaagggtgtcagccgcaagctcgatcgacttgcctacattgcccaccccaagcttgggaagcgtgctcgtgcccgtattgccaaggggctcaggctgtgccggccaaaggcaaggccaaggccaaggccaaggccaaggatcaaaccaaggcccaggctgcagccccagcttcagttccagctcaggctcccaaacgtacccaggcccctacaaaggcttcagagtagatatctctgccaacatgaggacagaaggactggtgcgaccccccacccccgcccctgggctaccatctgcatggggctggggtcctcctgtgctatttgtacaaataaacctgaggcaggaaaaaaaaaaaaaaaaaaaaaaaaaattttgggcgcctccgggccctgaaaaagtttttnaaacccatctttgggggcgnggggcnccaaagggtctaggaaacggggcaagaggggtgaacaagaaaac

SEQ ID NO: 317744 - DNA, 744 bp, Homo sapiens
ccgatgccatccgcgacttacgggtggcggcggggcgcgggctgcggagaggactggtgaccgaccgtgtgtctgtcgggagcaaaagctgcggggtgcagacatggccaagtccaagaaccacaccacacacaaccagtcccgaaaatggcacagaaatggtatcaagaaaccccgatcacaaagatacgaatctcttaagggggtggaccccaagttcctgaggaacatgcgctttgccaagaagcacaacaaaaagggcctaaagaagatgcaggccaacaatgccaaggccatgagtgcacgtgccgaggctatcaaggccctcgtaaagcccaaggaggttaagcccaagatcccaaagggtgtcagccgcaagctcgatcgacttgcctacattgcccaccccaagcttgggaagcgtgctcgtgcccgtattgccaaggggctcaggctgtgccggccaaaggcaaggccaaggccaaggccaaggccaaggatcaaaccaaggcccaggctgcagccccagcttcagttccagctcaggctcccaaacgtacccaggcccctacaaaggcttcagagtagatatctctgccaacatgaggacagaaggactggtgcgaccccccacccccgcccctgggctaccatctgcatggggctggggtcctcctgtgctatttgtacaaataaacctgaggcaggagcaggatttgttagcctctgtctatgatcctgggg

SEQ ID NO: 317745 - DNA, 686 bp, Homo sapiens
  misc_feature (37)..(37): n is a, c, g, or t
gaccacgcgtcgcggacgcgtgggtcgaccacgcgtncggacccacgcgtccgggcgcttcgggagccgcggcttatggtgcagacatggccaagtccaagaaccacaccacacacaaccagtcccgaaaatggcacagaaatggtatcaagaaaccccgatcacaaagatacgaatctcttaagggggtggaccccaagttcctgaggaacatgcgctttgccaagaagcacaacaaaaagggcctaaagaagatgcaggccaacaatgccaaggccatgagtgcacgtgccgaggctatcaaggccctcgtaaagcccaaggaggttaagcccaagatcccaaagggtgtcagccgcaagctcgatcgacttgcctacattgcccaccccaagcttgggaagcgtgctcgtgcccgtattgccaaggggctcaggctgtgccggccaaaggcaaggccaaggccaaggccaaggatcaaaccaaggcccaggctgcagccccagcttcagttccagctcaggctcccaaacgtacccaggcccctacaaaggcttcagagtagatatctctgccaacatgaggacagaaggactggtgcgaccccccacccccgcccctgggctaccatctgcatggggctggggtcctcctgtgctatttgtacaaataaacctgaggcagga

SEQ ID NO: 317746 - DNA, 667 bp, Homo sapiens
ccgatgccatccgcgacttacgggtggcggcggggcgcgggctgcggagaggactggtggtgcagacatggccaagtccaagaaccacaccacacacaaccagtcccgaaaatggcacagaaatggtatcaagaaaccccgatcacaaagatacgaatctcttaagggggtggaccccaagttcctgaggaacatgcgctttgccaagaagcacaacaaaaagggcctaaagaagatgcaggccaacaatgccaaggccatgagtgcacgtgccgaggctatcaaggccctcgtaaagcccaaggaggttaagcccaagatcccaaagggtgtcagccgcaagctcgatcgacttgcctacattgcccaccccaagcttgggaagcgtgctcgtgcccgtattgccaaggggctcaggctgtgccggccaaaggcaaggccaaggccaaggccaaggatcaaaccaaggcccaggctgcagccccagcttcagttccagctcaggctcccaaacgtacccaggcccctacaaaggcttcagagtagatatctctgccaacatgaggacagaaggactggtgcgaccccccacccccgcccctgggctaccatctgcatggggctggggtcctcctgtgctatttgtacaaataaacctgaggcagga

SEQ ID NO: 317747 - DNA, 777 bp, Homo sapiens
cgcaattttccacagaggaaaataatccgagtcgaaacctcaacgacaggtccgggcgcttcgggagccgcggcttatggtgcagacatggccaagtccaagaaccacaccacacacaaccagtcccgaaaatggcacagaaatggtatcaagaaaccccgatcacaaagatacgaatctcttaagggggtggaccccaagttcctgaggaacatgcgctttgccaagaagcacaacaaaaagggcctaaagaagatgcaggccaacaatgccaaggccatgagtgcacgtgccgaggctatcaaggccctcgtaaagcccaaggaggttaagcccaagatcccaaagggtgtcagccgcaagctcgatcgacttgcctacattgcccaccccaagcttgggaagcgtgctcgtgcccgtattgccaaggggctcaggctgtgccggccaaaggcaaggccaaggccaaggccaaggatcaaaccaaggcccaggctgcagccccagcttcagttccagctcaggctcccaaacgtacccaggcccctacaaaggcttcagagtagatatctctgccaacatgaggacagaaggactggtgcgaccccccacccccgcccctgggctaccatctgcatggggctggggtcctcctgtgctatttgtacaaataaacctgaggcaggaaaaaaaaaatatattcttctccttaacttttaaaaaaaaagcgtttaaaccgctgactggaaacccggtgtacccactaatggcttgcct

SEQ ID NO: 317748 - DNA, 785 bp, Homo sapiens
ttgccaaggggctcagtctgtgccggccaaaggccaaggccaaggccaaggccaaggatcaaaccaaggcccaggctgcagccccagcttcagttccagctcaggctcccccagggattcagcactcaacacagtcttcagcagtcagaccactgccaagacagcaggccagcaggtacgagcgttcagagtatccgacacagaacatgacccagtcccgaaaatggcacagaaatggtatcaagaaaccccgatcacaaagatacgaatctcttaagggggtggaccccaagttcctgaggaacatgcgctttgccaagaagcacaacaaaaagggcctaaagaagatgcaggccaacaatgccaaggccatgagtgcacgtgccgaggctatcaaggccctcgtaaagcccaaggaggttaagcccaagatcccaaagggtgtcagccgcaagctcgatcgacttgcctacattgcccaccccaagcttgggaagcgtgctcgtgcccgtattgccaaggggctcaggctgtgccggccaaaggcaaggccaaggccaaggccaaggccaaggatcaaaccaaggcccaggctgcagccccagcttcagttccagctcaggctcccaaacgtacccaggcccctacaaaggcttcagagtagatatctctgccaacatgaggacagaaggactggtgcgaccccccacccccgcccctgggctaccatctgcatggggctggggtcctcctgtgctatttgtacaaataaacctgaggcagga

SEQ ID NO: 317749 - DNA, 792 bp, Homo sapiens
  misc_feature (695)..(695): n is a, c, g, or t
  misc_feature (697)..(697): n is a, c, g, or t
tatacggcaggtagcgaggctgggtggcgggcgcttcgggagccgcggcttatggtgcagacatggccaagtccaagaaccacaccacacacaaccagtcccgaaaatggcacagaaatggtatcaagaaaccccgatcacaaagatacgaatctcttaagggggtggaccccaagttcctgaggaacatgcgctttgccaagaagcacaacaaaaagggcctaaagaagatgcaggccaacaatgccaaggccatgagtgcacgtgccgaggctatcaaggccctcgtaaagcccaaggaggttaagcccaagatcccaaagggtgtcagccgcaagctcgatcgacttgcctacattgcccaccccaagcttgggaagcgtgctcgtgcccgtattgccaaggggctcaggctgtgccggccaaaggcaaggccaaggccaaggccaaggatcaaaccaaggcccaggctgcagccccagcttcagttccagctcaggctcccaaacgtacccaggcccctacaaaggcttcagagtagatatctctgccaacatgaggacagaaggactggtgcgaccccccacccccgcccctgggctaccatctgcatggggctggggtcctcctgtgctatttgtacaaataaacctgaggcaggaaaaacaaaacacaaaaaaaaaaaaaaaaccaananaaaatatttgcgggcgcacaaaaaggtagaaagacagcaaaagacaaaaggataagacacatattacaaagaggaaaatgcaagcacaaaaaaca

SEQ ID NO: 317750 - DNA, 955 bp, Homo sapiens
gccagtagtactttccggcgttgttgaccctatttcccgtgctgcaccgcagcccctttctcttccggttctaggcgcttcgggagccgcggcttatggtgcagacatggccaagtccaagaaccacaccacacacaaccagtcccgaaaatggcacagaaatggtatcaagaaaccccgatcacaaagatacgaatctcttaagggggtggaccccaagttcctgaggaacatgcgctttgccaagaagcacaacaaaaagggcctaaagaagatgcaggccaacaatgccaaggccatgagtgcacgtgccgaggctatcaaggccctcgtaaagcccaaggaggttaagcccaagatcccaaagggtgtcagccgcaagctcgatcgacttgcctacattgcccaccccaagcttgggaagcgtgctcgtgcccgtattgccaaggggctcaggctgtgccggccaaaggcaaggccaaggccaaggccaaggatcaaaccaaggcccaggctgcagccccagcttcagttccagctcaggctcccaaacgtacccaggcccctacaaaggcttcagagtagatatctctgccaacatgaggacagaaggactggtgcgaccccccacccccgcccctgggctaccatctgcatggggctggggtcctcctgtgctatttgtacaaataaacctgaggcaggaaaacaaaaaacaaaacaaaaaaaaaaaaaaaaaaaaaggggggggcgcaaaaaaaatacaccaggggagcacaagacaaccggtaacccagaatccgtgatcaccagaggggcccccaaaaggaggctgcgcatatcacgacaccgccagcccgcgggttgcaaccgccgcggcccggggacaacgcgcacacccgggcacctgggcacaggcacccaaacacagggggggcgacacacgggcaaacgc

SEQ ID NO: 317751 - DNA, 1066 bp, Homo sapiens
gccagtagtactttccggcgttgttgaccctatttcccgtgctgcaccgcagcccctttctcttccggttctaggcgcttcgggagccgcggcttatggtgcagacatggccaagtccaagaaccacaccacacacaaccagtcccgaaaatggcacagaaatggtatcaagaaaccccgatcacaaagatacgaatctcttaagggggtggaccccaagttcctgaggaacatgcgctttgccaagaagcacaacaaaaagggcctaaagaagatgcaggccaacaatgccaaggccatgagtgcacgtgccgaggctatcaaggccctcgtaaagcccaaggaggttaagcccaagatcccaaagggtgtcagccgcaagctcgatcgacttgcctacattgcccaccccaagcttgggaagcgtgctcgtgcccgtattgccaaggggctcaggctgtgccggccaaaggcaaggccaaggccaaggccaaggatcaaaccaaggcccaggctgcagccccagcttcagttccagctcaggctcccaaacgtacccaggcccctacaaaggcttcagagtagatatctctgccaacatgaggacagaaggactggtgcgaccccccacccccgcccctgggctaccatctgcatggggctggggtcctcctgtgctatttgtacaaataaacctgaggcaggagcccgtcgacgatcccaaagggtgtcagccgcaagctcgatcgacttgcctacattgcccaccccaagcttgggaagcgtgctcgtgcccgtattgccaaggggctcaggctgtgccggccaaaggccaaggccaaggccaaggccaaggatcaaaccaaggcccaggctgcagccccagcttcagttccagctcaggctcccaaacgtacccaggcccctacaaaggcttcagagtagatatctctgccaacatgaggacagaaggactggtgcgaccccccacccccgcccctgggctaccatctgcatggggctggggtcctcctgtgctatttgtacaaataaacctgaggcagga

SEQ ID NO: 317752 - DNA, 796 bp, Homo sapiens
gccagtagtactttccggcgttgttgaccctatttcccgtgctgcaccgcagcccctttctcttccggttctaggcgcttcgggagccgcggcttatggtgcagacatggccaagtccaagaaccacaccacacacaaccagtcccgaaaatggcacagaaatggtatcaagaaaccccgatcacaaagatacgaatctcttaagggggtggaccccaagttcctgaggaacatgcgctttgccaagaagcacaacaaaaagggcctaaagaagatgcaggccaacaatgccaaggccatgagtgcacgtgccgaggctatcaaggccctcgtaaagcccaaggaggttaagcccaagatcccaaagggtgtcagccgcaagctcgatcgacttgcctacattgcccaccccaagcttgggaagcgtgctcgtgcccgtattgccaaggggctcaggctgtgccggccaaaggcaaggccaaggccaaggccaaggatcaaaccaaggcccaggctgcagccccagcttcagttccagctcaggctcccaaacgtacccaggcccctacaaaggcttcagagtagatatctctgccaacatgaggacagaaggactggtgcgaccccccacccccgcccctgggctaccatctgcatggggctggggtcctcctgtgctatttgtacaaataaacctgaggcaggaaaaaaaaaatatattcttctccttaacttttaaaaaaaaagcgtttaaaccgctgactggaaacccggtgtacccactaatggcttgcct

SEQ ID NO: 317753 - DNA, 984 bp, Homo sapiens
gccagtagtactttccggcgttgttgaccctatttcccgtgctgcaccgcagcccctttctcttccggttctaggcgcttcgggagccgcggcttatggtgcagacatggccaagtccaagaaccacaccacacacaaccagtcccgaaaatggcacagaaatggtatcaagaaaccccgatcacaaagatacgaatctcttaagggggtggaccccaagttcctgaggaacatgcgctttgccaagaagcacaacaaaaagggcctaaagaagatgcaggccaacaatgccaaggccatgagtgcacgtgccgaggctatcaaggccctcgtaaagcccaaggaggttaagcccaagatcccaaagggtgtcagccgcaagctcgatcgacttgcctacattgcccaccccaagcttgggaagcgtgctcgtgcccgtattgccaaggggctcaggctgtgccggccaaaggcaaggccaaggccaaggccaaggatcaaaccaaggcccaggctgcagccccagcttcagttccagctcaggctcccaaacgtacccaggcccctacaaaggcttcagagtagatatctctgccaacatgaggacagaaggactggtgcgaccccccacccccgcccctgggctaccatctgcatggggctggggtcctcctgtgctatttgtacaaataaacctgaggcaggaaaaaaaaaaaaaaaaaaaaaaaaaaaaaaaaacaaaaaacaaaacaaaaaaaaaaaaaaaaaaaaaggggggggcgcaaaaaaaatacaccaggggagcacaagacaaccggtaacccagaatccgtgatcaccagaggggcccccaaaaggaggctgcgcatatcacgacaccgccagcccgcgggttgcaaccgccgcggcccggggacaacgcgcacacccgggcacctgggcacaggcacccaaacacagggggggcgacacacgggcaaacgc

SEQ ID NO: 317754 - DNA, 1657 bp, Homo sapiens
gccagtagtactttccggcgttgttgaccctatttcccgtgctgcaccgcagcccctttctcttccggttctaggcgcttcgggagccgcggcttatggtgcagacatggccaagtccaagaaccacaccacacacaaccagtcccgaaaatggcacagaaatggtatcaagaaaccccgatcacaaagatacgaatctcttaagggggtggaccccaagttcctgaggaacatgcgctttgccaagaagcacaacaaaaagggcctaaagaagatgcaggccaacaatgccaaggccatgagtgcacgtgccgaggctatcaaggccctcgtaaagcccaaggaggttaagcccaagatcccaaagggtgtcagccgcaagctcgatcgacttgcctacattgcccaccccaagcttgggaagcgtgctcgtgcccgtattgccaaggggctcaggctgtgccggccaaaggcaaggccaaggccaaggccaaggatcaaaccaaggcccaggctgcagccccagcttcagttccagctcaggctcccaaacgtacccaggcccctacaaaggcttcagagtagatatctctgccaacatgaggacagaaggactggtgcgaccccccacccccgcccctgggctaccatctgcatggggctggggtcctcctgtgctatttgtacaaataaacctgaggcaggagcccgtcgacgatcccaaagggtgtcagccgcaagctcgatcgacttgcctacattgcccaccccaagcttgggaagcgtgctcgtgcccgtattgccaaggggctcaggctgtgccggccaaaggccaaggccaaggccaaggccaaggatcaaaccaaggcccaggctgcagccccagcttcagttccagctcaggctcccaaacgtacccaggcccctacaaaggcttcagagtagatatctctgccaacatgaggacagaaggactggtgcgaccccccacccccgcccctgggctaccatctgcatggggctggggtcctcctgtgctatttgtacaaataaacctgaggcaggacaccaaaacacaaaaaaaaaaaaacacacacacaccaaaaaaaaaaggggggtcgcccgccccacagacgatcagccgagaggggcgccacacagccgggcggagacgcgcacagcacgaggcgaaaaaaggggggacaaccacagcgggaggaacaggcgaaacaaacagaaaggaaacaggtgacgggcgtggtgcgatcgacagaatgtgtagttttgcggtggggccaaaaagtagatgtataatgtagttgatgaagattagtaggagacaaggagtggaataatctagtgggggaggtggtgagcgactatacaaagaggaccaaagatgattgttgtgcacggcgcatatagtaaaagtgtgcacgcatgtggagggaacacacagacgaggaccgcaaacccacaggaagcaaaaagacgaggggaacgagaccaccacccggcggcaccaagtagcacgagtccagagagcggagaacacgagaaaggggaagcaagcaacgagggaggactggagacacgcaaacgaacacaacacaacacacccacacagcagagaagcgcaggaaagcagaacacaaga

SEQ ID NO: 317755 - DNA, 901 bp, Homo sapiens
gccagtagtactttccggcgttgttgaccctatttcccgtgctgcaccgcagcccctttctcttccggttctaggcgcttcgggagccgcggcttatggtgcagacatggccaagtccaagaaccacaccacacacaaccagtcccgaaaatggcacagaaatggtatcaagaaaccccgatcacaaagatacgaatctcttaagggggtggaccccaagttcctgaggaacatgcgctttgccaagaagcacaacaaaaagggcctaaagaagatgcaggccaacaatgccaaggccatgagtgcacgtgccgaggctatcaaggccctcgtaaagcccaaggaggttaagcccaagatcccaaagggtgtcagccgcaagctcgatcgacttgcctacattgcccaccccaagcttgggaagcgtgctcgtgcccgtattgccaaggggctcaggctgtgccggccaaaggcaaggccaaggccaaggccaaggatcaaaccaaggcccaggctgcagccccagcttcagttccagctcaggctcccaaacgtacccaggcccctacaaaggcttcagagtagatatctctgccaacatgaggacagaaggactggtgcgaccccccacccccgcccctgggctaccatctgcatggggctggggtcctcctgtgctatttgtacaaataaacctgaggcaggagcacaggaggaccccagccccatgcagatggtagcccaggggcgggggtggggggtcgcaccagtccttctgtcctcatgttggcagagatatctactctgaagcctttgtaggggcctgggtacgtttgggagcctgagctggaactgaagctggggctgcagcctgggccttggtttgatccttggcctcgtg

SEQ ID NO: 317756 - DNA, 779 bp, Homo sapiens
ttgccaaggggctcagtctgtgccggccaaaggccaaggccaaggccaaggccaaggatcaaaccaaggcccaggctgcagccccagcttcagttccagctcaggctcccccagggattcagcactcaacacagtcttcagcagtcagaccactgccaagacagcaggccagcaggtacgagcgttcagagtatccgacacagaacatgacccagtcccgaaaatggcacagaaatggtatcaagaaaccccgatcacaaagatacgaatctcttaagggggtggaccccaagttcctgaggaacatgcgctttgccaagaagcacaacaaaaagggcctaaagaagatgcaggccaacaatgccaaggccatgagtgcacgtgccgaggctatcaaggccctcgtaaagcccaaggaggttaagcccaagatcccaaagggtgtcagccgcaagctcgatcgacttgcctacattgcccaccccaagcttgggaagcgtgctcgtgcccgtattgccaaggggctcaggctgtgccggccaaaggcaaggccaaggccaaggccaaggatcaaaccaaggcccaggctgcagccccagcttcagttccagctcaggctcccaaacgtacccaggcccctacaaaggcttcagagtagatatctctgccaacatgaggacagaaggactggtgcgaccccccacccccgcccctgggctaccatctgcatggggctggggtcctcctgtgctatttgtacaaataaacctgaggcagga

SEQ ID NO: 317757 - DNA, 980 bp, Homo sapiens
gaattcggcacgcgcttcgggagccgcggcttatggtgcagacatggccaagtccaagaaccacaccacacacaaccagtcccgaaaatggcacagaaatggtatacgaatctcttaagggggtggaccccaagttcctgaggaacatgcgctttgccaagaagcacaacaaaaagggcctaaagaagatgcaggccaacaatgccaaggccatgagtgcacgtgccgaggctatcaaggccctcgtaaagcccaaggaggttaagcccaagatcccaaagggtgtcagccgcaagctcgatcgacttgcctacattgcccaccccaagcttgggaagcgtgctcgtgcccgtattgccaaggggctcaggctgtgccggccaaaggcaaggccaaggccaaggccaaggatcaaaccaaggcccaggctgcagccccagcttcagttccagctcaggctcccaaacgtacccaggcccctacaaaggcttcagagtagatatctctgccaacatgaggacagaaggactggtgcgaccccccacccccgcccctgggctaccatctgcatggggctggggtcctcctgtgctatttgtacaaataaacctgaggcaggagcccgtcgacgatcccaaagggtgtcagccgcaagctcgatcgacttgcctacattgcccaccccaagcttgggaagcgtgctcgtgcccgtattgccaaggggctcaggctgtgccggccaaaggccaaggccaaggccaaggccaaggatcaaaccaaggcccaggctgcagccccagcttcagttccagctcaggctcccaaacgtacccaggcccctacaaaggcttcagagtagatatctctgccaacatgaggacagaaggactggtgcgaccccccacccccgcccctgggctaccatctgcatggggctggggtcctcctgtgctatttgtacaaataaacctgaggcagga

SEQ ID NO: 317758 - DNA, 730 bp, Homo sapiens
  misc_feature (694)..(694): n is a, c, g, or t
  misc_feature (704)..(704): n is a, c, g, or t
  misc_feature (706)..(707): n is a, c, g, or t
  misc_feature (712)..(712): n is a, c, g, or t
  misc_feature (719)..(719): n is a, c, g, or t
  misc_feature (726)..(726): n is a, c, g, or t
gaattcggcacgcgcttcgggagccgcggcttatggtgcagacatggccaagtccaagaaccacaccacacacaaccagtcccgaaaatggcacagaaatggtatacgaatctcttaagggggtggaccccaagttcctgaggaacatgcgctttgccaagaagcacaacaaaaagggcctaaagaagatgcaggccaacaatgccaaggccatgagtgcacgtgccgaggctatcaaggccctcgtaaagcccaaggaggttaagcccaagatcccaaagggtgtcagccgcaagctcgatcgacttgcctacattgcccaccccaagcttgggaagcgtgctcgtgcccgtattgccaaggggctcaggctgtgccggccaaaggcaaggccaaggccaaggccaaggatcaaaccaaggcccaggctgcagccccagcttcagttccagctcaggctcccaaacgtacccaggcccctacaaaggcttcagagtagatatctctgccaacatgaggacagaaggactggtgcgaccccccacccccgcccctgggctaccatctgcatggggctggggtcctcctgtgctatttgtacaaataaacctgaggcaggaaaaaaaaaaaaaaaaaaaaaaaaaaaaaaaaaaaaaaaaaaaaaaaaaaaaaaaaaaagaaaaaaagaaagaanaagaacaaananngaagnaaaaganagaaaanaaga

SEQ ID NO: 317759 - DNA, 2716 bp, Homo sapiens
agcctggagtgaggcgcagcggcagcggcagcagcggcaacaagtgccggaggctagcagagccaagccggagcagtccctgccgccgacaccgccgggccgcccgtccggggcgccgcgcatggagcgtgagctgcggcggtcgccgggctgagccgcgcggagcggccgggacgtggatgtggccgcgatctcccgcccttgcccccgccccgccgagctggagctgctcccggacaagatatgagaaatgagtgttggacgtcgaagaataaagttgttgggtatcctgatgatggcaaatgtcttcatttattttattatggaagtctccaaaagcagtagccaagaaaaaaatggaaaaggggaagtaataatacccaaagagaagttctggaagatatctacccctcccgaggcatactggaaccgagagcaagagaagctgaaccggcagtacaaccccatcctgagcatgctgaccaaccagacgggggaggcgggcaggctctccaatataagccatctgaactactgcgaacctgacctgagggtcacgtcggtggttacgggttttaacaacttgccggacagatttaaagactttctgctgtatttgagatgccgcaattattcactgcttatagatcagccggataagtgtgcaaagaaacctttcttgttgctggcgattaagtccctcactccacattttgccagaaggcaagcaatccgggaatcctggggccaagaaagcaacgcagggaaccaaacggtggtgcgagtcttcctgctgggccagacacccccagaggacaaccaccccgacctttcagatatgctgaaatttgagagtgagaagcaccaagacattcttatgtggaactacagagacactttcttcaacttgtctctgaaggaagtgctgtttctcaggtgggtaagtacttcctgcccagacactgagtttgttttcaagggcgatgacgatgtttttgtgaacacccatcacatcctgaattacttgaatagtttatccaagaccaaagccaaagatctcttcataggtgatgtgatccacaatgctggacctcatcgggataagaagctgaagtactacatcccagaagttgtttactctggcctctacccaccctatgcagggggaggggggttcctctactccggccacctggccctgaggctgtaccatatcactgaccaggtccatctctaccccattgatgacgtttatactggaatgtgccttcagaaactcggcctcgttccagagaaacacaaaggcttcaggacatttgatatcgaggagaaaaacaaaaataacatctgctcctatgtagatctgatgttagtacatagtagaaaacctcaagagatgattgatatttggtctcagttgcagagtgctcatttaaaatgctaaaatagatacaaactcaattttgcatagaaaggtgtattttgaatagttcccatgttgtgttctcacattagagtaatttctatattaaaccatgaaaattgcctttatgagtgatacccatttgagggcctctaaacccttcaatttggtactcacgtgaagagggaaagcggaagatggtaatttttttttatggatgatatggcaggatgattggttctgatcttaccggctagtggtcatttttaaaaaacttgtaccctcttatctgaaatcctgtttctggaatttggccattttaagtgattttgtttgccctcttctataatattcctacttcccataataatgactgatttatttgtaattcaggtatttatttttcgtgaaatggaattatgtttatttttatgggatttgggtaaattttaaattgtctagaaaactgaaatttcagttgtcagttgtggaattcagtttttcaattgtggaaatttcctgccaccccaacagtatttttgtgtgttaattaattttgcaaaatgagaatcatggtgtgacactcatctaatttatcttgttgtgatgttatggtcataataaggagaaagagggtttaatttttcttgtatttggtttcctggtggtatcatagtgtaattttagtatttgaaaatcagtgtgattccttaatggccaactgaagattgaattgccgctaacaaccatatcgtgttagtgaattttcaatatggaccaggaaggcatatgtattttgaacttgagtgaaaaggttgaagttacagacttttgcatagatggtttgtcaatttaaaattccagaatttattattgccatattttcacatgctgcttatacaagattattattgagtagtaactgcttccctgtctatgtagaagtgcctgtgtttttatttattgttcagatcaaagaccaaaacattttcttaaatatattttatgtaatattttatttgtatacagtgttgttgatgaaatatttaactagagcatgatattttaaatgttaaggtgtaacatatgttaaataaaactgttatttttgaattttaaaatttgttttttgggggtatgaactactagagtttaaaattctgccaaactattacttatatgtactattgtgtaacatactttcttgaaatatttttgtttatagaattgaaggttcttatcagatgggatactggggactataaacaatggaaataaagccactgtattttt

SEQ ID NO: 317760 - DNA, 4929 bp, Homo sapiens
agcctggagtgaggcgcagcggcagcggcagcagcggcaacaagtgccggaggctagcagagccaagccggagcagtccctgccgccgacaccgccgggccgcccgtccggggcgccgcgcatggagcgtgagctgcggcggtcgccgggctgagccgcgcggagcggccgggacgtggatgtggccgcgatctcccgcccttgcccccgccccgccgagctggagctgctcccggacaagatatgagaaatgagtgttggacgtcgaagaataaagttgttgggtatcctgatgatggcaaatgtcttcatttattttattatggaagtctccaaaagcagtagccaagaaaaaaatggaaaaggggaagtaataatacccaaagagaagttctggaagatatctacccctcccgaggcatactggaaccgagagcaagagaagctgaaccggcagtacaaccccatcctgagcatgctgaccaaccagacgggggaggcgggcaggctctccaatataagccatctgaactactgcgaacctgacctgagggtcacgtcggtggttacgggttttaacaacttgccggacagatttaaagactttctgctgtatttgagatgccgcaattattcactgcttatagatcagccggataagtgtgcaaagaaacctttcttgttgctggcgattaagtccctcactccacattttgccagaaggcaagcaatccgggaatcctggggccaagaaagcaacgcagggaaccaaacggtggtgcgagtcttcctgctgggccagacacccccagaggacaaccaccccgacctttcagatatgctgaaatttgagagtgagaagcaccaagacattcttatgtggaactacagagacactttcttcaacttgtctctgaaggaagtgctgtttctcaggtgggtaagtacttcctgcccagacactgagtttgttttcaagggcgatgacgatgtttttgtgaacacccatcacatcctgaattacttgaatagtttatccaagaccaaagccaaagatctcttcataggtgatgtgatccacaatgctggacctcatcgggataagaagctgaagtactacatcccagaagttgtttactctggcctctacccaccctatgcagggggaggggggttcctctactccggccacctggccctgaggctgtaccatatcactgaccaggtccatctctaccccattgatgacgtttatactggaatgtgccttcagaaactcggcctcgttccagagaaacacaaaggcttcaggacatttgatatcgaggagaaaaacaaaaataacatctgctcctatgtagatctgatgttagtacatagtagaaaacctcaagagatgattgatatttggtctcagttgcagagtgctcatttaaaatgctaaaatagatacaaactcaattttgcatagaaaggtgtattttgaatagttcccatgttgtgttctcacattagagtaatttctatattaaaccatgaaaattgcctttatgagtgatacccatttgagggcctctaaacccttcaatttggtactcacgtgaagagggaaagcggaagatggtaatttttttttatggatgatatggcaggatgattggttctgatcttaccggctagtggtcatttttaaaaaacttgtaccctcttatctgaaatcctgtttctggaatttggccattttaagtgattttgtttgccctcttctataatattcctacttcccataataatgactgatttatttgtaattcaggtatttataaacctattggctacaaagactttgttaaacattatccagtggttttcgtgaaatggaattatgtttatttttatgggatttgggtaaattttaaattgtctagaaaactgaaatttcagttgtcagttgtggaattcagtttttcaattgtggaaatttcctgccaccccaacagtatttttgtgtgttaattaattttgcaaaatgagaatcatggtgtgacactcatctaatttatcttgttgtgatgttatggtcataataaggagaaagagggtttaatttttcttgtatttggtttcctggtggtatcatagtgtaattttagtatttgaaaatcagtgtgattccttaatggccaactgaagattgaattgccgctaacaaccatatcgtgttagtgaattttcaatatggaccaggaaggcatatgtattttgaacttgagtgaaaaggttgaagttacagacttttgcatagatggtttgtcaatttaaaattccagaatttattattgccatattttcacatgctgcttatacaagattattattgagtagtaactgcttccctgtctatgtagaagtgcctgtgtttttatttattgttcagatcaaagaccaaaacattttcttaaatatattttatgtaatattttatttgtatacagtgttgttgatgaaatatttaactagagcatgatattttaaatgttaaggtgtaacatatgttaaataaaactgttatttttgaattttaaaatttgttttttgggggtatgaactactagagtttaaaattctgccaaactattacttatatgtactattgtgtaacatactttcttgaaatatttttgtttatagaattgaaggttcttatcagatgggatactggggactataaacaatggaaataaagccactgtatttttaattttttgtgtaatgtgtaatctataatccttttgtttcccatatttgagaacatttttccctgaaagaggccagtttcctccccagaaaccattacagtagtgttgaactatcactgtctctcagtgcgtcatccatctttgcatttaaaatccccaaagtgctttcccatttaaagtctttaaagaaaagtgagaatatttatttatgcttccattttcagtgagtataaataatttaattagggagtggtgtggcattgtaaagattgtgttatcctaagccatttctattttggagtttgtagccacaaagatgaaatatagaatcagccttgactactcaatttcctttcatagacccatgttgagaagacactactaacgtccagtgggaaacaagtagacaattgatgaagctcaaaaaacagaagggttagtgttgtaagagcaaacagtctaatcctgtttggaatgtggaagccatttctgagcaagtatgaggacacaggtgcttgatttgagattgaagactgttttcagcctggtcttcctgaaggtttcctggggcctgcatctgccttctactcccatggctgctagcacacacctcccagagggccatattgccacattatggctagagaagagtaaagaagaaaagaagctctgagaacattcacaggtaattggatcacatttgcatttgtccaaaaaacctgaccacgcattctcaggtaataggtttctcctctcagaggaatttcaattttttttcttgttagagattccccttctctgaggtttcaagtctcttgtagagaaagaagagatggagcaggttttgaatgaggtgtggagggccactggggggccttttgtgagccttcagtccacatgtgtgctgttgtttgaacatgagttcttggtgctgatgacatttggatgagatgatctctggcccttcttcatttggcagaagttcttgtgcaatggctgcccaagcccaccacactggtcattgctgccctgtgagatggacctcatgggctttttagcagagcacgttaggttttagagctttacgcatgcttgggctctgttatggcgcaaacccttaaatccaggaaggcctctcttggtgcccacaatatgggttctcacctgatcccccatctcacggatggaactgctgtaagtctaacttattctttgagaactgtttaacaattaggcctcaagggaaactggtattttgggcccttttcttggctattcccaagtcatgttgattttgagtttgaaggtcaaaaaggctgaaagcattgccagggtttggactattcaaaaacccaagcaggtcttaaaaaaaggatgcaagagacaagaatggctcattccccttcctgatcctggttatacccatgtcctttcttgagatggtcaagagaggctggaaagaagaacaggaaattgggggagtgctttgttacacttggaaattgagtcaagaattaaagacacccaaagtgggccatctcctacttgtccacacctgattggtggtgatgcggaatatttgatgtcccgggtcatcttgactttctcagatgcaaaaagggagggtgactttactaatggaaaggatgggaagctgaaatgaatgaagccttcagttgggccaaagtttaacttccccgtgatttgccttctgatgaaaaatgccagatgaagtgaaaattcttgtttcttgcctagaacaggaaaatacatactttacatgctgggctattgaggctatgaaattaggttttccttaatgtaaatccaattgctagaaacatttgccaaataagattttttgaactgaactttgtttgcattaatctgaaaaactgaagtattctgactcatgaagttctcaaagtaatacactaaaaaagttttgcccttaataccattatatcttgtagaggccaagaatgagggacttctgtctttaaagagccctaaaaatctcgtttgctcacatgatatgaattaccgtatttgttgtaaatgcgcaactttgtatacactaaaagcactgccaatatgattttttatcagttgtgcctcagttagagatattaaaatgtgacatcttaaatattacatattagaataattg

SEQ ID NO: 317761 - DNA, 2705 bp, Homo sapiens
agcctggagtgaggcgcagcggcagcggcagcagcggcaacaagtgccggaggctagcagagccaagccggagcagtccctgccgccgacaccgccgggccgcccgtccggggcgccgcgcatggagcgtgagctgcggcggtcgccgggctgagccgcgcggagcggccgggacgtggatgtggccgcgatctcccgcccttgcccccgccccgccgagctggagctgctcccggacaagatatgagaaatgagtgttggacgtcgaagaataaagttgttgggtatcctgatgatggcaaatgtcttcatttattttattatggaagtctccaaaagcagtagccaagaaaaaaatggaaaaggggaagtaataatacccaaagagaagttctggaagatatctacccctcccgaggcatactggaaccgagagcaagagaagctgaaccggcagtacaaccccatcctgagcatgctgaccaaccagacgggggaggcgggcaggctctccaatataagccatctgaactactgcgaacctgacctgagggtcacgtcggtggttacgggttttaacaacttgccggacagatttaaagactttctgctgtatttgagatgccgcaattattcactgcttatagatcagccggataagtgtgcaaagaaacctttcttgttgctggcgattaagtccctcactccacattttgccagaaggcaagcaatccgggaatcctggggccaagaaagcaacgcagggaaccaaacggtggtgcgagtcttcctgctgggccagacacccccagaggacaaccaccccgacctttcagatatgctgaaatttgagagtgagaagcaccaagacattcttatgtggaactacagagacactttcttcaacttgtctctgaaggaagtgctgtttctcaggtgggtaagtacttcctgcccagacactgagtttgttttcaagggcgatgacgatgtttttgtgaacacccatcacatcctgaattacttgaatagtttatccaagaccaaagccaaagatctcttcataggtgatgtgatccacaatgctggacctcatcgggataagaagctgaagtactacatcccagaagttgtttactctggcctctacccaccctatgcagggggaggggggttcctctactccggccacctggccctgaggctgtaccatatcactgaccaggtccatctctaccccattgatgacgtttatactggaatgtgccttcagaaactcggcctcgttccagagaaacacaaaggcttcaggacatttgatatcgaggagaaaaacaaaaataacatctgctcctatgtagatctgatgttagtacatagtagaaaacctcaagagatgattgatatttggtctcagttgcagagtgctcatttaaaatgctaaaatagatacaaactcaattttgcatagaaaggtgtattttgaatagttcccatgttgtgttctcacattagagtaatttctatattaaaccatgaaaattgcctttatgagtgatacccatttgagggcctctaaacccttcaatttggtactcacgtgaagagggaaagcggaagatggtaatttttttttatggatgatatggcaggatgattggttctgatcttaccggctagtggtcatttttaaaaaacttgtaccctcttatctgaaatcctgtttctggaatttggccattttaagtgattttgtttgccctcttctataatattcctacttcccataataatgactgatttatttgtaattcaggtatttataaacctattggctacaaagactttgttaaacattatccagtggttttcgtgaaatggaattatgtttatttttatgggatttgggtaaattttaaattgtctagaaaactgaaatttcagttgtcagttgtggaattcagtttttcaattgtggaaatttcctgccaccccaacagtatttttgtgtgttaattaattttgcaaaatgagaatcatggtgtgacactcatctaatttatcttgttgtgatgttatggtcataataaggagaaagagggtttaatttttcttgtatttggtttcctggtggtatcatagtgtaattttagtatttgaaaatcagtgtgattccttaatggccaactgaagattgaattgccgctaacaaccatatcgtgttagtgaattttcaatatggaccaggaaggcatatgtattttgaacttgagtgaaaaggttgaagttacagacttttgcatagatggtttgtcaatttaaaattccagaatttattattgccatattttcacatgctgcttatacaagattattattgagtagtaactgcttccctgtctatgtagaagtgcctgtgtttttatttattgttcagatcaaagaccaaaacattttcttaaatatattttatgtaatattttatttgtatacagtgttgttgatgaaatatttaactagagcatgatattttaaatgttaaggtgtaacatatgttaaataaaactgttatttttgaattttaaaatttgttttttgggggtatgaactactagagtttaaaatttttgtttatagaattgaaggttcttatcagatgggatactggggactataaacaatggaaataaagccactgtattttt

SEQ ID NO: 317762 - DNA, 2759 bp, Homo sapiens
agcctggagtgaggcgcagcggcagcggcagcagcggcaacaagtgccggaggctagcagagccaagccggagcagtccctgccgccgacaccgccgggccgcccgtccggggcgccgcgcatggagcgtgagctgcggcggtcgccgggctgagccgcgcggagcggccgggacgtggatgtggccgcgatctcccgcccttgcccccgccccgccgagctggagctgctcccggacaagatatgagaaatgagtgttggacgtcgaagaataaagttgttgggtatcctgatgatggcaaatgtcttcatttattttattatggaagtctccaaaagcagtagccaagaaaaaaatggaaaaggggaagtaataatacccaaagagaagttctggaagatatctacccctcccgaggcatactggaaccgagagcaagagaagctgaaccggcagtacaaccccatcctgagcatgctgaccaaccagacgggggaggcgggcaggctctccaatataagccatctgaactactgcgaacctgacctgagggtcacgtcggtggttacgggttttaacaacttgccggacagatttaaagactttctgctgtatttgagatgccgcaattattcactgcttatagatcagccggataagtgtgcaaagaaacctttcttgttgctggcgattaagtccctcactccacattttgccagaaggcaagcaatccgggaatcctggggccaagaaagcaacgcagggaaccaaacggtggtgcgagtcttcctgctgggccagacacccccagaggacaaccaccccgacctttcagatatgctgaaatttgagagtgagaagcaccaagacattcttatgtggaactacagagacactttcttcaacttgtctctgaaggaagtgctgtttctcaggtgggtaagtacttcctgcccagacactgagtttgttttcaagggcgatgacgatgtttttgtgaacacccatcacatcctgaattacttgaatagtttatccaagaccaaagccaaagatctcttcataggtgatgtgatccacaatgctggacctcatcgggataagaagctgaagtactacatcccagaagttgtttactctggcctctacccaccctatgcagggggaggggggttcctctactccggccacctggccctgaggctgtaccatatcactgaccaggtccatctctaccccattgatgacgtttatactggaatgtgccttcagaaactcggcctcgttccagagaaacacaaaggcttcaggacatttgatatcgaggagaaaaacaaaaataacatctgctcctatgtagatctgatgttagtacatagtagaaaacctcaagagatgattgatatttggtctcagttgcagagtgctcatttaaaatgctaaaatagatacaaactcaattttgcatagaaaggtgtattttgaatagttcccatgttgtgttctcacattagagtaatttctatattaaaccatgaaaattgcctttatgagtgatacccatttgagggcctctaaacccttcaatttggtactcacgtgaagagggaaagcggaagatggtaatttttttttatggatgatatggcaggatgattggttctgatcttaccggctagtggtcatttttaaaaaacttgtaccctcttatctgaaatcctgtttctggaatttggccattttaagtgattttgtttgccctcttctataatattcctacttcccataataatgactgatttatttgtaattcaggtatttataaacctattggctacaaagactttgttaaacattatccagtggttttcgtgaaatggaattatgtttatttttatgggatttgggtaaattttaaattgtctagaaaactgaaatttcagttgtcagttgtggaattcagtttttcaattgtggaaatttcctgccaccccaacagtatttttgtgtgttaattaattttgcaaaatgagaatcatggtgtgacactcatctaatttatcttgttgtgatgttatggtcataataaggagaaagagggtttaatttttcttgtatttggtttcctggtggtatcatagtgtaattttagtatttgaaaatcagtgtgattccttaatggccaactgaagattgaattgccgctaacaaccatatcgtgttagtgaattttcaatatggaccaggaaggcatatgtattttgaacttgagtgaaaaggttgaagttacagacttttgcatagatggtttgtcaatttaaaattccagaatttattattgccatattttcacatgctgcttatacaagattattattgagtagtaactgcttccctgtctatgtagaagtgcctgtgtttttatttattgttcagatcaaagaccaaaacattttcttaaatatattttatgtaatattttatttgtatacagtgttgttgatgaaatatttaactagagcatgatattttaaatgttaaggtgtaacatatgttaaataaaactgttatttttgaattttaaaatttgttttttgggggtatgaactactagagtttaaaattctgccaaactattacttatatgtactattgtgtaacatactttcttgaaatatttttgtttatagaattgaaggttcttatcagatgggatactggggactataaacaatggaaataaagccactgtattttt

SEQ ID NO: 317763 - DNA, 2496 bp, Homo sapiens
ggatccttgtgggcatgatccataatcggtttcaaggtaacgatggtgtcgaggtctttgttgggtatcctgatgatggcaaatgtcttcatttattttattatggaagtctccaaaagcagtagccaagaaaaaaatggaaaaggggaagtaataatacccaaagagaagttctggaagatatctacccctcccgaggcatactggaaccgagagcaagagaagctgaaccggcagtacaaccccatcctgagcatgctgaccaaccagacgggggaggcgggcaggctctccaatataagccatctgaactactgcgaacctgacctgagggtcacgtcggtggttacgggttttaacaacttgccggacagatttaaagactttctgctgtatttgagatgccgcaattattcactgcttatagatcagccggataagtgtgcaaagaaacctttcttgttgctggcgattaagtccctcactccacattttgccagaaggcaagcaatccgggaatcctggggccaagaaagcaacgcagggaaccaaacggtggtgcgagtcttcctgctgggccagacacccccagaggacaaccaccccgacctttcagatatgctgaaatttgagagtgagaagcaccaagacattcttatgtggaactacagagacactttcttcaacttgtctctgaaggaagtgctgtttctcaggtgggtaagtacttcctgcccagacactgagtttgttttcaagggcgatgacgatgtttttgtgaacacccatcacatcctgaattacttgaatagtttatccaagaccaaagccaaagatctcttcataggtgatgtgatccacaatgctggacctcatcgggataagaagctgaagtactacatcccagaagttgtttactctggcctctacccaccctatgcagggggaggggggttcctctactccggccacctggccctgaggctgtaccatatcactgaccaggtccatctctaccccattgatgacgtttatactggaatgtgccttcagaaactcggcctcgttccagagaaacacaaaggcttcaggacatttgatatcgaggagaaaaacaaaaataacatctgctcctatgtagatctgatgttagtacatagtagaaaacctcaagagatgattgatatttggtctcagttgcagagtgctcatttaaaatgctaaaatagatacaaactcaattttgcatagaaaggtgtattttgaatagttcccatgttgtgttctcacattagagtaatttctatattaaaccatgaaaattgcctttatgagtgatacccatttgagggcctctaaacccttcaatttggtactcacgtgaagagggaaagcggaagatggtaatttttttttatggatgatatggcaggatgattggttctgatcttaccggctagtggtcatttttaaaaaacttgtaccctcttatctgaaatcctgtttctggaatttggccattttaagtgattttgtttgccctcttctataatattcctacttcccataataatgactgatttatttgtaattcaggtatttatttttcgtgaaatggaattatgtttatttttatgggatttgggtaaattttaaattgtctagaaaactgaaatttcagttgtcagttgtggaattcagtttttcaattgtggaaatttcctgccaccccaacagtatttttgtgtgttaattaattttgcaaaatgagaatcatggtgtgacactcatctaatttatcttgttgtgatgttatggtcataataaggagaaagagggtttaatttttcttgtatttggtttcctggtggtatcatagtgtaattttagtatttgaaaatcagtgtgattccttaatggccaactgaagattgaattgccgctaacaaccatatcgtgttagtgaattttcaatatggaccaggaaggcatatgtattttgaacttgagtgaaaaggttgaagttacagacttttgcatagatggtttgtcaatttaaaattccagaatttattattgccatattttcacatgctgcttatacaagattattattgagtagtaactgcttccctgtctatgtagaagtgcctgtgtttttatttattgttcagatcaaagaccaaaacattttcttaaatatattttatgtaatattttatttgtatacagtgttgttgatgaaatatttaactagagcatgatattttaaatgttaaggtgtaacatatgttaaataaaactgttatttttgaattttaaaatttgttttttgggggtatgaactactagagtttaaaattctgccaaactattacttatatgtactattgtgtaacatactttcttgaaatatttttgtttatagaattgaaggttcttatcagatgggatactggggactataaacaatggaaataaagccactgtattttt

SEQ ID NO: 317764 - DNA, 2621 bp, Homo sapiens
cccctagagccatttagctgcaaactgtctctgtctctgtttatccgagcagaacctggaaggggctggcaaggactaggcaacagatgggacagccagagagatatgagaaatgagtgttggacgtcgaagaataaagttgttgggtatcctgatgatggcaaatgtcttcatttattttattatggaagtctccaaaagcagtagccaagaaaaaaatggaaaaggggaagtaataatacccaaagagaagttctggaagatatctacccctcccgaggcatactggaaccgagagcaagagaagctgaaccggcagtacaaccccatcctgagcatgctgaccaaccagacgggggaggcgggcaggctctccaatataagccatctgaactactgcgaacctgacctgagggtcacgtcggtggttacgggttttaacaacttgccggacagatttaaagactttctgctgtatttgagatgccgcaattattcactgcttatagatcagccggataagtgtgcaaagaaacctttcttgttgctggcgattaagtccctcactccacattttgccagaaggcaagcaatccgggaatcctggggccaagaaagcaacgcagggaaccaaacggtggtgcgagtcttcctgctgggccagacacccccagaggacaaccaccccgacctttcagatatgctgaaatttgagagtgagaagcaccaagacattcttatgtggaactacagagacactttcttcaacttgtctctgaaggaagtgctgtttctcaggtgggtaagtacttcctgcccagacactgagtttgttttcaagggcgatgacgatgtttttgtgaacacccatcacatcctgaattacttgaatagtttatccaagaccaaagccaaagatctcttcataggtgatgtgatccacaatgctggacctcatcgggataagaagctgaagtactacatcccagaagttgtttactctggcctctacccaccctatgcagggggaggggggttcctctactccggccacctggccctgaggctgtaccatatcactgaccaggtccatctctaccccattgatgacgtttatactggaatgtgccttcagaaactcggcctcgttccagagaaacacaaaggcttcaggacatttgatatcgaggagaaaaacaaaaataacatctgctcctatgtagatctgatgttagtacatagtagaaaacctcaagagatgattgatatttggtctcagttgcagagtgctcatttaaaatgctaaaatagatacaaactcaattttgcatagaaaggtgtattttgaatagttcccatgttgtgttctcacattagagtaatttctatattaaaccatgaaaattgcctttatgagtgatacccatttgagggcctctaaacccttcaatttggtactcacgtgaagagggaaagcggaagatggtaatttttttttatggatgatatggcaggatgattggttctgatcttaccggctagtggtcatttttaaaaaacttgtaccctcttatctgaaatcctgtttctggaatttggccattttaagtgattttgtttgccctcttctataatattcctacttcccataataatgactgatttatttgtaattcaggtatttataaacctattggctacaaagactttgttaaacattatccagtggttttcgtgaaatggaattatgtttatttttatgggatttgggtaaattttaaattgtctagaaaactgaaatttcagttgtcagttgtggaattcagtttttcaattgtggaaatttcctgccaccccaacagtatttttgtgtgttaattaattttgcaaaatgagaatcatggtgtgacactcatctaatttatcttgttgtgatgttatggtcataataaggagaaagagggtttaatttttcttgtatttggtttcctggtggtatcatagtgtaattttagtatttgaaaatcagtgtgattccttaatggccaactgaagattgaattgccgctaacaaccatatcgtgttagtgaattttcaatatggaccaggaaggcatatgtattttgaacttgagtgaaaaggttgaagttacagacttttgcatagatggtttgtcaatttaaaattccagaatttattattgccatattttcacatgctgcttatacaagattattattgagtagtaactgcttccctgtctatgtagaagtgcctgtgtttttatttattgttcagatcaaagaccaaaacattttcttaaatatattttatgtaatattttatttgtatacagtgttgttgatgaaatatttaactagagcatgatattttaaatgttaaggtgtaacatatgttaaataaaactgttatttttgaattttaaaatttgttttttgggggtatgaactactagagtttaaaattctgccaaactattacttatatgtactattgtgtaacatactttcttgaaatatttttgtttatagaattgaaggttcttatcagatgggatactggggactataaacaatggaaataaagccactgtattttt

SEQ ID NO: 317765 - DNA, 448 bp, Homo sapiens
tactattgcattcatgaagaaggagggagatgaaaaattaggcattctaactgggtaaccaggagccgacaacaactcctgacgcaatggttcagccttttactaccatcccatttccaccacctccgcagaatggaattcccacagagtatggggtgccacacactcaagactatgccggccagaccggtgagcataacctgacactctacggaagtacgcaagcccacggggagcagagcagcaactcacccagcacacaaaatggatctcttacgacagaaggtggagcacagacagacggccagcagtcacagacacaaagtagtgaaaattcagagagtaaatctaccccgaaacggctgcatgtctctaatattcctttccgcttccgggaccctgacctccggcagatgtttgggggtaagtctctgaagtctttttatgg

SEQ ID NO: 317766 - DNA, 6972 bp, Homo sapiens
cgcgacagtcggggccgaggcccagggggaggtggcctgtcgcgggtcgcccggctcccggaggcgaggggggcgcgggcggatggcggagggcgcccagccgcagcagccgcctcagctcgggcccggcgccgccgcccggggcatgaagcgggagtcggagctggagctgccggtgcccggagcgggaggagacggagccgatcccggcctgagcaagcggccgcgcactgaggaggcggcggccgacggtggcggcgggatgcagaacgagcctctgactccaggttatcatggattcccagcgcgggacagccagggtaaccaggagccgacaacaactcctgacgcaatggttcagccttttactaccatcccatttccaccacctccgcagaatggaattcccacagagtatggggtgccacacactcaagactatgccggccagaccggtgagcataacctgacactctacggaagtacgcaagcccacggggagcagagcagcaactcacccagcacacaaaatggatctcttacgacagaaggtggagcacagacagacggccagcagtcacagacacaaagtagtgaaaattcagagagtaaatctaccccgaaacggctgcatgtctctaatattcctttccgcttccgggaccctgacctccggcagatgtttgggcagtttggcaaaatcctagatgtagaaataatctttaatgaacgtggctctaagggattcgggttcgtaactttcgagaatagtgctgatgcagacagggccagggagaaattacacggcaccgtggtagagggccgtaaaatcgaggtgaataatgctacagcacgtgtaatgaccaataagaagatggtcacaccatatgcaaatggttggaaattaagcccagtagttggagctgtatatggtccggagttatatgcagcatccagctttcaagcagatgtgtccctaggcaatgatgcagcagtgcccctatcaggaagagggggtatcaacacttacattcctttaatcattcctggcttcccttaccctactgcagccaccacggcagccgctttcagaggagcccatttgaggggcagagggcggacagtatatggtgcagtccgagcggtacctccaacagccatccccgcctatccaggggtggatatgcagcctacagatatgcacagcctgctactgcaaccgcagccaccgctgctgcagccgctgcagccgcttacagtgacggttatggcagggtgtacacagccgacccctaccatgcccttgcccctgccgctagctatggagttggcgctgtggcgagtttataccgaggtggctacagccgatttgccccctactgaagtgacgtgagacccctgcaaatgggacagccccccagttcatgaggcctggctattgcaatatttactagtagaggaactctatagcaagatgaagaggaaaaacaaacaaacaaacaaaaaaaaacacaaaaaaagaaagaatacttttttatacctcactatgttctttgaatatgtatttttcctttaaatttctgcctttaattcttttgttccaaagattgtgcatttttttctttttttttttaaactgtggtaaaaaaaaaaaaaataatgcatttccatgtctgtatgtccgtgcttagcttattctatcaatcacggaagaggcagtcaaggaggaaggagagacattaggagccgataaatgcatctgatcagaaatcagcagacagaattaccaaagtgtatctggtgctgaatgactgggggacaagcagaagtggaagagatctttctgcaacaggatattcttctagtcttctgagtttctggtctttgacaggcaattctggttggctgtggctggaatccacatgctgatagataggaatttgtgcttacaaagcaggagaattaaaaagacgctttcctctcctcttccctcctgtcttctccgttctttttacaatcatcttacacgcacagcctgagacagctggcatagtttttggaattatagtattgatatttccaaacgtgctctcagacagtggataataaacacctcattaggaaaccgatctcagaatgaactctggagtatgaaaaagatcatttctttttgttcctgtaacctagcattccttctaggcttcttctcctttaattgaaccacagcttagctcatgtattcttttattaacaccctgctctcatgtccataagattcaggaatttaggacccagggacagaaaagtgaataagccagtgaccagatttcccccagatgtcttgaggattagaagtacaaattgttgacagccattaaagagggtgaggaagggaaaaggaatattagaagatctggtatttcttacttttttcttgcctcagaaagtacaaagtttaaaaaatagaataaagaatctgctggggaaagatagagtaccaggtcctaggtcagtagtccctggaagttttggtgatgaggacatggaagggcaggcagaggcactttgtacttgctccaaagccataggaattttcatcttccagagcctttatgagtcacttctctatccacagtcttgagcctgtggctatcccgctgagcttctcactgtcctccaaaaacaccccgctgagcacccggaccactttgtacacattaacactacaggacataaaatgcagaggccctgagattgctgccctcccatattggaaggagggtctgcgatggcaagggtcttctatatcaccagaaagagtcgcgcagtgagtcactgccgttgccatctggctgtaattttctatgttatcaaggtaggagggagtgtttctcttctagctgttagatagaactgataaaagcaagtgtcctacagcatttcccaaatgaaggcattaggaaatagaaaagcacggtctttttggctccctggtctagtcacattggtactagggtgacctttcacccaagggacagctgctaaagggagtaattcagagacatggagcttctggttatgggtttgttttgggtttgtttttaactcctgcctccacacatgttcttgactgataactgactcatgtccctgaattaaaatgactgacctatgacagcatcagcattctttgtaagcagagtgatatatctgagagggcgttgacctgttgtgtagaatacatatcctttcccccttcagaatcctgtctcgcctcgtaactgggagagaggctgtgcctgaaactaggggcgatgtcaaggaagctagaggcctcgatgcaattattactgactctggggaggaagacagagaataaggggacaccaactgcccagtccactggccatttttaagggtccccccaccccaagccaaagtttggtttgttgctgttaagacaatttttgttgtatgtatataaatattttagttagaggagcggggaatgggatgcgggctttcacagttctagggaatgggggcagggaggattttgcttttgcttttgctttgagggagaactttagctgactaaaaaaacagaagtttggggtcatgatcacaaaggggccattcccaaaagatggcaagccacgtattcagtggagactaggccaaattctaaatggttttatccatagcaggggagaataggagaatgagtttaagagtttttctcttcttttttcctagaaagaggtaaggataatgggaaaggtagagaaggcggctcccacagaccttttaagagaggcagaatcttgagcttgaggcaccttgagtgcatctcagttcagctggttctggctgaggcctccaaaggcaagctctgtgctttccagtggtttctgctgcatttccagggatggtgtttaacaccgcttcctccagctcccttttctaagaaagaataaatggagttctgctttttatgaaagggtctttggttttcagtgtcaacactgagaattggggctcttgcaagcatctggatttcacagtatcaacctccccgtcaccttttgaactttgagactccgtacggtcaacttcaccagaggcaggttgctcgaagcagcactgcttgtctgttcctgactctggttctcactgtattaaaaaaagagagtcagaggagtctggcatttcgtgagtttgttagaggatgctggctgataattccagaaaacttactgatgctaaatcacagtacatgcatgattctttttcagctttactatagttcatgacctggactttctgtactcttggaagctgggctccttaaaggaggcctctagtgaacacctttatctccatgtccctcttagagcccagagagctgcccataggcattttccagaattcctcatgtcacctagttcaatttccattaactcagatcagccattgtgattcaccatttgtcaggctctcaggtttaacaaaacctactatcaccatcatccttcaacagccacagtctgaattgagccaacatttttttttctttgagaaagaagtggactggggcacaacttttagtctgaggggagctagtggaaatctagacaatagaagtcatcgatagcagcttttcctcaaatgtgtgactcctcaggggctaaactgctcttagcttagaattatgctttactagagatctagcagataagtgggttaatcactaccatcctgtaactagttatatagcttccagacatgagggagacatcaaacagggatggaagcaaccccaaggatatgcaagaagggcatgatgaacccccttccctctggcaggagaacaaggccaaccaagggacagactggaaagcacttagatgtttaaggaggagaaaggggaagctttgaccagtccttgccttttgccaagttcagccagttctccgctgcttgcaacctctagcgcagtaacatttgcagaattgcagattttcccccagatactaggaggaaagggactttggggggtggggaaggggtcgtggtgttttaaaagcataagttacctgtttgcactgttttaagataggaaaaaaaaatagtgggcaaggtgaacatcagacgtaaatttgtgtgtttttattttgtcatgctcttgaaaatgtttgaccatttgtagtatacacagtgaaacttgattctctgttgcataaaacactatatttttttggaaatgttactgtccaaaagcctcttccctccctttccttttcctatgtacttccttcatacttgctttactgatcagccaggcaatagccatccaagagctagagcatgaaacagggccctttccaagtaggctctgggtgtcctaagccagcgtgtgccctctggtttagtgagtgtaatagagtccctggcacctttctttgcaaatgaggctaacagaccagactgcagcaagttatcagattcctcaatcagatgcactaggagtgaggagcccagggatggagggggttcctgaagtattgcagttggctgtagtagctgagttcttttccatgttaccgaaactgtagccagttacagtttactcaggaaaacggtagatcaattcagccatggtagtgctggttggcagggattggtaacggagagaactgctcatcagccaaaactcaagccttgccttttaggaggccaccagcagagggacttggtcctccttgtctggtacttgtgtacatgccggtgacctgaggactccactcacactggcgagcaaaaagggagcagtgattctcttttctctccccaccccctgccctttgttaccaacaccagtttcccagggggtacatgagtttctgaatttttaaaaaatgtttttggtttggtttttctggggactgataagtgctttaagcaatgtccataccccgtcaagactcccagcttagtcattttcttgtatttttctgttcacagtatttgtgtgtgtgcttgttttggcagctcattttggctgtattatatattgagtgatgaattgatcctcttttttccctaagggatatgaattgtttttcttgtgttatattctgcttgtgaatagctggagcaaacctggggctgacacgcgtaagctagggctgcaaagcgagaagagagccggtggagtgtacttgtccctgacaggctgacctacctgagtctctgagcttttcagtccaaatctttgcaaggctcaaaatgccacagaacctctcctcttctccccactccccatggcagggaccggaccatccctacatgcaacatgctgttcctccagcccctcccattgccatggcaaaacaggtacctttggggcatgggggcattacatgggatgcttgtgtaatcgaccacctagccttctctctcccctcccgtcctcccccagaatcacttcctaggacacccgagctgcttgcccagggtcctgtttccctgctaactccagagaagcatcccagggctttgtgacagtctctaattcccttcccttctcgttaagaatcatattgtatagtagctttcagaccatacagtattcattgggttactcctattattatcaagtagctggaattgtgaaggtcggagtagttagatctttagcttttattccttatttttttgtattactctccatgtgtataaattattgatcatgttgctggcttttataaactctaagcgaaggaggagcactgcctcagcctttgcacatggtaatgaagcactgtttttaaataaaagagagaaacaccaaaaaaaaaaaaaagacacacaggggggggctaaattccgagggccgagtaacgtcccggttttgaaaggcctaagggggaaaaaagacggcggaaaccgagggaagcacggttgagagcc

SEQ ID NO: 317767 - DNA, 7044 bp, Homo sapiens
cgcgacagtcggggccgaggcccagggggaggtggcctgtcgcgggtcgcccggctcccggaggcgaggggggcgcgggcggatggcggagggcgcccagccgcagcagccgcctcagctcgggcccggcgccgccgcccggggcatgaagcgggagtcggagctggagctgccggtgcccggagcgggaggagacggagccgatcccggcctgagcaagcggccgcgcactgaggaggcggcggccgacggtggcggcgggatgcagaacgagcctctgactccaggttatcatggattcccagcgcgggacagccagggtaaccaggagccgacaacaactcctgacgcaatggttcagccttttactaccatcccatttccaccacctccgcagaatggaattcccacagagtatggggtgccacacactcaagactatgccggccagaccggtgagcataacctgacactctacggaagtacgcaagcccacggggagcagagcagcaactcacccagcacacaaaatggatctcttacgacagaaggtggagcacagacagacggccagcagtcacagacacaaagtagtgaaaattcagagagtaaatctaccccgaaacggctgcatgtctctaatattcctttccgcttccgggaccctgacctccggcagatgtttgggcagtttggcaaaatcctagatgtagaaataatctttaatgaacgtggctctaagggattcgggttcgtaactttcgagaatagtgctgatgcagacagggccagggagaaattacacggcaccgtggtagagggccgtaaaatcgaggtgaataatgctacagcacgtgtaatgaccaataagaagatggtcacaccatatgcaaatggttggaaattaagcccagtagttggagctgtatatggtccggagttatatgcagcatccagctttcaagcagatgtgtccctaggcaatgatgcagcagtgcccctatcaggaagagggggtatcaacacttacattcctttaatcattcctggcttcccttaccctactgcagccaccacggcagccgctttcagaggagcccatttgaggggcagagggcggacagtatatggtgcagtccgagcggtacctccaacagccatccccgcctatccaggtgtggtttaccaggacggattttacggtgctgacctctatatagaatctgcaaactgcttcagatcaaacagggtggatatgcagcctacagatatgcacagcctgctactgcaaccgcagccaccgctgctgcagccgctgcagccgcttacagtgacggttatggcagggtgtacacagccgacccctaccatgcccttgcccctgccgctagctatggagttggcgctgtggcgagtttataccgaggtggctacagccgatttgccccctactgaagtgacgtgagacccctgcaaatgggacagccccccagttcatgaggcctggctattgcaatatttactagtagaggaactctatagcaagatgaagaggaaaaacaaacaaacaaacaaaaaaaaacacaaaaaaagaaagaatacttttttatacctcactatgttctttgaatatgtatttttcctttaaatttctgcctttaattcttttgttccaaagattgtgcatttttttctttttttttttaaactgtggtaaaaaaaaaaaaaataatgcatttccatgtctgtatgtccgtgcttagcttattctatcaatcacggaagaggcagtcaaggaggaaggagagacattaggagccgataaatgcatctgatcagaaatcagcagacagaattaccaaagtgtatctggtgctgaatgactgggggacaagcagaagtggaagagatctttctgcaacaggatattcttctagtcttctgagtttctggtctttgacaggcaattctggttggctgtggctggaatccacatgctgatagataggaatttgtgcttacaaagcaggagaattaaaaagacgctttcctctcctcttccctcctgtcttctccgttctttttacaatcatcttacacgcacagcctgagacagctggcatagtttttggaattatagtattgatatttccaaacgtgctctcagacagtggataataaacacctcattaggaaaccgatctcagaatgaactctggagtatgaaaaagatcatttctttttgttcctgtaacctagcattccttctaggcttcttctcctttaattgaaccacagcttagctcatgtattcttttattaacaccctgctctcatgtccataagattcaggaatttaggacccagggacagaaaagtgaataagccagtgaccagatttcccccagatgtcttgaggattagaagtacaaattgttgacagccattaaagagggtgaggaagggaaaaggaatattagaagatctggtatttcttacttttttcttgcctcagaaagtacaaagtttaaaaaatagaataaagaatctgctggggaaagatagagtaccaggtcctaggtcagtagtccctggaagttttggtgatgaggacatggaagggcaggcagaggcactttgtacttgctccaaagccataggaattttcatcttccagagcctttatgagtcacttctctatccacagtcttgagcctgtggctatcccgctgagcttctcactgtcctccaaaaacaccccgctgagcacccggaccactttgtacacattaacactacaggacataaaatgcagaggccctgagattgctgccctcccatattggaaggagggtctgcgatggcaagggtcttctatatcaccagaaagagtcgcgcagtgagtcactgccgttgccatctggctgtaattttctatgttatcaaggtaggagggagtgtttctcttctagctgttagatagaactgataaaagcaagtgtcctacagcatttcccaaatgaaggcattaggaaatagaaaagcacggtctttttggctccctggtctagtcacattggtactagggtgacctttcacccaagggacagctgctaaagggagtaattcagagacatggagcttctggttatgggtttgttttgggtttgtttttaactcctgcctccacacatgttcttgactgataactgactcatgtccctgaattaaaatgactgacctatgacagcatcagcattctttgtaagcagagtgatatatctgagagggcgttgacctgttgtgtagaatacatatcctttcccccttcagaatcctgtctcgcctcgtaactgggagagaggctgtgcctgaaactaggggcgatgtcaaggaagctagaggcctcgatgcaattattactgactctggggaggaagacagagaataaggggacaccaactgcccagtccactggccatttttaagggtccccccaccccaagccaaagtttggtttgttgctgttaagacaatttttgttgtatgtatataaatattttagttagaggagcggggaatgggatgcgggctttcacagttctagggaatgggggcagggaggattttgcttttgcttttgctttgagggagaactttagctgactaaaaaaacagaagtttggggtcatgatcacaaaggggccattcccaaaagatggcaagccacgtattcagtggagactaggccaaattctaaatggttttatccatagcaggggagaataggagaatgagtttaagagtttttctcttcttttttcctagaaagaggtaaggataatgggaaaggtagagaaggcggctcccacagaccttttaagagaggcagaatcttgagcttgaggcaccttgagtgcatctcagttcagctggttctggctgaggcctccaaaggcaagctctgtgctttccagtggtttctgctgcatttccagggatggtgtttaacaccgcttcctccagctcccttttctaagaaagaataaatggagttctgctttttatgaaagggtctttggttttcagtgtcaacactgagaattggggctcttgcaagcatctggatttcacagtatcaacctccccgtcaccttttgaactttgagactccgtacggtcaacttcaccagaggcaggttgctcgaagcagcactgcttgtctgttcctgactctggttctcactgtattaaaaaaagagagtcagaggagtctggcatttcgtgagtttgttagaggatgctggctgataattccagaaaacttactgatgctaaatcacagtacatgcatgattctttttcagctttactatagttcatgacctggactttctgtactcttggaagctgggctccttaaaggaggcctctagtgaacacctttatctccatgtccctcttagagcccagagagctgcccataggcattttccagaattcctcatgtcacctagttcaatttccattaactcagatcagccattgtgattcaccatttgtcaggctctcaggtttaacaaaacctactatcaccatcatccttcaacagccacagtctgaattgagccaacatttttttttctttgagaaagaagtggactggggcacaacttttagtctgaggggagctagtggaaatctagacaatagaagtcatcgatagcagcttttcctcaaatgtgtgactcctcaggggctaaactgctcttagcttagaattatgctttactagagatctagcagataagtgggttaatcactaccatcctgtaactagttatatagcttccagacatgagggagacatcaaacagggatggaagcaaccccaaggatatgcaagaagggcatgatgaacccccttccctctggcaggagaacaaggccaaccaagggacagactggaaagcacttagatgtttaaggaggagaaaggggaagctttgaccagtccttgccttttgccaagttcagccagttctccgctgcttgcaacctctagcgcagtaacatttgcagaattgcagattttcccccagatactaggaggaaagggactttggggggtggggaaggggtcgtggtgttttaaaagcataagttacctgtttgcactgttttaagataggaaaaaaaaatagtgggcaaggtgaacatcagacgtaaatttgtgtgtttttattttgtcatgctcttgaaaatgtttgaccatttgtagtatacacagtgaaacttgattctctgttgcataaaacactatatttttttggaaatgttactgtccaaaagcctcttccctccctttccttttcctatgtacttccttcatacttgctttactgatcagccaggcaatagccatccaagagctagagcatgaaacagggccctttccaagtaggctctgggtgtcctaagccagcgtgtgccctctggtttagtgagtgtaatagagtccctggcacctttctttgcaaatgaggctaacagaccagactgcagcaagttatcagattcctcaatcagatgcactaggagtgaggagcccagggatggagggggttcctgaagtattgcagttggctgtagtagctgagttcttttccatgttaccgaaactgtagccagttacagtttactcaggaaaacggtagatcaattcagccatggtagtgctggttggcagggattggtaacggagagaactgctcatcagccaaaactcaagccttgccttttaggaggccaccagcagagggacttggtcctccttgtctggtacttgtgtacatgccggtgacctgaggactccactcacactggcgagcaaaaagggagcagtgattctcttttctctccccaccccctgccctttgttaccaacaccagtttcccagggggtacatgagtttctgaatttttaaaaaatgtttttggtttggtttttctggggactgataagtgctttaagcaatgtccataccccgtcaagactcccagcttagtcattttcttgtatttttctgttcacagtatttgtgtgtgtgcttgttttggcagctcattttggctgtattatatattgagtgatgaattgatcctcttttttccctaagggatatgaattgtttttcttgtgttatattctgcttgtgaatagctggagcaaacctggggctgacacgcgtaagctagggctgcaaagcgagaagagagccggtggagtgtacttgtccctgacaggctgacctacctgagtctctgagcttttcagtccaaatctttgcaaggctcaaaatgccacagaacctctcctcttctccccactccccatggcagggaccggaccatccctacatgcaacatgctgttcctccagcccctcccattgccatggcaaaacaggtacctttggggcatgggggcattacatgggatgcttgtgtaatcgaccacctagccttctctctcccctcccgtcctcccccagaatcacttcctaggacacccgagctgcttgcccagggtcctgtttccctgctaactccagagaagcatcccagggctttgtgacagtctctaattcccttcccttctcgttaagaatcatattgtatagtagctttcagaccatacagtattcattgggttactcctattattatcaagtagctggaattgtgaaggtcggagtagttagatctttagcttttattccttatttttttgtattactctccatgtgtataaattattgatcatgttgctggcttttataaactctaagcgaaggaggagcactgcctcagcctttgcacatggtaatgaagcactgtttttaaataaaagagagaaacaccaaaaaaaaaaaaaagacacacaggggggggctaaattccgagggccgagtaacgtcccggttttgaaaggcctaagggggaaaaaagacggcggaaaccgagggaagcacggttgagagcc

SEQ ID NO: 317768 - DNA, 6928 bp, Homo sapiens
ggaagagagcttcagagaaacgtggaacaccattaactgctccaacatacacttagtatctgccagagaggaagagaaaagaaaggaagaaacattagaaagaaaaaggaaggaaaacggtataaagagagatcaattacccacccttaaatagctagattggggggggaggggggtggaaaagaaagctgtggaggtgtgccccagcacggctgctttgaaaggtttatcatctatccgtttggtttatggagaaaaagaaaatggtaactcagggtaaccaggagccgacaacaactcctgacgcaatggttcagccttttactaccatcccatttccaccacctccgcagaatggaattcccacagagtatggggtgccacacactcaagactatgccggccagaccggtgagcataacctgacactctacggaagtacgcaagcccacggggagcagagcagcaactcacccagcacacaaaatggatctcttacgacagaaggtggagcacagacagacggccagcagtcacagacacaaagtagtgaaaattcagagagtaaatctaccccgaaacggctgcatgtctctaatattcctttccgcttccgggaccctgacctccggcagatgtttgggcagtttggcaaaatcctagatgtagaaataatctttaatgaacgtggctctaagggattcgggttcgtaactttcgagaatagtgctgatgcagacagggccagggagaaattacacggcaccgtggtagagggccgtaaaatcgaggtgaataatgctacagcacgtgtaatgaccaataagaagatggtcacaccatatgcaaatggttggaaattaagcccagtagttggagctgtatatggtccggagttatatgcagcatccagctttcaagcagatgtgtccctaggcaatgatgcagcagtgcccctatcaggaagagggggtatcaacacttacattcctttaatcattcctggcttcccttaccctactgcagccaccacggcagccgctttcagaggagcccatttgaggggcagagggcggacagtatatggtgcagtccgagcggtacctccaacagccatccccgcctatccaggggtggatatgcagcctacagatatgcacagcctgctactgcaaccgcagccaccgctgctgcagccgctgcagccgcttacagtgacggttatggcagggtgtacacagccgacccctaccatgcccttgcccctgccgctagctatggagttggcgctgtggcgagtttataccgaggtggctacagccgatttgccccctactgaagtgacgtgagacccctgcaaatgggacagccccccagttcatgaggcctggctattgcaatatttactagtagaggaactctatagcaagatgaagaggaaaaacaaacaaacaaacaaaaaaaaacacaaaaaaagaaagaatacttttttatacctcactatgttctttgaatatgtatttttcctttaaatttctgcctttaattcttttgttccaaagattgtgcatttttttctttttttttttaaactgtggtaaaaaaaaaaaaaataatgcatttccatgtctgtatgtccgtgcttagcttattctatcaatcacggaagaggcagtcaaggaggaaggagagacattaggagccgataaatgcatctgatcagaaatcagcagacagaattaccaaagtgtatctggtgctgaatgactgggggacaagcagaagtggaagagatctttctgcaacaggatattcttctagtcttctgagtttctggtctttgacaggcaattctggttggctgtggctggaatccacatgctgatagataggaatttgtgcttacaaagcaggagaattaaaaagacgctttcctctcctcttccctcctgtcttctccgttctttttacaatcatcttacacgcacagcctgagacagctggcatagtttttggaattatagtattgatatttccaaacgtgctctcagacagtggataataaacacctcattaggaaaccgatctcagaatgaactctggagtatgaaaaagatcatttctttttgttcctgtaacctagcattccttctaggcttcttctcctttaattgaaccacagcttagctcatgtattcttttattaacaccctgctctcatgtccataagattcaggaatttaggacccagggacagaaaagtgaataagccagtgaccagatttcccccagatgtcttgaggattagaagtacaaattgttgacagccattaaagagggtgaggaagggaaaaggaatattagaagatctggtatttcttacttttttcttgcctcagaaagtacaaagtttaaaaaatagaataaagaatctgctggggaaagatagagtaccaggtcctaggtcagtagtccctggaagttttggtgatgaggacatggaagggcaggcagaggcactttgtacttgctccaaagccataggaattttcatcttccagagcctttatgagtcacttctctatccacagtcttgagcctgtggctatcccgctgagcttctcactgtcctccaaaaacaccccgctgagcacccggaccactttgtacacattaacactacaggacataaaatgcagaggccctgagattgctgccctcccatattggaaggagggtctgcgatggcaagggtcttctatatcaccagaaagagtcgcgcagtgagtcactgccgttgccatctggctgtaattttctatgttatcaaggtaggagggagtgtttctcttctagctgttagatagaactgataaaagcaagtgtcctacagcatttcccaaatgaaggcattaggaaatagaaaagcacggtctttttggctccctggtctagtcacattggtactagggtgacctttcacccaagggacagctgctaaagggagtaattcagagacatggagcttctggttatgggtttgttttgggtttgtttttaactcctgcctccacacatgttcttgactgataactgactcatgtccctgaattaaaatgactgacctatgacagcatcagcattctttgtaagcagagtgatatatctgagagggcgttgacctgttgtgtagaatacatatcctttcccccttcagaatcctgtctcgcctcgtaactgggagagaggctgtgcctgaaactaggggcgatgtcaaggaagctagaggcctcgatgcaattattactgactctggggaggaagacagagaataaggggacaccaactgcccagtccactggccatttttaagggtccccccaccccaagccaaagtttggtttgttgctgttaagacaatttttgttgtatgtatataaatattttagttagaggagcggggaatgggatgcgggctttcacagttctagggaatgggggcagggaggattttgcttttgcttttgctttgagggagaactttagctgactaaaaaaacagaagtttggggtcatgatcacaaaggggccattcccaaaagatggcaagccacgtattcagtggagactaggccaaattctaaatggttttatccatagcaggggagaataggagaatgagtttaagagtttttctcttcttttttcctagaaagaggtaaggataatgggaaaggtagagaaggcggctcccacagaccttttaagagaggcagaatcttgagcttgaggcaccttgagtgcatctcagttcagctggttctggctgaggcctccaaaggcaagctctgtgctttccagtggtttctgctgcatttccagggatggtgtttaacaccgcttcctccagctcccttttctaagaaagaataaatggagttctgctttttatgaaagggtctttggttttcagtgtcaacactgagaattggggctcttgcaagcatctggatttcacagtatcaacctccccgtcaccttttgaactttgagactccgtacggtcaacttcaccagaggcaggttgctcgaagcagcactgcttgtctgttcctgactctggttctcactgtattaaaaaaagagagtcagaggagtctggcatttcgtgagtttgttagaggatgctggctgataattccagaaaacttactgatgctaaatcacagtacatgcatgattctttttcagctttactatagttcatgacctggactttctgtactcttggaagctgggctccttaaaggaggcctctagtgaacacctttatctccatgtccctcttagagcccagagagctgcccataggcattttccagaattcctcatgtcacctagttcaatttccattaactcagatcagccattgtgattcaccatttgtcaggctctcaggtttaacaaaacctactatcaccatcatccttcaacagccacagtctgaattgagccaacatttttttttctttgagaaagaagtggactggggcacaacttttagtctgaggggagctagtggaaatctagacaatagaagtcatcgatagcagcttttcctcaaatgtgtgactcctcaggggctaaactgctcttagcttagaattatgctttactagagatctagcagataagtgggttaatcactaccatcctgtaactagttatatagcttccagacatgagggagacatcaaacagggatggaagcaaccccaaggatatgcaagaagggcatgatgaacccccttccctctggcaggagaacaaggccaaccaagggacagactggaaagcacttagatgtttaaggaggagaaaggggaagctttgaccagtccttgccttttgccaagttcagccagttctccgctgcttgcaacctctagcgcagtaacatttgcagaattgcagattttcccccagatactaggaggaaagggactttggggggtggggaaggggtcgtggtgttttaaaagcataagttacctgtttgcactgttttaagataggaaaaaaaaatagtgggcaaggtgaacatcagacgtaaatttgtgtgtttttattttgtcatgctcttgaaaatgtttgaccatttgtagtatacacagtgaaacttgattctctgttgcataaaacactatatttttttggaaatgttactgtccaaaagcctcttccctccctttccttttcctatgtacttccttcatacttgctttactgatcagccaggcaatagccatccaagagctagagcatgaaacagggccctttccaagtaggctctgggtgtcctaagccagcgtgtgccctctggtttagtgagtgtaatagagtccctggcacctttctttgcaaatgaggctaacagaccagactgcagcaagttatcagattcctcaatcagatgcactaggagtgaggagcccagggatggagggggttcctgaagtattgcagttggctgtagtagctgagttcttttccatgttaccgaaactgtagccagttacagtttactcaggaaaacggtagatcaattcagccatggtagtgctggttggcagggattggtaacggagagaactgctcatcagccaaaactcaagccttgccttttaggaggccaccagcagagggacttggtcctccttgtctggtacttgtgtacatgccggtgacctgaggactccactcacactggcgagcaaaaagggagcagtgattctcttttctctccccaccccctgccctttgttaccaacaccagtttcccagggggtacatgagtttctgaatttttaaaaaatgtttttggtttggtttttctggggactgataagtgctttaagcaatgtccataccccgtcaagactcccagcttagtcattttcttgtatttttctgttcacagtatttgtgtgtgtgcttgttttggcagctcattttggctgtattatatattgagtgatgaattgatcctcttttttccctaagggatatgaattgtttttcttgtgttatattctgcttgtgaatagctggagcaaacctggggctgacacgcgtaagctagggctgcaaagcgagaagagagccggtggagtgtacttgtccctgacaggctgacctacctgagtctctgagcttttcagtccaaatctttgcaaggctcaaaatgccacagaacctctcctcttctccccactccccatggcagggaccggaccatccctacatgcaacatgctgttcctccagcccctcccattgccatggcaaaacaggtacctttggggcatgggggcattacatgggatgcttgtgtaatcgaccacctagccttctctctcccctcccgtcctcccccagaatcacttcctaggacacccgagctgcttgcccagggtcctgtttccctgctaactccagagaagcatcccagggctttgtgacagtctctaattcccttcccttctcgttaagaatcatattgtatagtagctttcagaccatacagtattcattgggttactcctattattatcaagtagctggaattgtgaaggtcggagtagttagatctttagcttttattccttatttttttgtattactctccatgtgtataaattattgatcatgttgctggcttttataaactctaagcgaaggaggagcactgcctcagcctttgcacatggtaatgaagcactgtttttaaataaaagagagaaacaccaaaaaaaaaaaaaagacacacaggggggggctaaattccgagggccgagtaacgtcccggttttgaaaggcctaagggggaaaaaagacggcggaaaccgagggaagcacggttgagagcc

SEQ ID NO: 317769 - DNA, 6914 bp, Homo sapiens
ggaagagagcttcagagaaacgtggaacaccattaactgctccaacatacacttagtatctgccagagaggaagagaaaagaaaggaagaaacattagaaagaaaaaggaaggaaaacggtataaagagagatcaattacccacccttaaatagctagattggggggggaggggggtggaaaagaaagctgtggaggtgtgccccagcacggctgctttgaaaggtttatcatctatccgtttggtttatggagaaaaagaaaatggtaactcagggtaaccaggagccgacaacaactcctgacgcaatggttcagccttttactaccatcccatttccaccacctccgcagaatggaattcccacagagtatggggtgccacacactcaagactatgccggccagaccggtgagcataacctgacactctacggaagtacgcaagcccacggggagcagagcagcaactcacccagcacacaaaatggatctcttacgacagaaggtggagcacagacagacggccagcagtcacagacacaaagtagtgaaaattcagagagtaaatctaccccgaaacggctgcatgtctctaatattcctttccgcttccgggaccctgacctccggcagatgtttgggggattcgggttcgtaactttcgagaatagtgctgatgcagacagggccagggagaaattacacggcaccgtggtagagggccgtaaaatcgaggtgaataatgctacagcacgtgtaatgaccaataagaagatggtcacaccatatgcaaatggttggaaattaagcccagtagttggagctgtatatggtccggagttatatgcagcatccagctttcaagcagatgtgtccctaggcaatgatgcagcagtgcccctatcaggaagagggggtatcaacacttacattcctttaatcattcctggcttcccttaccctactgcagccaccacggcagccgctttcagaggagcccatttgaggggcagagggcggacagtatatggtgcagtccgagcggtacctccaacagccatccccgcctatccaggtgtggtttaccaggacggattttacggtgctgacctctatggtggatatgcagcctacagatatgcacagcctgctactgcaaccgcagccaccgctgctgcagccgctgcagccgcttacagtgacggttatggcagggtgtacacagccgacccctaccatgcccttgcccctgccgctagctatggagttggcgctgtggcgagtttataccgaggtggctacagccgatttgccccctactgaagtgacgtgagacccctgcaaatgggacagccccccagttcatgaggcctggctattgcaatatttactagtagaggaactctatagcaagatgaagaggaaaaacaaacaaacaaacaaaaaaaaacacaaaaaaagaaagaatacttttttatacctcactatgttctttgaatatgtatttttcctttaaatttctgcctttaattcttttgttccaaagattgtgcatttttttctttttttttttaaactgtggtaaaaaaaaaaaaaataatgcatttccatgtctgtatgtccgtgcttagcttattctatcaatcacggaagaggcagtcaaggaggaaggagagacattaggagccgataaatgcatctgatcagaaatcagcagacagaattaccaaagtgtatctggtgctgaatgactgggggacaagcagaagtggaagagatctttctgcaacaggatattcttctagtcttctgagtttctggtctttgacaggcaattctggttggctgtggctggaatccacatgctgatagataggaatttgtgcttacaaagcaggagaattaaaaagacgctttcctctcctcttccctcctgtcttctccgttctttttacaatcatcttacacgcacagcctgagacagctggcatagtttttggaattatagtattgatatttccaaacgtgctctcagacagtggataataaacacctcattaggaaaccgatctcagaatgaactctggagtatgaaaaagatcatttctttttgttcctgtaacctagcattccttctaggcttcttctcctttaattgaaccacagcttagctcatgtattcttttattaacaccctgctctcatgtccataagattcaggaatttaggacccagggacagaaaagtgaataagccagtgaccagatttcccccagatgtcttgaggattagaagtacaaattgttgacagccattaaagagggtgaggaagggaaaaggaatattagaagatctggtatttcttacttttttcttgcctcagaaagtacaaagtttaaaaaatagaataaagaatctgctggggaaagatagagtaccaggtcctaggtcagtagtccctggaagttttggtgatgaggacatggaagggcaggcagaggcactttgtacttgctccaaagccataggaattttcatcttccagagcctttatgagtcacttctctatccacagtcttgagcctgtggctatcccgctgagcttctcactgtcctccaaaaacaccccgctgagcacccggaccactttgtacacattaacactacaggacataaaatgcagaggccctgagattgctgccctcccatattggaaggagggtctgcgatggcaagggtcttctatatcaccagaaagagtcgcgcagtgagtcactgccgttgccatctggctgtaattttctatgttatcaaggtaggagggagtgtttctcttctagctgttagatagaactgataaaagcaagtgtcctacagcatttcccaaatgaaggcattaggaaatagaaaagcacggtctttttggctccctggtctagtcacattggtactagggtgacctttcacccaagggacagctgctaaagggagtaattcagagacatggagcttctggttatgggtttgttttgggtttgtttttaactcctgcctccacacatgttcttgactgataactgactcatgtccctgaattaaaatgactgacctatgacagcatcagcattctttgtaagcagagtgatatatctgagagggcgttgacctgttgtgtagaatacatatcctttcccccttcagaatcctgtctcgcctcgtaactgggagagaggctgtgcctgaaactaggggcgatgtcaaggaagctagaggcctcgatgcaattattactgactctggggaggaagacagagaataaggggacaccaactgcccagtccactggccatttttaagggtccccccaccccaagccaaagtttggtttgttgctgttaagacaatttttgttgtatgtatataaatattttagttagaggagcggggaatgggatgcgggctttcacagttctagggaatgggggcagggaggattttgcttttgcttttgctttgagggagaactttagctgactaaaaaaacagaagtttggggtcatgatcacaaaggggccattcccaaaagatggcaagccacgtattcagtggagactaggccaaattctaaatggttttatccatagcaggggagaataggagaatgagtttaagagtttttctcttcttttttcctagaaagaggtaaggataatgggaaaggtagagaaggcggctcccacagaccttttaagagaggcagaatcttgagcttgaggcaccttgagtgcatctcagttcagctggttctggctgaggcctccaaaggcaagctctgtgctttccagtggtttctgctgcatttccagggatggtgtttaacaccgcttcctccagctcccttttctaagaaagaataaatggagttctgctttttatgaaagggtctttggttttcagtgtcaacactgagaattggggctcttgcaagcatctggatttcacagtatcaacctccccgtcaccttttgaactttgagactccgtacggtcaacttcaccagaggcaggttgctcgaagcagcactgcttgtctgttcctgactctggttctcactgtattaaaaaaagagagtcagaggagtctggcatttcgtgagtttgttagaggatgctggctgataattccagaaaacttactgatgctaaatcacagtacatgcatgattctttttcagctttactatagttcatgacctggactttctgtactcttggaagctgggctccttaaaggaggcctctagtgaacacctttatctccatgtccctcttagagcccagagagctgcccataggcattttccagaattcctcatgtcacctagttcaatttccattaactcagatcagccattgtgattcaccatttgtcaggctctcaggtttaacaaaacctactatcaccatcatccttcaacagccacagtctgaattgagccaacatttttttttctttgagaaagaagtggactggggcacaacttttagtctgaggggagctagtggaaatctagacaatagaagtcatcgatagcagcttttcctcaaatgtgtgactcctcaggggctaaactgctcttagcttagaattatgctttactagagatctagcagataagtgggttaatcactaccatcctgtaactagttatatagcttccagacatgagggagacatcaaacagggatggaagcaaccccaaggatatgcaagaagggcatgatgaacccccttccctctggcaggagaacaaggccaaccaagggacagactggaaagcacttagatgtttaaggaggagaaaggggaagctttgaccagtccttgccttttgccaagttcagccagttctccgctgcttgcaacctctagcgcagtaacatttgcagaattgcagattttcccccagatactaggaggaaagggactttggggggtggggaaggggtcgtggtgttttaaaagcataagttacctgtttgcactgttttaagataggaaaaaaaaatagtgggcaaggtgaacatcagacgtaaatttgtgtgtttttattttgtcatgctcttgaaaatgtttgaccatttgtagtatacacagtgaaacttgattctctgttgcataaaacactatatttttttggaaatgttactgtccaaaagcctcttccctccctttccttttcctatgtacttccttcatacttgctttactgatcagccaggcaatagccatccaagagctagagcatgaaacagggccctttccaagtaggctctgggtgtcctaagccagcgtgtgccctctggtttagtgagtgtaatagagtccctggcacctttctttgcaaatgaggctaacagaccagactgcagcaagttatcagattcctcaatcagatgcactaggagtgaggagcccagggatggagggggttcctgaagtattgcagttggctgtagtagctgagttcttttccatgttaccgaaactgtagccagttacagtttactcaggaaaacggtagatcaattcagccatggtagtgctggttggcagggattggtaacggagagaactgctcatcagccaaaactcaagccttgccttttaggaggccaccagcagagggacttggtcctccttgtctggtacttgtgtacatgccggtgacctgaggactccactcacactggcgagcaaaaagggagcagtgattctcttttctctccccaccccctgccctttgttaccaacaccagtttcccagggggtacatgagtttctgaatttttaaaaaatgtttttggtttggtttttctggggactgataagtgctttaagcaatgtccataccccgtcaagactcccagcttagtcattttcttgtatttttctgttcacagtatttgtgtgtgtgcttgttttggcagctcattttggctgtattatatattgagtgatgaattgatcctcttttttccctaagggatatgaattgtttttcttgtgttatattctgcttgtgaatagctggagcaaacctggggctgacacgcgtaagctagggctgcaaagcgagaagagagccggtggagtgtacttgtccctgacaggctgacctacctgagtctctgagcttttcagtccaaatctttgcaaggctcaaaatgccacagaacctctcctcttctccccactccccatggcagggaccggaccatccctacatgcaacatgctgttcctccagcccctcccattgccatggcaaaacaggtacctttggggcatgggggcattacatgggatgcttgtgtaatcgaccacctagccttctctctcccctcccgtcctcccccagaatcacttcctaggacacccgagctgcttgcccagggtcctgtttccctgctaactccagagaagcatcccagggctttgtgacagtctctaattcccttcccttctcgttaagaatcatattgtatagtagctttcagaccatacagtattcattgggttactcctattattatcaagtagctggaattgtgaaggtcggagtagttagatctttagcttttattccttatttttttgtattactctccatgtgtataaattattgatcatgttgctggcttttataaactctaagcgaaggaggagcactgcctcagcctttgcacatggtaatgaagcactgtttttaaataaaagagagaaacaccaaaaaaaaaaaaaagacacacaggggggggctaaattccgagggccgagtaacgtcccggttttgaaaggcctaagggggaaaaaagacggcggaaaccgagggaagcacggttgagagcc

SEQ ID NO: 317770 - DNA, 6915 bp, Homo sapiens
ggctctgagaaggaattacttctctagaatgcaaagtgggcatctgagccagagaatgaagccctggtccatatttagtcattatttagggagagtgaggagtaacaatttcaaaattagagtttggattaagcaaagaaaatactagtcacaaattggctggtgtatgagaacgagcctctgactccaggttatcatggattcccagcgcgggacagccagggtaaccaggagccgacaacaactcctgacgcaatggttcagccttttactaccatcccatttccaccacctccgcagaatggaattcccacagagtatggggtgccacacactcaagactatgccggccagaccggtgagcataacctgacactctacggaagtacgcaagcccacggggagcagagcagcaactcacccagcacacaaaatggatctcttacgacagaaggtggagcacagacagacggccagcagtcacagacacaaagtagtgaaaattcagagagtaaatctaccccgaaacggctgcatgtctctaatattcctttccgcttccgggaccctgacctccggcagatgtttgggcagtttggcaaaatcctagatgtagaaataatctttaatgaacgtggctctaagggattcgggttcgtaactttcgagaatagtgctgatgcagacagggccagggagaaattacacggcaccgtggtagagggccgtaaaatcgaggtgaataatgctacagcacgtgtaatgaccaataagaagatggtcacaccatatgcaaatggttggaaattaagcccagtagttggagctgtatatggtccggagttatatgcagcatccagctttcaagcagatgtgtccctaggcaatgatgcagcagtgcccctatcaggaagagggggtatcaacacttacattcctttaatcattcctggcttcccttaccctactgcagccaccacggcagccgctttcagaggagcccatttgaggggcagagggcggacagtatatggtgcagtccgagcggtacctccaacagccatccccgcctatccaggtgtggtttaccaggacggattttacggtgctgacctctatggtggatatgcagcctacagatatgcacagcctgctactgcaaccgcagccaccgctgctgcagccgctgcagccgcttacagtgacggttatggcagggtgtacacagccgacccctaccatgcccttgcccctgccgctagctatggagttggcgctgtggcgagtttataccgaggtggctacagccgatttgccccctactgaagtgacgtgagacccctgcaaatgggacagccccccagttcatgaggcctggctattgcaatatttactagtagaggaactctatagcaagatgaagaggaaaaacaaacaaacaaacaaaaaaaaacacaaaaaaagaaagaatacttttttatacctcactatgttctttgaatatgtatttttcctttaaatttctgcctttaattcttttgttccaaagattgtgcatttttttctttttttttttaaactgtggtaaaaaaaaaaaaaataatgcatttccatgtctgtatgtccgtgcttagcttattctatcaatcacggaagaggcagtcaaggaggaaggagagacattaggagccgataaatgcatctgatcagaaatcagcagacagaattaccaaagtgtatctggtgctgaatgactgggggacaagcagaagtggaagagatctttctgcaacaggatattcttctagtcttctgagtttctggtctttgacaggcaattctggttggctgtggctggaatccacatgctgatagataggaatttgtgcttacaaagcaggagaattaaaaagacgctttcctctcctcttccctcctgtcttctccgttctttttacaatcatcttacacgcacagcctgagacagctggcatagtttttggaattatagtattgatatttccaaacgtgctctcagacagtggataataaacacctcattaggaaaccgatctcagaatgaactctggagtatgaaaaagatcatttctttttgttcctgtaacctagcattccttctaggcttcttctcctttaattgaaccacagcttagctcatgtattcttttattaacaccctgctctcatgtccataagattcaggaatttaggacccagggacagaaaagtgaataagccagtgaccagatttcccccagatgtcttgaggattagaagtacaaattgttgacagccattaaagagggtgaggaagggaaaaggaatattagaagatctggtatttcttacttttttcttgcctcagaaagtacaaagtttaaaaaatagaataaagaatctgctggggaaagatagagtaccaggtcctaggtcagtagtccctggaagttttggtgatgaggacatggaagggcaggcagaggcactttgtacttgctccaaagccataggaattttcatcttccagagcctttatgagtcacttctctatccacagtcttgagcctgtggctatcccgctgagcttctcactgtcctccaaaaacaccccgctgagcacccggaccactttgtacacattaacactacaggacataaaatgcagaggccctgagattgctgccctcccatattggaaggagggtctgcgatggcaagggtcttctatatcaccagaaagagtcgcgcagtgagtcactgccgttgccatctggctgtaattttctatgttatcaaggtaggagggagtgtttctcttctagctgttagatagaactgataaaagcaagtgtcctacagcatttcccaaatgaaggcattaggaaatagaaaagcacggtctttttggctccctggtctagtcacattggtactagggtgacctttcacccaagggacagctgctaaagggagtaattcagagacatggagcttctggttatgggtttgttttgggtttgtttttaactcctgcctccacacatgttcttgactgataactgactcatgtccctgaattaaaatgactgacctatgacagcatcagcattctttgtaagcagagtgatatatctgagagggcgttgacctgttgtgtagaatacatatcctttcccccttcagaatcctgtctcgcctcgtaactgggagagaggctgtgcctgaaactaggggcgatgtcaaggaagctagaggcctcgatgcaattattactgactctggggaggaagacagagaataaggggacaccaactgcccagtccactggccatttttaagggtccccccaccccaagccaaagtttggtttgttgctgttaagacaatttttgttgtatgtatataaatattttagttagaggagcggggaatgggatgcgggctttcacagttctagggaatgggggcagggaggattttgcttttgcttttgctttgagggagaactttagctgactaaaaaaacagaagtttggggtcatgatcacaaaggggccattcccaaaagatggcaagccacgtattcagtggagactaggccaaattctaaatggttttatccatagcaggggagaataggagaatgagtttaagagtttttctcttcttttttcctagaaagaggtaaggataatgggaaaggtagagaaggcggctcccacagaccttttaagagaggcagaatcttgagcttgaggcaccttgagtgcatctcagttcagctggttctggctgaggcctccaaaggcaagctctgtgctttccagtggtttctgctgcatttccagggatggtgtttaacaccgcttcctccagctcccttttctaagaaagaataaatggagttctgctttttatgaaagggtctttggttttcagtgtcaacactgagaattggggctcttgcaagcatctggatttcacagtatcaacctccccgtcaccttttgaactttgagactccgtacggtcaacttcaccagaggcaggttgctcgaagcagcactgcttgtctgttcctgactctggttctcactgtattaaaaaaagagagtcagaggagtctggcatttcgtgagtttgttagaggatgctggctgataattccagaaaacttactgatgctaaatcacagtacatgcatgattctttttcagctttactatagttcatgacctggactttctgtactcttggaagctgggctccttaaaggaggcctctagtgaacacctttatctccatgtccctcttagagcccagagagctgcccataggcattttccagaattcctcatgtcacctagttcaatttccattaactcagatcagccattgtgattcaccatttgtcaggctctcaggtttaacaaaacctactatcaccatcatccttcaacagccacagtctgaattgagccaacatttttttttctttgagaaagaagtggactggggcacaacttttagtctgaggggagctagtggaaatctagacaatagaagtcatcgatagcagcttttcctcaaatgtgtgactcctcaggggctaaactgctcttagcttagaattatgctttactagagatctagcagataagtgggttaatcactaccatcctgtaactagttatatagcttccagacatgagggagacatcaaacagggatggaagcaaccccaaggatatgcaagaagggcatgatgaacccccttccctctggcaggagaacaaggccaaccaagggacagactggaaagcacttagatgtttaaggaggagaaaggggaagctttgaccagtccttgccttttgccaagttcagccagttctccgctgcttgcaacctctagcgcagtaacatttgcagaattgcagattttcccccagatactaggaggaaagggactttggggggtggggaaggggtcgtggtgttttaaaagcataagttacctgtttgcactgttttaagataggaaaaaaaaatagtgggcaaggtgaacatcagacgtaaatttgtgtgtttttattttgtcatgctcttgaaaatgtttgaccatttgtagtatacacagtgaaacttgattctctgttgcataaaacactatatttttttggaaatgttactgtccaaaagcctcttccctccctttccttttcctatgtacttccttcatacttgctttactgatcagccaggcaatagccatccaagagctagagcatgaaacagggccctttccaagtaggctctgggtgtcctaagccagcgtgtgccctctggtttagtgagtgtaatagagtccctggcacctttctttgcaaatgaggctaacagaccagactgcagcaagttatcagattcctcaatcagatgcactaggagtgaggagcccagggatggagggggttcctgaagtattgcagttggctgtagtagctgagttcttttccatgttaccgaaactgtagccagttacagtttactcaggaaaacggtagatcaattcagccatggtagtgctggttggcagggattggtaacggagagaactgctcatcagccaaaactcaagccttgccttttaggaggccaccagcagagggacttggtcctccttgtctggtacttgtgtacatgccggtgacctgaggactccactcacactggcgagcaaaaagggagcagtgattctcttttctctccccaccccctgccctttgttaccaacaccagtttcccagggggtacatgagtttctgaatttttaaaaaatgtttttggtttggtttttctggggactgataagtgctttaagcaatgtccataccccgtcaagactcccagcttagtcattttcttgtatttttctgttcacagtatttgtgtgtgtgcttgttttggcagctcattttggctgtattatatattgagtgatgaattgatcctcttttttccctaagggatatgaattgtttttcttgtgttatattctgcttgtgaatagctggagcaaacctggggctgacacgcgtaagctagggctgcaaagcgagaagagagccggtggagtgtacttgtccctgacaggctgacctacctgagtctctgagcttttcagtccaaatctttgcaaggctcaaaatgccacagaacctctcctcttctccccactccccatggcagggaccggaccatccctacatgcaacatgctgttcctccagcccctcccattgccatggcaaaacaggtacctttggggcatgggggcattacatgggatgcttgtgtaatcgaccacctagccttctctctcccctcccgtcctcccccagaatcacttcctaggacacccgagctgcttgcccagggtcctgtttccctgctaactccagagaagcatcccagggctttgtgacagtctctaattcccttcccttctcgttaagaatcatattgtatagtagctttcagaccatacagtattcattgggttactcctattattatcaagtagctggaattgtgaaggtcggagtagttagatctttagcttttattccttatttttttgtattactctccatgtgtataaattattgatcatgttgctggcttttataaactctaagcgaaggaggagcactgcctcagcctttgcacatggtaatgaagcactgtttttaaataaaagagagaaacaccaaaaaaaaaaaaaagacacacaggggggggctaaattccgagggccgagtaacgtcccggttttgaaaggcctaagggggaaaaaagacggcggaaaccgagggaagcacggttgagagcc

SEQ ID NO: 317771 - DNA, 6783 bp, Homo sapiens
cgtattggataaatgacccaggagacataatcagtaaagaacgagcctctgactccaggttatcatggattcccagcgcgggacagccagggtaaccaggagccgacaacaactcctgacgcaatggttcagccttttactaccatcccatttccaccacctccgcagaatggaattcccacagagtatggggtgccacacactcaagactatgccggccagaccggtgagcataacctgacactctacggaagtacgcaagcccacggggagcagagcagcaactcacccagcacacaaaatggatctcttacgacagaaggtggagcacagacagacggccagcagtcacagacacaaagtagtgaaaattcagagagtaaatctaccccgaaacggctgcatgtctctaatattcctttccgcttccgggaccctgacctccggcagatgtttgggcagtttggcaaaatcctagatgtagaaataatctttaatgaacgtggctctaagggattcgggttcgtaactttcgagaatagtgctgatgcagacagggccagggagaaattacacggcaccgtggtagagggccgtaaaatcgaggtgaataatgctacagcacgtgtaatgaccaataagaagatggtcacaccatatgcaaatggttggaaattaagcccagtagttggagctgtatatggtccggagttatatgcagcatccagctttcaagcagatgtgtccctaggcaatgatgcagcagtgcccctatcaggaagagggggtatcaacacttacattcctttaatcattcctggcttcccttaccctactgcagccaccacggcagccgctttcagaggagcccatttgaggggcagagggcggacagtatatggtgcagtccgagcggtacctccaacagccatccccgcctatccaggtgtggtttaccaggacggattttacggtgctgacctctatggtggatatgcagcctacagatatgcacagcctgctactgcaaccgcagccaccgctgctgcagccgctgcagccgcttacagtgacggttatggcagggtgtacacagccgacccctaccatgcccttgcccctgccgctagctatggagttggcgctgtggcgagtttataccgaggtggctacagccgatttgccccctactgaagtgacgtgagacccctgcaaatgggacagccccccagttcatgaggcctggctattgcaatatttactagtagaggaactctatagcaagatgaagaggaaaaacaaacaaacaaacaaaaaaaaacacaaaaaaagaaagaatacttttttatacctcactatgttctttgaatatgtatttttcctttaaatttctgcctttaattcttttgttccaaagattgtgcatttttttctttttttttttaaactgtggtaaaaaaaaaaaaaataatgcatttccatgtctgtatgtccgtgcttagcttattctatcaatcacggaagaggcagtcaaggaggaaggagagacattaggagccgataaatgcatctgatcagaaatcagcagacagaattaccaaagtgtatctggtgctgaatgactgggggacaagcagaagtggaagagatctttctgcaacaggatattcttctagtcttctgagtttctggtctttgacaggcaattctggttggctgtggctggaatccacatgctgatagataggaatttgtgcttacaaagcaggagaattaaaaagacgctttcctctcctcttccctcctgtcttctccgttctttttacaatcatcttacacgcacagcctgagacagctggcatagtttttggaattatagtattgatatttccaaacgtgctctcagacagtggataataaacacctcattaggaaaccgatctcagaatgaactctggagtatgaaaaagatcatttctttttgttcctgtaacctagcattccttctaggcttcttctcctttaattgaaccacagcttagctcatgtattcttttattaacaccctgctctcatgtccataagattcaggaatttaggacccagggacagaaaagtgaataagccagtgaccagatttcccccagatgtcttgaggattagaagtacaaattgttgacagccattaaagagggtgaggaagggaaaaggaatattagaagatctggtatttcttacttttttcttgcctcagaaagtacaaagtttaaaaaatagaataaagaatctgctggggaaagatagagtaccaggtcctaggtcagtagtccctggaagttttggtgatgaggacatggaagggcaggcagaggcactttgtacttgctccaaagccataggaattttcatcttccagagcctttatgagtcacttctctatccacagtcttgagcctgtggctatcccgctgagcttctcactgtcctccaaaaacaccccgctgagcacccggaccactttgtacacattaacactacaggacataaaatgcagaggccctgagattgctgccctcccatattggaaggagggtctgcgatggcaagggtcttctatatcaccagaaagagtcgcgcagtgagtcactgccgttgccatctggctgtaattttctatgttatcaaggtaggagggagtgtttctcttctagctgttagatagaactgataaaagcaagtgtcctacagcatttcccaaatgaaggcattaggaaatagaaaagcacggtctttttggctccctggtctagtcacattggtactagggtgacctttcacccaagggacagctgctaaagggagtaattcagagacatggagcttctggttatgggtttgttttgggtttgtttttaactcctgcctccacacatgttcttgactgataactgactcatgtccctgaattaaaatgactgacctatgacagcatcagcattctttgtaagcagagtgatatatctgagagggcgttgacctgttgtgtagaatacatatcctttcccccttcagaatcctgtctcgcctcgtaactgggagagaggctgtgcctgaaactaggggcgatgtcaaggaagctagaggcctcgatgcaattattactgactctggggaggaagacagagaataaggggacaccaactgcccagtccactggccatttttaagggtccccccaccccaagccaaagtttggtttgttgctgttaagacaatttttgttgtatgtatataaatattttagttagaggagcggggaatgggatgcgggctttcacagttctagggaatgggggcagggaggattttgcttttgcttttgctttgagggagaactttagctgactaaaaaaacagaagtttggggtcatgatcacaaaggggccattcccaaaagatggcaagccacgtattcagtggagactaggccaaattctaaatggttttatccatagcaggggagaataggagaatgagtttaagagtttttctcttcttttttcctagaaagaggtaaggataatgggaaaggtagagaaggcggctcccacagaccttttaagagaggcagaatcttgagcttgaggcaccttgagtgcatctcagttcagctggttctggctgaggcctccaaaggcaagctctgtgctttccagtggtttctgctgcatttccagggatggtgtttaacaccgcttcctccagctcccttttctaagaaagaataaatggagttctgctttttatgaaagggtctttggttttcagtgtcaacactgagaattggggctcttgcaagcatctggatttcacagtatcaacctccccgtcaccttttgaactttgagactccgtacggtcaacttcaccagaggcaggttgctcgaagcagcactgcttgtctgttcctgactctggttctcactgtattaaaaaaagagagtcagaggagtctggcatttcgtgagtttgttagaggatgctggctgataattccagaaaacttactgatgctaaatcacagtacatgcatgattctttttcagctttactatagttcatgacctggactttctgtactcttggaagctgggctccttaaaggaggcctctagtgaacacctttatctccatgtccctcttagagcccagagagctgcccataggcattttccagaattcctcatgtcacctagttcaatttccattaactcagatcagccattgtgattcaccatttgtcaggctctcaggtttaacaaaacctactatcaccatcatccttcaacagccacagtctgaattgagccaacatttttttttctttgagaaagaagtggactggggcacaacttttagtctgaggggagctagtggaaatctagacaatagaagtcatcgatagcagcttttcctcaaatgtgtgactcctcaggggctaaactgctcttagcttagaattatgctttactagagatctagcagataagtgggttaatcactaccatcctgtaactagttatatagcttccagacatgagggagacatcaaacagggatggaagcaaccccaaggatatgcaagaagggcatgatgaacccccttccctctggcaggagaacaaggccaaccaagggacagactggaaagcacttagatgtttaaggaggagaaaggggaagctttgaccagtccttgccttttgccaagttcagccagttctccgctgcttgcaacctctagcgcagtaacatttgcagaattgcagattttcccccagatactaggaggaaagggactttggggggtggggaaggggtcgtggtgttttaaaagcataagttacctgtttgcactgttttaagataggaaaaaaaaatagtgggcaaggtgaacatcagacgtaaatttgtgtgtttttattttgtcatgctcttgaaaatgtttgaccatttgtagtatacacagtgaaacttgattctctgttgcataaaacactatatttttttggaaatgttactgtccaaaagcctcttccctccctttccttttcctatgtacttccttcatacttgctttactgatcagccaggcaatagccatccaagagctagagcatgaaacagggccctttccaagtaggctctgggtgtcctaagccagcgtgtgccctctggtttagtgagtgtaatagagtccctggcacctttctttgcaaatgaggctaacagaccagactgcagcaagttatcagattcctcaatcagatgcactaggagtgaggagcccagggatggagggggttcctgaagtattgcagttggctgtagtagctgagttcttttccatgttaccgaaactgtagccagttacagtttactcaggaaaacggtagatcaattcagccatggtagtgctggttggcagggattggtaacggagagaactgctcatcagccaaaactcaagccttgccttttaggaggccaccagcagagggacttggtcctccttgtctggtacttgtgtacatgccggtgacctgaggactccactcacactggcgagcaaaaagggagcagtgattctcttttctctccccaccccctgccctttgttaccaacaccagtttcccagggggtacatgagtttctgaatttttaaaaaatgtttttggtttggtttttctggggactgataagtgctttaagcaatgtccataccccgtcaagactcccagcttagtcattttcttgtatttttctgttcacagtatttgtgtgtgtgcttgttttggcagctcattttggctgtattatatattgagtgatgaattgatcctcttttttccctaagggatatgaattgtttttcttgtgttatattctgcttgtgaatagctggagcaaacctggggctgacacgcgtaagctagggctgcaaagcgagaagagagccggtggagtgtacttgtccctgacaggctgacctacctgagtctctgagcttttcagtccaaatctttgcaaggctcaaaatgccacagaacctctcctcttctccccactccccatggcagggaccggaccatccctacatgcaacatgctgttcctccagcccctcccattgccatggcaaaacaggtacctttggggcatgggggcattacatgggatgcttgtgtaatcgaccacctagccttctctctcccctcccgtcctcccccagaatcacttcctaggacacccgagctgcttgcccagggtcctgtttccctgctaactccagagaagcatcccagggctttgtgacagtctctaattcccttcccttctcgttaagaatcatattgtatagtagctttcagaccatacagtattcattgggttactcctattattatcaagtagctggaattgtgaaggtcggagtagttagatctttagcttttattccttatttttttgtattactctccatgtgtataaattattgatcatgttgctggcttttataaactctaagcgaaggaggagcactgcctcagcctttgcacatggtaatgaagcactgtttttaaataaaagagagaaacaccaaaaaaaaaaaaaagacacacaggggggggctaaattccgagggccgagtaacgtcccggttttgaaaggcctaagggggaaaaaagacggcggaaaccgagggaagcacggttgagagcc

SEQ ID NO: 317772 - DNA, 6746 bp, Homo sapiens
tactattgcattcatgaagaaggagggagatgaaaaattaggcattctaactgggtaaccaggagccgacaacaactcctgacgcaatggttcagccttttactaccatcccatttccaccacctccgcagaatggaattcccacagagtatggggtgccacacactcaagactatgccggccagaccggtgagcataacctgacactctacggaagtacgcaagcccacggggagcagagcagcaactcacccagcacacaaaatggatctcttacgacagaaggtggagcacagacagacggccagcagtcacagacacaaagtagtgaaaattcagagagtaaatctaccccgaaacggctgcatgtctctaatattcctttccgcttccgggaccctgacctccggcagatgtttgggcagtttggcaaaatcctagatgtagaaataatctttaatgaacgtggctctaagggattcgggttcgtaactttcgagaatagtgctgatgcagacagggccagggagaaattacacggcaccgtggtagagggccgtaaaatcgaggtgaataatgctacagcacgtgtaatgaccaataagaagatggtcacaccatatgcaaatggttggaaattaagcccagtagttggagctgtatatggtccggagttatatgcagcatccagctttcaagcagatgtgtccctaggcaatgatgcagcagtgcccctatcaggaagagggggtatcaacacttacattcctttaatcattcctggcttcccttaccctactgcagccaccacggcagccgctttcagaggagcccatttgaggggcagagggcggacagtatatggtgcagtccgagcggtacctccaacagccatccccgcctatccaggtgtggtttaccaggacggattttacggtgctgacctctatggtggatatgcagcctacagatatgcacagcctgctactgcaaccgcagccaccgctgctgcagccgctgcagccgcttacagtgacggttatggcagggtgtacacagccgacccctaccatgcccttgcccctgccgctagctatggagttggcgctgtggcgagtttataccgaggtggctacagccgatttgccccctactgaagtgacgtgagacccctgcaaatgggacagccccccagttcatgaggcctggctattgcaatatttactagtagaggaactctatagcaagatgaagaggaaaaacaaacaaacaaacaaaaaaaaacacaaaaaaagaaagaatacttttttatacctcactatgttctttgaatatgtatttttcctttaaatttctgcctttaattcttttgttccaaagattgtgcatttttttctttttttttttaaactgtggtaaaaaaaaaaaaaataatgcatttccatgtctgtatgtccgtgcttagcttattctatcaatcacggaagaggcagtcaaggaggaaggagagacattaggagccgataaatgcatctgatcagaaatcagcagacagaattaccaaagtgtatctggtgctgaatgactgggggacaagcagaagtggaagagatctttctgcaacaggatattcttctagtcttctgagtttctggtctttgacaggcaattctggttggctgtggctggaatccacatgctgatagataggaatttgtgcttacaaagcaggagaattaaaaagacgctttcctctcctcttccctcctgtcttctccgttctttttacaatcatcttacacgcacagcctgagacagctggcatagtttttggaattatagtattgatatttccaaacgtgctctcagacagtggataataaacacctcattaggaaaccgatctcagaatgaactctggagtatgaaaaagatcatttctttttgttcctgtaacctagcattccttctaggcttcttctcctttaattgaaccacagcttagctcatgtattcttttattaacaccctgctctcatgtccataagattcaggaatttaggacccagggacagaaaagtgaataagccagtgaccagatttcccccagatgtcttgaggattagaagtacaaattgttgacagccattaaagagggtgaggaagggaaaaggaatattagaagatctggtatttcttacttttttcttgcctcagaaagtacaaagtttaaaaaatagaataaagaatctgctggggaaagatagagtaccaggtcctaggtcagtagtccctggaagttttggtgatgaggacatggaagggcaggcagaggcactttgtacttgctccaaagccataggaattttcatcttccagagcctttatgagtcacttctctatccacagtcttgagcctgtggctatcccgctgagcttctcactgtcctccaaaaacaccccgctgagcacccggaccactttgtacacattaacactacaggacataaaatgcagaggccctgagattgctgccctcccatattggaaggagggtctgcgatggcaagggtcttctatatcaccagaaagagtcgcgcagtgagtcactgccgttgccatctggctgtaattttctatgttatcaaggtaggagggagtgtttctcttctagctgttagatagaactgataaaagcaagtgtcctacagcatttcccaaatgaaggcattaggaaatagaaaagcacggtctttttggctccctggtctagtcacattggtactagggtgacctttcacccaagggacagctgctaaagggagtaattcagagacatggagcttctggttatgggtttgttttgggtttgtttttaactcctgcctccacacatgttcttgactgataactgactcatgtccctgaattaaaatgactgacctatgacagcatcagcattctttgtaagcagagtgatatatctgagagggcgttgacctgttgtgtagaatacatatcctttcccccttcagaatcctgtctcgcctcgtaactgggagagaggctgtgcctgaaactaggggcgatgtcaaggaagctagaggcctcgatgcaattattactgactctggggaggaagacagagaataaggggacaccaactgcccagtccactggccatttttaagggtccccccaccccaagccaaagtttggtttgttgctgttaagacaatttttgttgtatgtatataaatattttagttagaggagcggggaatgggatgcgggctttcacagttctagggaatgggggcagggaggattttgcttttgcttttgctttgagggagaactttagctgactaaaaaaacagaagtttggggtcatgatcacaaaggggccattcccaaaagatggcaagccacgtattcagtggagactaggccaaattctaaatggttttatccatagcaggggagaataggagaatgagtttaagagtttttctcttcttttttcctagaaagaggtaaggataatgggaaaggtagagaaggcggctcccacagaccttttaagagaggcagaatcttgagcttgaggcaccttgagtgcatctcagttcagctggttctggctgaggcctccaaaggcaagctctgtgctttccagtggtttctgctgcatttccagggatggtgtttaacaccgcttcctccagctcccttttctaagaaagaataaatggagttctgctttttatgaaagggtctttggttttcagtgtcaacactgagaattggggctcttgcaagcatctggatttcacagtatcaacctccccgtcaccttttgaactttgagactccgtacggtcaacttcaccagaggcaggttgctcgaagcagcactgcttgtctgttcctgactctggttctcactgtattaaaaaaagagagtcagaggagtctggcatttcgtgagtttgttagaggatgctggctgataattccagaaaacttactgatgctaaatcacagtacatgcatgattctttttcagctttactatagttcatgacctggactttctgtactcttggaagctgggctccttaaaggaggcctctagtgaacacctttatctccatgtccctcttagagcccagagagctgcccataggcattttccagaattcctcatgtcacctagttcaatttccattaactcagatcagccattgtgattcaccatttgtcaggctctcaggtttaacaaaacctactatcaccatcatccttcaacagccacagtctgaattgagccaacatttttttttctttgagaaagaagtggactggggcacaacttttagtctgaggggagctagtggaaatctagacaatagaagtcatcgatagcagcttttcctcaaatgtgtgactcctcaggggctaaactgctcttagcttagaattatgctttactagagatctagcagataagtgggttaatcactaccatcctgtaactagttatatagcttccagacatgagggagacatcaaacagggatggaagcaaccccaaggatatgcaagaagggcatgatgaacccccttccctctggcaggagaacaaggccaaccaagggacagactggaaagcacttagatgtttaaggaggagaaaggggaagctttgaccagtccttgccttttgccaagttcagccagttctccgctgcttgcaacctctagcgcagtaacatttgcagaattgcagattttcccccagatactaggaggaaagggactttggggggtggggaaggggtcgtggtgttttaaaagcataagttacctgtttgcactgttttaagataggaaaaaaaaatagtgggcaaggtgaacatcagacgtaaatttgtgtgtttttattttgtcatgctcttgaaaatgtttgaccatttgtagtatacacagtgaaacttgattctctgttgcataaaacactatatttttttggaaatgttactgtccaaaagcctcttccctccctttccttttcctatgtacttccttcatacttgctttactgatcagccaggcaatagccatccaagagctagagcatgaaacagggccctttccaagtaggctctgggtgtcctaagccagcgtgtgccctctggtttagtgagtgtaatagagtccctggcacctttctttgcaaatgaggctaacagaccagactgcagcaagttatcagattcctcaatcagatgcactaggagtgaggagcccagggatggagggggttcctgaagtattgcagttggctgtagtagctgagttcttttccatgttaccgaaactgtagccagttacagtttactcaggaaaacggtagatcaattcagccatggtagtgctggttggcagggattggtaacggagagaactgctcatcagccaaaactcaagccttgccttttaggaggccaccagcagagggacttggtcctccttgtctggtacttgtgtacatgccggtgacctgaggactccactcacactggcgagcaaaaagggagcagtgattctcttttctctccccaccccctgccctttgttaccaacaccagtttcccagggggtacatgagtttctgaatttttaaaaaatgtttttggtttggtttttctggggactgataagtgctttaagcaatgtccataccccgtcaagactcccagcttagtcattttcttgtatttttctgttcacagtatttgtgtgtgtgcttgttttggcagctcattttggctgtattatatattgagtgatgaattgatcctcttttttccctaagggatatgaattgtttttcttgtgttatattctgcttgtgaatagctggagcaaacctggggctgacacgcgtaagctagggctgcaaagcgagaagagagccggtggagtgtacttgtccctgacaggctgacctacctgagtctctgagcttttcagtccaaatctttgcaaggctcaaaatgccacagaacctctcctcttctccccactccccatggcagggaccggaccatccctacatgcaacatgctgttcctccagcccctcccattgccatggcaaaacaggtacctttggggcatgggggcattacatgggatgcttgtgtaatcgaccacctagccttctctctcccctcccgtcctcccccagaatcacttcctaggacacccgagctgcttgcccagggtcctgtttccctgctaactccagagaagcatcccagggctttgtgacagtctctaattcccttcccttctcgttaagaatcatattgtatagtagctttcagaccatacagtattcattgggttactcctattattatcaagtagctggaattgtgaaggtcggagtagttagatctttagcttttattccttatttttttgtattactctccatgtgtataaattattgatcatgttgctggcttttataaactctaagcgaaggaggagcactgcctcagcctttgcacatggtaatgaagcactgtttttaaataaaagagagaaacaccaaaaaaaaaaaaaagacacacaggggggggctaaattccgagggccgagtaacgtcccggttttgaaaggcctaagggggaaaaaagacggcggaaaccgagggaagcacggttgagagcc

SEQ ID NO: 317773 - DNA, 6860 bp, Homo sapiens
taggatttttaaactcaagtgattttggggggtttctccccacctcaaactcttgccccccagttttggcatcttctttcctgtggttcactgaagtgcctttttgcagtccaggatccactgaccgctgagtttgagcagcccgatctgacatgatgtacctctggggtaaccaggagccgacaacaactcctgacgcaatggttcagccttttactaccatcccatttccaccacctccgcagaatggaattcccacagagtatggggtgccacacactcaagactatgccggccagaccggtgagcataacctgacactctacggaagtacgcaagcccacggggagcagagcagcaactcacccagcacacaaaatggatctcttacgacagaaggtggagcacagacagacggccagcagtcacagacacaaagtagtgaaaattcagagagtaaatctaccccgaaacggctgcatgtctctaatattcctttccgcttccgggaccctgacctccggcagatgtttgggcagtttggcaaaatcctagatgtagaaataatctttaatgaacgtggctctaagggattcgggttcgtaactttcgagaatagtgctgatgcagacagggccagggagaaattacacggcaccgtggtagagggccgtaaaatcgaggtgaataatgctacagcacgtgtaatgaccaataagaagatggtcacaccatatgcaaatggttggaaattaagcccagtagttggagctgtatatggtccggagttatatgcagcatccagctttcaagcagatgtgtccctaggcaatgatgcagcagtgcccctatcaggaagagggggtatcaacacttacattcctttaatcattcctggcttcccttaccctactgcagccaccacggcagccgctttcagaggagcccatttgaggggcagagggcggacagtatatggtgcagtccgagcggtacctccaacagccatccccgcctatccaggtgtggtttaccaggacggattttacggtgctgacctctatggtggatatgcagcctacagatatgcacagcctgctactgcaaccgcagccaccgctgctgcagccgctgcagccgcttacagtgacggttatggcagggtgtacacagccgacccctaccatgcccttgcccctgccgctagctatggagttggcgctgtggcgagtttataccgaggtggctacagccgatttgccccctactgaagtgacgtgagacccctgcaaatgggacagccccccagttcatgaggcctggctattgcaatatttactagtagaggaactctatagcaagatgaagaggaaaaacaaacaaacaaacaaaaaaaaacacaaaaaaagaaagaatacttttttatacctcactatgttctttgaatatgtatttttcctttaaatttctgcctttaattcttttgttccaaagattgtgcatttttttctttttttttttaaactgtggtaaaaaaaaaaaaaataatgcatttccatgtctgtatgtccgtgcttagcttattctatcaatcacggaagaggcagtcaaggaggaaggagagacattaggagccgataaatgcatctgatcagaaatcagcagacagaattaccaaagtgtatctggtgctgaatgactgggggacaagcagaagtggaagagatctttctgcaacaggatattcttctagtcttctgagtttctggtctttgacaggcaattctggttggctgtggctggaatccacatgctgatagataggaatttgtgcttacaaagcaggagaattaaaaagacgctttcctctcctcttccctcctgtcttctccgttctttttacaatcatcttacacgcacagcctgagacagctggcatagtttttggaattatagtattgatatttccaaacgtgctctcagacagtggataataaacacctcattaggaaaccgatctcagaatgaactctggagtatgaaaaagatcatttctttttgttcctgtaacctagcattccttctaggcttcttctcctttaattgaaccacagcttagctcatgtattcttttattaacaccctgctctcatgtccataagattcaggaatttaggacccagggacagaaaagtgaataagccagtgaccagatttcccccagatgtcttgaggattagaagtacaaattgttgacagccattaaagagggtgaggaagggaaaaggaatattagaagatctggtatttcttacttttttcttgcctcagaaagtacaaagtttaaaaaatagaataaagaatctgctggggaaagatagagtaccaggtcctaggtcagtagtccctggaagttttggtgatgaggacatggaagggcaggcagaggcactttgtacttgctccaaagccataggaattttcatcttccagagcctttatgagtcacttctctatccacagtcttgagcctgtggctatcccgctgagcttctcactgtcctccaaaaacaccccgctgagcacccggaccactttgtacacattaacactacaggacataaaatgcagaggccctgagattgctgccctcccatattggaaggagggtctgcgatggcaagggtcttctatatcaccagaaagagtcgcgcagtgagtcactgccgttgccatctggctgtaattttctatgttatcaaggtaggagggagtgtttctcttctagctgttagatagaactgataaaagcaagtgtcctacagcatttcccaaatgaaggcattaggaaatagaaaagcacggtctttttggctccctggtctagtcacattggtactagggtgacctttcacccaagggacagctgctaaagggagtaattcagagacatggagcttctggttatgggtttgttttgggtttgtttttaactcctgcctccacacatgttcttgactgataactgactcatgtccctgaattaaaatgactgacctatgacagcatcagcattctttgtaagcagagtgatatatctgagagggcgttgacctgttgtgtagaatacatatcctttcccccttcagaatcctgtctcgcctcgtaactgggagagaggctgtgcctgaaactaggggcgatgtcaaggaagctagaggcctcgatgcaattattactgactctggggaggaagacagagaataaggggacaccaactgcccagtccactggccatttttaagggtccccccaccccaagccaaagtttggtttgttgctgttaagacaatttttgttgtatgtatataaatattttagttagaggagcggggaatgggatgcgggctttcacagttctagggaatgggggcagggaggattttgcttttgcttttgctttgagggagaactttagctgactaaaaaaacagaagtttggggtcatgatcacaaaggggccattcccaaaagatggcaagccacgtattcagtggagactaggccaaattctaaatggttttatccatagcaggggagaataggagaatgagtttaagagtttttctcttcttttttcctagaaagaggtaaggataatgggaaaggtagagaaggcggctcccacagaccttttaagagaggcagaatcttgagcttgaggcaccttgagtgcatctcagttcagctggttctggctgaggcctccaaaggcaagctctgtgctttccagtggtttctgctgcatttccagggatggtgtttaacaccgcttcctccagctcccttttctaagaaagaataaatggagttctgctttttatgaaagggtctttggttttcagtgtcaacactgagaattggggctcttgcaagcatctggatttcacagtatcaacctccccgtcaccttttgaactttgagactccgtacggtcaacttcaccagaggcaggttgctcgaagcagcactgcttgtctgttcctgactctggttctcactgtattaaaaaaagagagtcagaggagtctggcatttcgtgagtttgttagaggatgctggctgataattccagaaaacttactgatgctaaatcacagtacatgcatgattctttttcagctttactatagttcatgacctggactttctgtactcttggaagctgggctccttaaaggaggcctctagtgaacacctttatctccatgtccctcttagagcccagagagctgcccataggcattttccagaattcctcatgtcacctagttcaatttccattaactcagatcagccattgtgattcaccatttgtcaggctctcaggtttaacaaaacctactatcaccatcatccttcaacagccacagtctgaattgagccaacatttttttttctttgagaaagaagtggactggggcacaacttttagtctgaggggagctagtggaaatctagacaatagaagtcatcgatagcagcttttcctcaaatgtgtgactcctcaggggctaaactgctcttagcttagaattatgctttactagagatctagcagataagtgggttaatcactaccatcctgtaactagttatatagcttccagacatgagggagacatcaaacagggatggaagcaaccccaaggatatgcaagaagggcatgatgaacccccttccctctggcaggagaacaaggccaaccaagggacagactggaaagcacttagatgtttaaggaggagaaaggggaagctttgaccagtccttgccttttgccaagttcagccagttctccgctgcttgcaacctctagcgcagtaacatttgcagaattgcagattttcccccagatactaggaggaaagggactttggggggtggggaaggggtcgtggtgttttaaaagcataagttacctgtttgcactgttttaagataggaaaaaaaaatagtgggcaaggtgaacatcagacgtaaatttgtgtgtttttattttgtcatgctcttgaaaatgtttgaccatttgtagtatacacagtgaaacttgattctctgttgcataaaacactatatttttttggaaatgttactgtccaaaagcctcttccctccctttccttttcctatgtacttccttcatacttgctttactgatcagccaggcaatagccatccaagagctagagcatgaaacagggccctttccaagtaggctctgggtgtcctaagccagcgtgtgccctctggtttagtgagtgtaatagagtccctggcacctttctttgcaaatgaggctaacagaccagactgcagcaagttatcagattcctcaatcagatgcactaggagtgaggagcccagggatggagggggttcctgaagtattgcagttggctgtagtagctgagttcttttccatgttaccgaaactgtagccagttacagtttactcaggaaaacggtagatcaattcagccatggtagtgctggttggcagggattggtaacggagagaactgctcatcagccaaaactcaagccttgccttttaggaggccaccagcagagggacttggtcctccttgtctggtacttgtgtacatgccggtgacctgaggactccactcacactggcgagcaaaaagggagcagtgattctcttttctctccccaccccctgccctttgttaccaacaccagtttcccagggggtacatgagtttctgaatttttaaaaaatgtttttggtttggtttttctggggactgataagtgctttaagcaatgtccataccccgtcaagactcccagcttagtcattttcttgtatttttctgttcacagtatttgtgtgtgtgcttgttttggcagctcattttggctgtattatatattgagtgatgaattgatcctcttttttccctaagggatatgaattgtttttcttgtgttatattctgcttgtgaatagctggagcaaacctggggctgacacgcgtaagctagggctgcaaagcgagaagagagccggtggagtgtacttgtccctgacaggctgacctacctgagtctctgagcttttcagtccaaatctttgcaaggctcaaaatgccacagaacctctcctcttctccccactccccatggcagggaccggaccatccctacatgcaacatgctgttcctccagcccctcccattgccatggcaaaacaggtacctttggggcatgggggcattacatgggatgcttgtgtaatcgaccacctagccttctctctcccctcccgtcctcccccagaatcacttcctaggacacccgagctgcttgcccagggtcctgtttccctgctaactccagagaagcatcccagggctttgtgacagtctctaattcccttcccttctcgttaagaatcatattgtatagtagctttcagaccatacagtattcattgggttactcctattattatcaagtagctggaattgtgaaggtcggagtagttagatctttagcttttattccttatttttttgtattactctccatgtgtataaattattgatcatgttgctggcttttataaactctaagcgaaggaggagcactgcctcagcctttgcacatggtaatgaagcactgtttttaaataaaagagagaaacaccaaaaaaaaaaaaaagacacacaggggggggctaaattccgagggccgagtaacgtcccggttttgaaaggcctaagggggaaaaaagacggcggaaaccgagggaagcacggttgagagcc

SEQ ID NO: 317774 - DNA, 6920 bp, Homo sapiens
cgcgacagtcggggccgaggcccagggggaggtggcctgtcgcgggtcgcccggctcccggaggcgaggggggcgcgggcggatggcggagggcgcccagccgcagcagccgcctcagctcgggcccggcgccgccgcccggggcatgaagcgggagtcggagctggagctgccggtgcccggagcgggaggagacggagccgatcccggcctgagcaagcggccgcgcactgaggaggcggcggccgacggtggcggcgggatgcagaacgagcctctgactccaggttatcatggattcccagcgcgggacagccagggtaaccaggagccgacaacaactcctgacgcaatggttcagccttttactaccatcccatttccaccacctccgcagaatggaattcccacagagtatggggtgccacacactcaagactatgccggccagaccggtgagcataacctgacactctacggaagtacgcaagcccacggggagcagagcagcaactcacccagcacacaaaatggatctcttacgacagaaggtggagcacagacagacggccagcagtcacagacacaaagtagtgaaaattcagagagtaaatctaccccgaaacggctgcatgtctctaatattcctttccgcttccgggaccctgacctccggcagatgtttgggcagtttggcaaaatcctagatgtagaaataatctttaatgaacgtggctctaagggattcgggttcgtaactttcgagaatagtgctgatgcagacagggccagggagaaattacacggcaccgtggtagagggccgtaaaatcgaggtgaataatgctacagcacgtgtaatgaccaataagaagatggtcacaccatatgcaaatggttggaaattaagcccagtagttggagctgtatatggtccggagttatatgcagcatccagctttcaagcagatgtgtccctaggcaatgatgcagcagtgcccctatcaggaagagggggtatcaacacttacattcctttaatcattcctggcttcccttaccctactgcagccaccacggcagccgctttcagaggagcccatttgaggggcagagggcggacagtatatggtgcagtccgagcggtacctccaacagccatccccgcctatccaggtgtggtttaccaggacggattttacggtgctgacctctatggtggatatgcagcctacagatatgcacagcctgctactgcaaccgcagccaccgctgctgcagccgctgcagccgcttacagtgacggttatggcagggtgtacacagccgacccctaccatgcccttgcccctgccgctagctatggagttggcgctgtggcgagtttataccgaggtggctacagccgatttgccccctactgaagtgacgtgagacccctgcaaatgggacagccccccagttcatgaggcctggctattgcaatatttactagtagaggaactctatagcaagatgaagaggaaaaacaaacaaacaaacaaaaaaaaacacaaaaaaagaaagaatacttttttatacctcactatgttctttgaatatgtatttttcctttaaatttctgcctttaattcttttgttccaaagattgtgcatttttttctttttttttttaaactgtggtaaaaaaaaaaaaaataatgcatttccatgtctgtatgtccgtgcttagcttattctatcaatcacggaagaggcagtcaaggaggaaggagagacattaggagccgataaatgcatctgatcagaaatcagcagacagaattaccaaagtgtatctggtgctgaatgactgggggacaagcagaagtggaagagatctttctgcaacaggatattcttctagtcttctgagtttctggtctttgacaggcaattctggttggctgtggctggaatccacatgctgatagataggaatttgtgcttacaaagcaggagaattaaaaagacgctttcctctcctcttccctcctgtcttctccgttctttttacaatcatcttacacgcacagcctgagacagctggcatagtttttggaattatagtattgatatttccaaacgtgctctcagacagtggataataaacacctcattaggaaaccgatctcagaatgaactctggagtatgaaaaagatcatttctttttgttcctgtaacctagcattccttctaggcttcttctcctttaattgaaccacagcttagctcatgtattcttttattaacaccctgctctcatgtccataagattcaggaatttaggacccagggacagaaaagtgaataagccagtgaccagatttcccccagatgtcttgaggattagaagtacaaattgttgacagccattaaagagggtgaggaagggaaaaggaatattagaagatctggtatttcttacttttttcttgcctcagaaagtacaaagtttaaaaaatagaataaagaatctgctggggaaagatagagtaccaggtcctaggtcagtagtccctggaagttttggtgatgaggacatggaagggcaggcagaggcactttgtacttgctccaaagccataggaattttcatcttccagagcctttatgagtcacttctctatccacagtcttgagcctgtggctatcccgctgagcttctcactgtcctccaaaaacaccccgctgagcacccggaccactttgtacacattaacactacaggacataaaatgcagaggccctgagattgctgccctcccatattggaaggagggtctgcgatggcaagggtcttctatatcaccagaaagagtcgcgcagtgagtcactgccgttgccatctggctgtaattttctatgttatcaaggtaggagggagtgtttctcttctagctgttagatagaactgataaaagcaagtgtcctacagcatttcccaaatgaaggcattaggaaatagaaaagcacggtctttttggctccctggtctagtcacattggtactagggtgacctttcacccaagggacagctgctaaagggagtaattcagagacatggagcttctggttatgggtttgttttgggtttgtttttaactcctgcctccacacatgttcttgactgataactgactcatgtccctgaattaaaatgactgacctatgacagcatcagcattctttgtaagcagagtgatatatctgagagggcgttgacctgttgtgtagaatacatatcctttcccccttcagaatcctgtctcgcctcgtaactgggagagaggctgtgcctgaaactaggggcgatgtcaaggaagctagaggcctcgatgcaattattactgactctggggaggaagacagagaataaggggacaccaactgcccagtccactggccatttttaagggtccccccaccccaagccaaagtttggtttgttgctgttaagacaatttttgttgtatgtatataaatattttagttagaggagcggggaatgggatgcgggctttcacagttctagggaatgggggcagggaggattttgcttttgcttttgctttgagggagaactttagctgactaaaaaaacagaagtttggggtcatgatcacaaaggggccattcccaaaagatggcaagccacgtattcagtggagactaggccaaattctaaatggttttatccatagcaggggagaataggagaatgagtttaagagtttttctcttcttttttcctagaaagaggtaaggataatgggaaaggtagagaaggcggctcccacagaccttttaagagaggcagaatcttgagcttgaggcaccttgagtgcatctcagttcagctggttctggctgaggcctccaaaggcaagctctgtgctttccagtggtttctgctgcatttccagggatggtgtttaacaccgcttcctccagctcccttttctaagaaagaataaatggagttctgctttttatgaaagggtctttggttttcagtgtcaacactgagaattggggctcttgcaagcatctggatttcacagtatcaacctccccgtcaccttttgaactttgagactccgtacggtcaacttcaccagaggcaggttgctcgaagcagcactgcttgtctgttcctgactctggttctcactgtattaaaaaaagagagtcagaggagtctggcatttcgtgagtttgttagaggatgctggctgataattccagaaaacttactgatgctaaatcacagtacatgcatgattctttttcagctttactatagttcatgacctggactttctgtactcttggaagctgggctccttaaaggaggcctctagtgaacacctttatctccatgtccctcttagagcccagagagctgcccataggcattttccagaattcctcatgtcacctagttcaatttccattaactcagatcagccattgtgattcaccatttgtcaggctctcaggtttaacaaaacctactatcaccatcatccttcaacagccacagtctgaattgagccaacatttttttttctttgagaaagaagtggactggggcacaacttttagtctgaggggagctagtggaaatctagacaatagaagtcatcgatagcagcttttcctcaaatgtgtgactcctcaggggctaaactgctcttagcttagaattatgctttactagagatctagcagataagtgggttaatcactaccatcctgtaactagttatatagcttccagacatgagggagacatcaaacagggatggaagcaaccccaaggatatgcaagaagggcatgatgaacccccttccctctggcaggagaacaaggccaaccaagggacagactggaaagcacttagatgtttaaggaggagaaaggggaagctttgaccagtccttgccttttgccaagttcagccagttctccgctgcttgcaacctctagcgcagtaacatttgcagaattgcagattttcccccagatactaggaggaaagggactttggggggtggggaaggggtcgtggtgttttaaaagcataagttacctgtttgcactgttttaagataggaaaaaaaaatagtgggcaaggtgaacatcagacgtaaatttgtgtgtttttattttgtcatgctcttgaaaatgtttgaccatttgtagtatacacagtgaaacttgattctctgttgcataaaacactatatttttttggaaatgttactgtccaaaagcctcttccctccctttccttttcctatgtacttccttcatacttgctttactgatcagccaggcaatagccatccaagagctagagcatgaaacagggccctttccaagtaggctctgggtgtcctaagccagcgtgtgccctctggtttagtgagtgtaatagagtccctggcacctttctttgcaaatgaggctaacagaccagactgcagcaagttatcagattcctcaatcagatgcactaggagtgaggagcccagggatggagggggttcctgaagtattgcagttggctgtagtagctgagttcttttccatgttaccgaaactgtagccagttacagtttactcaggaaaacggtagatcaattcagccatggtagtgctggttggcagggattggtaacggagagaactgctcatcagccaaaactcaagccttgccttttaggaggccaccagcagagggacttggtcctccttgtctggtacttgtgtacatgccggtgacctgaggactccactcacactggcgagcaaaaagggagcagtgattctcttttctctccccaccccctgccctttgttaccaacaccagtttcccagggggtacatgagtttctgaatttttaaaaaatgtttttggtttggtttttctggggactgataagtgctttaagcaatgtccataccccgtcaagactcccagcttagtcattttcttgtatttttctgttcacagtatttgtgtgtgtgcttgttttggcagctcattttggctgtattatatattgagtgatgaattgatcctcttttttccctaagggatatgaattgtttttcttgtgttatattctgcttgtgaatagctggagcaaacctggggctgacacgcgtaagctagggctgcaaagcgagaagagagccggtggagtgtacttgtccctgacaggctgacctacctgagtctctgagcttttcagtccaaatctttgcaaggctcaaaatgccacagaacctctcctcttctccccactccccatggcagggaccggaccatccctacatgcaacatgctgttctctctcccctcccgtcctcccccagaatcacttcctaggacacccgagctgcttgcccagggtcctgtttccctgctaactccagagaagcatcccagggctttgtgacagtctctaattcccttcccttctcgttaagaatcatattgtatagtagctttcagaccatacagtattcattgggttactcctattattatcaagtagctggaattgtgaaggtcggagtagttagatctttagcttttattccttatttttttgtattactctccatgtgtataaattattgatcatgttgctggcttttataaactctaagcgaaggaggagcactgcctcagcctttgcacatggtaatgaagcactgtttttaaataaaagagagaaacaccaaaaaaaaaaaaaagacacacaggggggggctaaattccgagggccgagtaacgtcccggttttgaaaggcctaagggggaaaaaagacggcggaaaccgagggaagcacggttgagagcc

SEQ ID NO: 317775 - DNA, 6469 bp, Homo sapiens
ggaagagagcttcagagaaacgtggaacaccattaactgctccaacatacacttagtatctgccagagaggaagagaaaagaaaggaagaaacattagaaagaaaaaggaaggaaaacggtataaagagagatcaattacccacccttaaatagctagattggggggggaggggggtggaaaagaaagctgtggaggtgtgccccagcacggctgctttgaaaggtttatcatctatccgtttggtttatggagaaaaagaaaatggtaactcagggtaaccaggagccgacaacaactcctgacgcaatggttcagccttttactaccatcccatttccaccacctccgcagaatggaattcccacagagtatggggtgccacacactcaagactatgccggccagaccggtgagcataacctgacactctacggaagtacgcaagcccacggggagcagagcagcaactcacccagcacacaaaatggatctcttacgttcctggcttcccttaccctactgcagccaccacggcagccgctttcagaggagcccatttgaggggcagagggcggacagtatatggtgcagtccgagcggtacctccaacagccatccccgcctatccaggtgtggtttaccaggacggattttacggtgctgacctctatggtggatatgcagcctacagatatgcacagcctgctactgcaaccgcagccaccgctgctgcagccgctgcagccgcttacagtgacggttatggcagggtgtacacagccgacccctaccatgcccttgcccctgccgctagctatggagttggcgctgtggcgagtttataccgaggtggctacagccgatttgccccctactgaagtgacgtgagacccctgcaaatgggacagccccccagttcatgaggcctggctattgcaatatttactagtagaggaactctatagcaagatgaagaggaaaaacaaacaaacaaacaaaaaaaaacacaaaaaaagaaagaatacttttttatacctcactatgttctttgaatatgtatttttcctttaaatttctgcctttaattcttttgttccaaagattgtgcatttttttctttttttttttaaactgtggtaaaaaaaaaaaaaataatgcatttccatgtctgtatgtccgtgcttagcttattctatcaatcacggaagaggcagtcaaggaggaaggagagacattaggagccgataaatgcatctgatcagaaatcagcagacagaattaccaaagtgtatctggtgctgaatgactgggggacaagcagaagtggaagagatctttctgcaacaggatattcttctagtcttctgagtttctggtctttgacaggcaattctggttggctgtggctggaatccacatgctgatagataggaatttgtgcttacaaagcaggagaattaaaaagacgctttcctctcctcttccctcctgtcttctccgttctttttacaatcatcttacacgcacagcctgagacagctggcatagtttttggaattatagtattgatatttccaaacgtgctctcagacagtggataataaacacctcattaggaaaccgatctcagaatgaactctggagtatgaaaaagatcatttctttttgttcctgtaacctagcattccttctaggcttcttctcctttaattgaaccacagcttagctcatgtattcttttattaacaccctgctctcatgtccataagattcaggaatttaggacccagggacagaaaagtgaataagccagtgaccagatttcccccagatgtcttgaggattagaagtacaaattgttgacagccattaaagagggtgaggaagggaaaaggaatattagaagatctggtatttcttacttttttcttgcctcagaaagtacaaagtttaaaaaatagaataaagaatctgctggggaaagatagagtaccaggtcctaggtcagtagtccctggaagttttggtgatgaggacatggaagggcaggcagaggcactttgtacttgctccaaagccataggaattttcatcttccagagcctttatgagtcacttctctatccacagtcttgagcctgtggctatcccgctgagcttctcactgtcctccaaaaacaccccgctgagcacccggaccactttgtacacattaacactacaggacataaaatgcagaggccctgagattgctgccctcccatattggaaggagggtctgcgatggcaagggtcttctatatcaccagaaagagtcgcgcagtgagtcactgccgttgccatctggctgtaattttctatgttatcaaggtaggagggagtgtttctcttctagctgttagatagaactgataaaagcaagtgtcctacagcatttcccaaatgaaggcattaggaaatagaaaagcacggtctttttggctccctggtctagtcacattggtactagggtgacctttcacccaagggacagctgctaaagggagtaattcagagacatggagcttctggttatgggtttgttttgggtttgtttttaactcctgcctccacacatgttcttgactgataactgactcatgtccctgaattaaaatgactgacctatgacagcatcagcattctttgtaagcagagtgatatatctgagagggcgttgacctgttgtgtagaatacatatcctttcccccttcagaatcctgtctcgcctcgtaactgggagagaggctgtgcctgaaactaggggcgatgtcaaggaagctagaggcctcgatgcaattattactgactctggggaggaagacagagaataaggggacaccaactgcccagtccactggccatttttaagggtccccccaccccaagccaaagtttggtttgttgctgttaagacaatttttgttgtatgtatataaatattttagttagaggagcggggaatgggatgcgggctttcacagttctagggaatgggggcagggaggattttgcttttgcttttgctttgagggagaactttagctgactaaaaaaacagaagtttggggtcatgatcacaaaggggccattcccaaaagatggcaagccacgtattcagtggagactaggccaaattctaaatggttttatccatagcaggggagaataggagaatgagtttaagagtttttctcttcttttttcctagaaagaggtaaggataatgggaaaggtagagaaggcggctcccacagaccttttaagagaggcagaatcttgagcttgaggcaccttgagtgcatctcagttcagctggttctggctgaggcctccaaaggcaagctctgtgctttccagtggtttctgctgcatttccagggatggtgtttaacaccgcttcctccagctcccttttctaagaaagaataaatggagttctgctttttatgaaagggtctttggttttcagtgtcaacactgagaattggggctcttgcaagcatctggatttcacagtatcaacctccccgtcaccttttgaactttgagactccgtacggtcaacttcaccagaggcaggttgctcgaagcagcactgcttgtctgttcctgactctggttctcactgtattaaaaaaagagagtcagaggagtctggcatttcgtgagtttgttagaggatgctggctgataattccagaaaacttactgatgctaaatcacagtacatgcatgattctttttcagctttactatagttcatgacctggactttctgtactcttggaagctgggctccttaaaggaggcctctagtgaacacctttatctccatgtccctcttagagcccagagagctgcccataggcattttccagaattcctcatgtcacctagttcaatttccattaactcagatcagccattgtgattcaccatttgtcaggctctcaggtttaacaaaacctactatcaccatcatccttcaacagccacagtctgaattgagccaacatttttttttctttgagaaagaagtggactggggcacaacttttagtctgaggggagctagtggaaatctagacaatagaagtcatcgatagcagcttttcctcaaatgtgtgactcctcaggggctaaactgctcttagcttagaattatgctttactagagatctagcagataagtgggttaatcactaccatcctgtaactagttatatagcttccagacatgagggagacatcaaacagggatggaagcaaccccaaggatatgcaagaagggcatgatgaacccccttccctctggcaggagaacaaggccaaccaagggacagactggaaagcacttagatgtttaaggaggagaaaggggaagctttgaccagtccttgccttttgccaagttcagccagttctccgctgcttgcaacctctagcgcagtaacatttgcagaattgcagattttcccccagatactaggaggaaagggactttggggggtggggaaggggtcgtggtgttttaaaagcataagttacctgtttgcactgttttaagataggaaaaaaaaatagtgggcaaggtgaacatcagacgtaaatttgtgtgtttttattttgtcatgctcttgaaaatgtttgaccatttgtagtatacacagtgaaacttgattctctgttgcataaaacactatatttttttggaaatgttactgtccaaaagcctcttccctccctttccttttcctatgtacttccttcatacttgctttactgatcagccaggcaatagccatccaagagctagagcatgaaacagggccctttccaagtaggctctgggtgtcctaagccagcgtgtgccctctggtttagtgagtgtaatagagtccctggcacctttctttgcaaatgaggctaacagaccagactgcagcaagttatcagattcctcaatcagatgcactaggagtgaggagcccagggatggagggggttcctgaagtattgcagttggctgtagtagctgagttcttttccatgttaccgaaactgtagccagttacagtttactcaggaaaacggtagatcaattcagccatggtagtgctggttggcagggattggtaacggagagaactgctcatcagccaaaactcaagccttgccttttaggaggccaccagcagagggacttggtcctccttgtctggtacttgtgtacatgccggtgacctgaggactccactcacactggcgagcaaaaagggagcagtgattctcttttctctccccaccccctgccctttgttaccaacaccagtttcccagggggtacatgagtttctgaatttttaaaaaatgtttttggtttggtttttctggggactgataagtgctttaagcaatgtccataccccgtcaagactcccagcttagtcattttcttgtatttttctgttcacagtatttgtgtgtgtgcttgttttggcagctcattttggctgtattatatattgagtgatgaattgatcctcttttttccctaagggatatgaattgtttttcttgtgttatattctgcttgtgaatagctggagcaaacctggggctgacacgcgtaagctagggctgcaaagcgagaagagagccggtggagtgtacttgtccctgacaggctgacctacctgagtctctgagcttttcagtccaaatctttgcaaggctcaaaatgccacagaacctctcctcttctccccactccccatggcagggaccggaccatccctacatgcaacatgctgttcctccagcccctcccattgccatggcaaaacaggtacctttggggcatgggggcattacatgggatgcttgtgtaatcgaccacctagccttctctctcccctcccgtcctcccccagaatcacttcctaggacacccgagctgcttgcccagggtcctgtttccctgctaactccagagaagcatcccagggctttgtgacagtctctaattcccttcccttctcgttaagaatcatattgtatagtagctttcagaccatacagtattcattgggttactcctattattatcaagtagctggaattgtgaaggtcggagtagttagatctttagcttttattccttatttttttgtattactctccatgtgtataaattattgatcatgttgctggcttttataaactctaagcgaaggaggagcactgcctcagcctttgcacatggtaatgaagcactgtttttaaataaaagagagaaacaccaaaaaaaaaaaaaagacacacaggggggggctaaattccgagggccgagtaacgtcccggttttgaaaggcctaagggggaaaaaagacggcggaaaccgagggaagcacggttgagagcc

SEQ ID NO: 317776 - DNA, 6297 bp, Homo sapiens
tcactgctctcagaaatttacattttaaactaaatactctgttattggatgtgcaactttatgttccctaatgtggtccacttcttccctgcccttttttctccttgttatttttaggtgaataatgctacagcacgtgtaatgaccaataagaagatggtcacaccatatgcaaatggttggaaattaagcccagtagttggagctgtatatggtccggagttatatgcagcatccagctttcaagcagatgtgtccctaggcaatgatgcagcagtgcccctatcaggaagagggggtatcaacacttacattcctttaatcattcctggcttcccttaccctactgcagccaccacggcagccgctttcagaggagcccatttgaggggcagagggcggacagtatatggtgcagtccgagcggtacctccaacagccatccccgcctatccaggaatagtcttacaggaaccaatcattagcgctaaaatacctcagggtggatatgcagcctacagatatgcacagcctgctactgcaaccgcagccaccgctgctgcagccgctgcagccgcttacagtgacggttatggcagggtgtacacagccgacccctaccatgcccttgcccctgccgctagctatggagttggcgctgtggcgagtttataccgaggtggctacagccgatttgccccctactgaagtgacgtgagacccctgcaaatgggacagccccccagttcatgaggcctggctattgcaatatttactagtagaggaactctatagcaagatgaagaggaaaaacaaacaaacaaacaaaaaaaaacacaaaaaaagaaagaatacttttttatacctcactatgttctttgaatatgtatttttcctttaaatttctgcctttaattcttttgttccaaagattgtgcatttttttctttttttttttaaactgtggtaaaaaaaaaaaaaataatgcatttccatgtctgtatgtccgtgcttagcttattctatcaatcacggaagaggcagtcaaggaggaaggagagacattaggagccgataaatgcatctgatcagaaatcagcagacagaattaccaaagtgtatctggtgctgaatgactgggggacaagcagaagtggaagagatctttctgcaacaggatattcttctagtcttctgagtttctggtctttgacaggcaattctggttggctgtggctggaatccacatgctgatagataggaatttgtgcttacaaagcaggagaattaaaaagacgctttcctctcctcttccctcctgtcttctccgttctttttacaatcatcttacacgcacagcctgagacagctggcatagtttttggaattatagtattgatatttccaaacgtgctctcagacagtggataataaacacctcattaggaaaccgatctcagaatgaactctggagtatgaaaaagatcatttctttttgttcctgtaacctagcattccttctaggcttcttctcctttaattgaaccacagcttagctcatgtattcttttattaacaccctgctctcatgtccataagattcaggaatttaggacccagggacagaaaagtgaataagccagtgaccagatttcccccagatgtcttgaggattagaagtacaaattgttgacagccattaaagagggtgaggaagggaaaaggaatattagaagatctggtatttcttacttttttcttgcctcagaaagtacaaagtttaaaaaatagaataaagaatctgctggggaaagatagagtaccaggtcctaggtcagtagtccctggaagttttggtgatgaggacatggaagggcaggcagaggcactttgtacttgctccaaagccataggaattttcatcttccagagcctttatgagtcacttctctatccacagtcttgagcctgtggctatcccgctgagcttctcactgtcctccaaaaacaccccgctgagcacccggaccactttgtacacattaacactacaggacataaaatgcagaggccctgagattgctgccctcccatattggaaggagggtctgcgatggcaagggtcttctatatcaccagaaagagtcgcgcagtgagtcactgccgttgccatctggctgtaattttctatgttatcaaggtaggagggagtgtttctcttctagctgttagatagaactgataaaagcaagtgtcctacagcatttcccaaatgaaggcattaggaaatagaaaagcacggtctttttggctccctggtctagtcacattggtactagggtgacctttcacccaagggacagctgctaaagggagtaattcagagacatggagcttctggttatgggtttgttttgggtttgtttttaactcctgcctccacacatgttcttgactgataactgactcatgtccctgaattaaaatgactgacctatgacagcatcagcattctttgtaagcagagtgatatatctgagagggcgttgacctgttgtgtagaatacatatcctttcccccttcagaatcctgtctcgcctcgtaactgggagagaggctgtgcctgaaactaggggcgatgtcaaggaagctagaggcctcgatgcaattattactgactctggggaggaagacagagaataaggggacaccaactgcccagtccactggccatttttaagggtccccccaccccaagccaaagtttggtttgttgctgttaagacaatttttgttgtatgtatataaatattttagttagaggagcggggaatgggatgcgggctttcacagttctagggaatgggggcagggaggattttgcttttgcttttgctttgagggagaactttagctgactaaaaaaacagaagtttggggtcatgatcacaaaggggccattcccaaaagatggcaagccacgtattcagtggagactaggccaaattctaaatggttttatccatagcaggggagaataggagaatgagtttaagagtttttctcttcttttttcctagaaagaggtaaggataatgggaaaggtagagaaggcggctcccacagaccttttaagagaggcagaatcttgagcttgaggcaccttgagtgcatctcagttcagctggttctggctgaggcctccaaaggcaagctctgtgctttccagtggtttctgctgcatttccagggatggtgtttaacaccgcttcctccagctcccttttctaagaaagaataaatggagttctgctttttatgaaagggtctttggttttcagtgtcaacactgagaattggggctcttgcaagcatctggatttcacagtatcaacctccccgtcaccttttgaactttgagactccgtacggtcaacttcaccagaggcaggttgctcgaagcagcactgcttgtctgttcctgactctggttctcactgtattaaaaaaagagagtcagaggagtctggcatttcgtgagtttgttagaggatgctggctgataattccagaaaacttactgatgctaaatcacagtacatgcatgattctttttcagctttactatagttcatgacctggactttctgtactcttggaagctgggctccttaaaggaggcctctagtgaacacctttatctccatgtccctcttagagcccagagagctgcccataggcattttccagaattcctcatgtcacctagttcaatttccattaactcagatcagccattgtgattcaccatttgtcaggctctcaggtttaacaaaacctactatcaccatcatccttcaacagccacagtctgaattgagccaacatttttttttctttgagaaagaagtggactggggcacaacttttagtctgaggggagctagtggaaatctagacaatagaagtcatcgatagcagcttttcctcaaatgtgtgactcctcaggggctaaactgctcttagcttagaattatgctttactagagatctagcagataagtgggttaatcactaccatcctgtaactagttatatagcttccagacatgagggagacatcaaacagggatggaagcaaccccaaggatatgcaagaagggcatgatgaacccccttccctctggcaggagaacaaggccaaccaagggacagactggaaagcacttagatgtttaaggaggagaaaggggaagctttgaccagtccttgccttttgccaagttcagccagttctccgctgcttgcaacctctagcgcagtaacatttgcagaattgcagattttcccccagatactaggaggaaagggactttggggggtggggaaggggtcgtggtgttttaaaagcataagttacctgtttgcactgttttaagataggaaaaaaaaatagtgggcaaggtgaacatcagacgtaaatttgtgtgtttttattttgtcatgctcttgaaaatgtttgaccatttgtagtatacacagtgaaacttgattctctgttgcataaaacactatatttttttggaaatgttactgtccaaaagcctcttccctccctttccttttcctatgtacttccttcatacttgctttactgatcagccaggcaatagccatccaagagctagagcatgaaacagggccctttccaagtaggctctgggtgtcctaagccagcgtgtgccctctggtttagtgagtgtaatagagtccctggcacctttctttgcaaatgaggctaacagaccagactgcagcaagttatcagattcctcaatcagatgcactaggagtgaggagcccagggatggagggggttcctgaagtattgcagttggctgtagtagctgagttcttttccatgttaccgaaactgtagccagttacagtttactcaggaaaacggtagatcaattcagccatggtagtgctggttggcagggattggtaacggagagaactgctcatcagccaaaactcaagccttgccttttaggaggccaccagcagagggacttggtcctccttgtctggtacttgtgtacatgccggtgacctgaggactccactcacactggcgagcaaaaagggagcagtgattctcttttctctccccaccccctgccctttgttaccaacaccagtttcccagggggtacatgagtttctgaatttttaaaaaatgtttttggtttggtttttctggggactgataagtgctttaagcaatgtccataccccgtcaagactcccagcttagtcattttcttgtatttttctgttcacagtatttgtgtgtgtgcttgttttggcagctcattttggctgtattatatattgagtgatgaattgatcctcttttttccctaagggatatgaattgtttttcttgtgttatattctgcttgtgaatagctggagcaaacctggggctgacacgcgtaagctagggctgcaaagcgagaagagagccggtggagtgtacttgtccctgacaggctgacctacctgagtctctgagcttttcagtccaaatctttgcaaggctcaaaatgccacagaacctctcctcttctccccactccccatggcagggaccggaccatccctacatgcaacatgctgttcctccagcccctcccattgccatggcaaaacaggtacctttggggcatgggggcattacatgggatgcttgtgtaatcgaccacctagccttctctctcccctcccgtcctcccccagaatcacttcctaggacacccgagctgcttgcccagggtcctgtttccctgctaactccagagaagcatcccagggctttgtgacagtctctaattcccttcccttctcgttaagaatcatattgtatagtagctttcagaccatacagtattcattgggttactcctattattatcaagtagctggaattgtgaaggtcggagtagttagatctttagcttttattccttatttttttgtattactctccatgtgtataaattattgatcatgttgctggcttttataaactctaagcgaaggaggagcactgcctcagcctttgcacatggtaatgaagcactgtttttaaataaaagagagaaacaccaaaaaaaaaaaaaagacacacaggggggggctaaattccgagggccgagtaacgtcccggttttgaaaggcctaagggggaaaaaagacggcggaaaccgagggaagcacggttgagagcc

SEQ ID NO: 317777 - DNA, 5871 bp, Homo sapiens
tgtgggcgggtgtgtgtttttctgtacacctggggggagaggtatctgtaaagtcagttctcttctctcctgtagggtggatatgcagcctacagatatgcacagcctgctactgcaaccgcagccaccgctgctgcagccgctgcagccgcttacagtgacggttatggcagggtgtacacagccgacccctaccatgcccttgcccctgccgctagctatggagttggcgctgtggcgagtttataccgaggtggctacagccgatttgccccctactgaagtgacgtgagacccctgcaaatgggacagccccccagttcatgaggcctggctattgcaatatttactagtagaggaactctatagcaagatgaagaggaaaaacaaacaaacaaacaaaaaaaaacacaaaaaaagaaagaatacttttttatacctcactatgttctttgaatatgtatttttcctttaaatttctgcctttaattcttttgttccaaagattgtgcatttttttctttttttttttaaactgtggtaaaaaaaaaaaaaataatgcatttccatgtctgtatgtccgtgcttagcttattctatcaatcacggaagaggcagtcaaggaggaaggagagacattaggagccgataaatgcatctgatcagaaatcagcagacagaattaccaaagtgtatctggtgctgaatgactgggggacaagcagaagtggaagagatctttctgcaacaggatattcttctagtcttctgagtttctggtctttgacaggcaattctggttggctgtggctggaatccacatgctgatagataggaatttgtgcttacaaagcaggagaattaaaaagacgctttcctctcctcttccctcctgtcttctccgttctttttacaatcatcttacacgcacagcctgagacagctggcatagtttttggaattatagtattgatatttccaaacgtgctctcagacagtggataataaacacctcattaggaaaccgatctcagaatgaactctggagtatgaaaaagatcatttctttttgttcctgtaacctagcattccttctaggcttcttctcctttaattgaaccacagcttagctcatgtattcttttattaacaccctgctctcatgtccataagattcaggaatttaggacccagggacagaaaagtgaataagccagtgaccagatttcccccagatgtcttgaggattagaagtacaaattgttgacagccattaaagagggtgaggaagggaaaaggaatattagaagatctggtatttcttacttttttcttgcctcagaaagtacaaagtttaaaaaatagaataaagaatctgctggggaaagatagagtaccaggtcctaggtcagtagtccctggaagttttggtgatgaggacatggaagggcaggcagaggcactttgtacttgctccaaagccataggaattttcatcttccagagcctttatgagtcacttctctatccacagtcttgagcctgtggctatcccgctgagcttctcactgtcctccaaaaacaccccgctgagcacccggaccactttgtacacattaacactacaggacataaaatgcagaggccctgagattgctgccctcccatattggaaggagggtctgcgatggcaagggtcttctatatcaccagaaagagtcgcgcagtgagtcactgccgttgccatctggctgtaattttctatgttatcaaggtaggagggagtgtttctcttctagctgttagatagaactgataaaagcaagtgtcctacagcatttcccaaatgaaggcattaggaaatagaaaagcacggtctttttggctccctggtctagtcacattggtactagggtgacctttcacccaagggacagctgctaaagggagtaattcagagacatggagcttctggttatgggtttgttttgggtttgtttttaactcctgcctccacacatgttcttgactgataactgactcatgtccctgaattaaaatgactgacctatgacagcatcagcattctttgtaagcagagtgatatatctgagagggcgttgacctgttgtgtagaatacatatcctttcccccttcagaatcctgtctcgcctcgtaactgggagagaggctgtgcctgaaactaggggcgatgtcaaggaagctagaggcctcgatgcaattattactgactctggggaggaagacagagaataaggggacaccaactgcccagtccactggccatttttaagggtccccccaccccaagccaaagtttggtttgttgctgttaagacaatttttgttgtatgtatataaatattttagttagaggagcggggaatgggatgcgggctttcacagttctagggaatgggggcagggaggattttgcttttgcttttgctttgagggagaactttagctgactaaaaaaacagaagtttggggtcatgatcacaaaggggccattcccaaaagatggcaagccacgtattcagtggagactaggccaaattctaaatggttttatccatagcaggggagaataggagaatgagtttaagagtttttctcttcttttttcctagaaagaggtaaggataatgggaaaggtagagaaggcggctcccacagaccttttaagagaggcagaatcttgagcttgaggcaccttgagtgcatctcagttcagctggttctggctgaggcctccaaaggcaagctctgtgctttccagtggtttctgctgcatttccagggatggtgtttaacaccgcttcctccagctcccttttctaagaaagaataaatggagttctgctttttatgaaagggtctttggttttcagtgtcaacactgagaattggggctcttgcaagcatctggatttcacagtatcaacctccccgtcaccttttgaactttgagactccgtacggtcaacttcaccagaggcaggttgctcgaagcagcactgcttgtctgttcctgactctggttctcactgtattaaaaaaagagagtcagaggagtctggcatttcgtgagtttgttagaggatgctggctgataattccagaaaacttactgatgctaaatcacagtacatgcatgattctttttcagctttactatagttcatgacctggactttctgtactcttggaagctgggctccttaaaggaggcctctagtgaacacctttatctccatgtccctcttagagcccagagagctgcccataggcattttccagaattcctcatgtcacctagttcaatttccattaactcagatcagccattgtgattcaccatttgtcaggctctcaggtttaacaaaacctactatcaccatcatccttcaacagccacagtctgaattgagccaacatttttttttctttgagaaagaagtggactggggcacaacttttagtctgaggggagctagtggaaatctagacaatagaagtcatcgatagcagcttttcctcaaatgtgtgactcctcaggggctaaactgctcttagcttagaattatgctttactagagatctagcagataagtgggttaatcactaccatcctgtaactagttatatagcttccagacatgagggagacatcaaacagggatggaagcaaccccaaggatatgcaagaagggcatgatgaacccccttccctctggcaggagaacaaggccaaccaagggacagactggaaagcacttagatgtttaaggaggagaaaggggaagctttgaccagtccttgccttttgccaagttcagccagttctccgctgcttgcaacctctagcgcagtaacatttgcagaattgcagattttcccccagatactaggaggaaagggactttggggggtggggaaggggtcgtggtgttttaaaagcataagttacctgtttgcactgttttaagataggaaaaaaaaatagtgggcaaggtgaacatcagacgtaaatttgtgtgtttttattttgtcatgctcttgaaaatgtttgaccatttgtagtatacacagtgaaacttgattctctgttgcataaaacactatatttttttggaaatgttactgtccaaaagcctcttccctccctttccttttcctatgtacttccttcatacttgctttactgatcagccaggcaatagccatccaagagctagagcatgaaacagggccctttccaagtaggctctgggtgtcctaagccagcgtgtgccctctggtttagtgagtgtaatagagtccctggcacctttctttgcaaatgaggctaacagaccagactgcagcaagttatcagattcctcaatcagatgcactaggagtgaggagcccagggatggagggggttcctgaagtattgcagttggctgtagtagctgagttcttttccatgttaccgaaactgtagccagttacagtttactcaggaaaacggtagatcaattcagccatggtagtgctggttggcagggattggtaacggagagaactgctcatcagccaaaactcaagccttgccttttaggaggccaccagcagagggacttggtcctccttgtctggtacttgtgtacatgccggtgacctgaggactccactcacactggcgagcaaaaagggagcagtgattctcttttctctccccaccccctgccctttgttaccaacaccagtttcccagggggtacatgagtttctgaatttttaaaaaatgtttttggtttggtttttctggggactgataagtgctttaagcaatgtccataccccgtcaagactcccagcttagtcattttcttgtatttttctgttcacagtatttgtgtgtgtgcttgttttggcagctcattttggctgtattatatattgagtgatgaattgatcctcttttttccctaagggatatgaattgtttttcttgtgttatattctgcttgtgaatagctggagcaaacctggggctgacacgcgtaagctagggctgcaaagcgagaagagagccggtggagtgtacttgtccctgacaggctgacctacctgagtctctgagcttttcagtccaaatctttgcaaggctcaaaatgccacagaacctctcctcttctccccactccccatggcagggaccggaccatccctacatgcaacatgctgttcctccagcccctcccattgccatggcaaaacaggtacctttggggcatgggggcattacatgggatgcttgtgtaatcgaccacctagccttctctctcccctcccgtcctcccccagaatcacttcctaggacacccgagctgcttgcccagggtcctgtttccctgctaactccagagaagcatcccagggctttgtgacagtctctaattcccttcccttctcgttaagaatcatattgtatagtagctttcagaccatacagtattcattgggttactcctattattatcaagtagctggaattgtgaaggtcggagtagttagatctttagcttttattccttatttttttgtattactctccatgtgtataaattattgatcatgttgctggcttttataaactctaagcgaaggaggagcactgcctcagcctttgcacatggtaatgaagcactgtttttaaataaaagagagaaacaccaaaaaaaaaaaaaagacacacaggggggggctaaattccgagggccgagtaacgtcccggttttgaaaggcctaagggggaaaaaagacggcggaaaccgagggaagcacggttgagagcc
